United States Patent Application Publication US 2025/0305002 A1 - sequence listing, part 4

SEQ ID NO: 2487 - protein, 2091 aa, synthetic construct
MPAAKRVKLDGGDKKYSIGLDIGTNSVGWAVITDEYKVPSKKFKVLGNTDRHSIKKNLIGALLFDSGETAEATRLKRTARRRYTRRKNRICYLQEIFSNEMAKVDDSFFHRLEESFLVEEDKKHERHPIFGNIVDEVAYHEKYPTIYHLRKKLVDSTDKADLRLIYLALAHMIKFRGHFLIEGDLNPDNSDVDKLFIQLVQTYNQLFEENPINASGVDAKAILSARLSKSRRLENLIAQLPGEKKNGLFGNLIALSLGLTPNFKSNFDLAEDAKLQLSKDTYDDDLDNLLAQIGDQYADLFLAAKNLSDAILLSDILRVNTEITKAPLSASMIKRYDEHHQDLTLLKALVRQQLPEKYKEIFFDQSKNGYAGYIDGGASQEEFYKFIKPILEKMDGTEELLVKLNREDLLRKQRTFDNGSIPHQIHLGELHAILRRQEDFYPFLKDNREKIEKILTFRIPYYVGPLARGNSRFAWMTRKSEETITPWNFEEVVDKGASAQSFIERMTNFDKNLPNEKVLPKHSLLYEYFTVYNELTKVKYVTEGMRKPAFLSGEQKKAIVDLLFKTNRKVTVKQLKEDYFKKIECFDSVEISGVEDRFNASLGTYHDLLKIIKDKDFLDNEENEDILEDIVLTLTLFEDREMIEERLKTYAHLFDDKVMKQLKRRRYTGWGRLSRKLINGIRDKQSGKTILDFLKSDGFANRNFMQLIHDDSLTFKEDIQKAQVSGQGDSLHEHIANLAGSPAIKKGILQTVKVVDELVKVMGRHKPENIVIEMARENQTTQKGQKNSRERMKRIEEGIKELGSQILKEHPVENTQLQNEKLYLYYLQNGRDMYVDQELDINRLSDYDVDHIVPQSFLKDDSIDNKVLTRSDKARGKSDNVPSEEVVKKMKNYWRQLLNAKLITQRKFDNLTKAERGGLSELDKAGFIKRQLVETRQITKHVAQILDSRMNTKYDENDKLIREVKVITLKSKLVSDFRKDFQFYKVREINNYHHAHDAYLNAVVGTALIKKYPKLESEFVYGDYKVYDVRKMIAKSEQEIGKATAKYFFYSNIMNFFKTEITLANGEIRKRPLIETNGETGEIVWDKGRDFATVRKVLSMPQVNIVKKTEVQTGGFSKESILPKRNSDKLIARKKDWDPKKYGGFDSPTVAYSVLVVAKVEKGKSKKLKSVKELLGITIMERSSFEKNPIDFLEAKGYKEVKKDLIIKLPKYSLFELENGRKRMLASAGELQKGNELALPSKYVNFLYLASHYEKLKGSPEDNEQKQLFVEQHKHYLDEIIEQISEFSKRVILADANLDKVLSAYNKHRDKPIREQAENIIHLFTLTNLGAPAAFKYFDTTIDRKRYTSTKEVLDATLIHQSITGLYETRIDLSQLGGDGGGGSGSSGGTLNIEDEYRLHETSKGPDVPLGSTWLSDFPQAWAETGGMGLAVRQAPLIIPLKATSTPVSIKQYPMSQEARLGIKPHIQRLLDQGILVPCQSPWNTPLLPVKKPGTNDYRPVQDLREVNKRVEDIHPTVPNPYNLLSGLPPSHQWYTVLDLKDAFFCLRLHPTSQSLFAFEWRDPEMGISGQLTWTRLPQGFKNSPTLFNEALHRDLADFRIQHPDLILLQYVDDLLLAATSELDCQQGTRALLQTLGDLGYRASAKKAQICQKQVKYLGYLLKEGQRWLTEARKETVMGQPTPKTPRQLREFLGTAGFCRLWIPGFAEMAAPLYPLTKPGTLFEWGPDQQKAYQEIKQALLTAPALGLPDLTKPFELFVDEKQGYAKGVLTQKLGPWRRPVAYLSKKLDPVAAGWPPCLRMVAAIAVLTKDAGKLTMGQPLVILAPHAVEALVKQPPDRWLSNARMTHYQALLLDTDRVQFGPIVALNPATLLPLPEEGLQHDCLDILAEAHGTRPDLTDQPLPDADHTWYTDGSSFLQEGQRKAGAAVTTETEVVWAKALPAGTSAQRAELIALTQALKMAEGKKLNVYTDSRYAFATAHIHGEIYRRRGWLTSEGKEIKNKDEILALLKALFLPKRLSIIHCPGHQKGNRAEARGNRMADQAAREVATRETPETSTLLAGKRTADGSEFEKRTADGSEFESPKKKAKVE

SEQ ID NO: 2488 - protein, 2096 aa, synthetic construct
MPAAKRVKLDGGDKKYSIGLDIGTNSVGWAVITDEYKVPSKKFKVLGNTDRHSIKKNLIGALLFDSGETAEATRLKRTARRRYTRRKNRICYLQEIFSNEMAKVDDSFFHRLEESFLVEEDKKHERHPIFGNIVDEVAYHEKYPTIYHLRKKLVDSTDKADLRLIYLALAHMIKFRGHFLIEGDLNPDNSDVDKLFIQLVQTYNQLFEENPINASGVDAKAILSARLSKSRRLENLIAQLPGEKKNGLFGNLIALSLGLTPNFKSNFDLAEDAKLQLSKDTYDDDLDNLLAQIGDQYADLFLAAKNLSDAILLSDILRVNTEITKAPLSASMIKRYDEHHQDLTLLKALVRQQLPEKYKEIFFDQSKNGYAGYIDGGASQEEFYKFIKPILEKMDGTEELLVKLNREDLLRKQRTFDNGSIPHQIHLGELHAILRRQEDFYPFLKDNREKIEKILTFRIPYYVGPLARGNSRFAWMTRKSEETITPWNFEEVVDKGASAQSFIERMTNFDKNLPNEKVLPKHSLLYEYFTVYNELTKVKYVTEGMRKPAFLSGEQKKAIVDLLFKTNRKVTVKQLKEDYFKKIECFDSVEISGVEDRFNASLGTYHDLLKIIKDKDFLDNEENEDILEDIVLTLTLFEDREMIEERLKTYAHLFDDKVMKQLKRRRYTGWGRLSRKLINGIRDKQSGKTILDFLKSDGFANRNFMQLIHDDSLTFKEDIQKAQVSGQGDSLHEHIANLAGSPAIKKGILQTVKVVDELVKVMGRHKPENIVIEMARENQTTQKGQKNSRERMKRIEEGIKELGSQILKEHPVENTQLQNEKLYLYYLQNGRDMYVDQELDINRLSDYDVDHIVPQSFLKDDSIDNKVLTRSDKARGKSDNVPSEEVVKKMKNYWRQLLNAKLITQRKFDNLTKAERGGLSELDKAGFIKRQLVETRQITKHVAQILDSRMNTKYDENDKLIREVKVITLKSKLVSDFRKDFQFYKVREINNYHHAHDAYLNAVVGTALIKKYPKLESEFVYGDYKVYDVRKMIAKSEQEIGKATAKYFFYSNIMNFFKTEITLANGEIRKRPLIETNGETGEIVWDKGRDFATVRKVLSMPQVNIVKKTEVQTGGFSKESILPKRNSDKLIARKKDWDPKKYGGFDSPTVAYSVLVVAKVEKGKSKKLKSVKELLGITIMERSSFEKNPIDFLEAKGYKEVKKDLIIKLPKYSLFELENGRKRMLASAGELQKGNELALPSKYVNFLYLASHYEKLKGSPEDNEQKQLFVEQHKHYLDEIIEQISEFSKRVILADANLDKVLSAYNKHRDKPIREQAENIIHLFTLTNLGAPAAFKYFDTTIDRKRYTSTKEVLDATLIHQSITGLYETRIDLSQLGGDGGGSSGGSEAAAKGGTLNIEDEYRLHETSKGPDVPLGSTWLSDFPQAWAETGGMGLAVRQAPLIIPLKATSTPVSIKQYPMSQEARLGIKPHIQRLLDQGILVPCQSPWNTPLLPVKKPGTNDYRPVQDLREVNKRVEDIHPTVPNPYNLLSGLPPSHQWYTVLDLKDAFFCLRLHPTSQSLFAFEWRDPEMGISGQLTWTRLPQGFKNSPTLFNEALHRDLADFRIQHPDLILLQYVDDLLLAATSELDCQQGTRALLQTLGDLGYRASAKKAQICQKQVKYLGYLLKEGQRWLTEARKETVMGQPTPKTPRQLREFLGTAGFCRLWIPGFAEMAAPLYPLTKPGTLFEWGPDQQKAYQEIKQALLTAPALGLPDLTKPFELFVDEKQGYAKGVLTQKLGPWRRPVAYLSKKLDPVAAGWPPCLRMVAAIAVLTKDAGKLTMGQPLVILAPHAVEALVKQPPDRWLSNARMTHYQALLLDTDRVQFGPIVALNPATLLPLPEEGLQHDCLDILAEAHGTRPDLTDQPLPDADHTWYTDGSSFLQEGQRKAGAAVTTETEVVWAKALPAGTSAQRAELIALTQALKMAEGKKLNVYTDSRYAFATAHIHGEIYRRRGWLTSEGKEIKNKDEILALLKALFLPKRLSIIHCPGHQKGNRAEARGNRMADQAAREVATRETPETSTLLAGKRTADGSEFEKRTADGSEFESPKKKAKVE

SEQ ID NO: 2489 - protein, 2101 aa, synthetic construct
MPAAKRVKLDGGDKKYSIGLDIGTNSVGWAVITDEYKVPSKKFKVLGNTDRHSIKKNLIGALLFDSGETAEATRLKRTARRRYTRRKNRICYLQEIFSNEMAKVDDSFFHRLEESFLVEEDKKHERHPIFGNIVDEVAYHEKYPTIYHLRKKLVDSTDKADLRLIYLALAHMIKFRGHFLIEGDLNPDNSDVDKLFIQLVQTYNQLFEENPINASGVDAKAILSARLSKSRRLENLIAQLPGEKKNGLFGNLIALSLGLTPNFKSNFDLAEDAKLQLSKDTYDDDLDNLLAQIGDQYADLFLAAKNLSDAILLSDILRVNTEITKAPLSASMIKRYDEHHQDLTLLKALVRQQLPEKYKEIFFDQSKNGYAGYIDGGASQEEFYKFIKPILEKMDGTEELLVKLNREDLLRKQRTFDNGSIPHQIHLGELHAILRRQEDFYPFLKDNREKIEKILTFRIPYYVGPLARGNSRFAWMTRKSEETITPWNFEEVVDKGASAQSFIERMTNFDKNLPNEKVLPKHSLLYEYFTVYNELTKVKYVTEGMRKPAFLSGEQKKAIVDLLFKTNRKVTVKQLKEDYFKKIECFDSVEISGVEDRFNASLGTYHDLLKIIKDKDFLDNEENEDILEDIVLTLTLFEDREMIEERLKTYAHLFDDKVMKQLKRRRYTGWGRLSRKLINGIRDKQSGKTILDFLKSDGFANRNFMQLIHDDSLTFKEDIQKAQVSGQGDSLHEHIANLAGSPAIKKGILQTVKVVDELVKVMGRHKPENIVIEMARENQTTQKGQKNSRERMKRIEEGIKELGSQILKEHPVENTQLQNEKLYLYYLQNGRDMYVDQELDINRLSDYDVDHIVPQSFLKDDSIDNKVLTRSDKARGKSDNVPSEEVVKKMKNYWRQLLNAKLITQRKFDNLTKAERGGLSELDKAGFIKRQLVETRQITKHVAQILDSRMNTKYDENDKLIREVKVITLKSKLVSDFRKDFQFYKVREINNYHHAHDAYLNAVVGTALIKKYPKLESEFVYGDYKVYDVRKMIAKSEQEIGKATAKYFFYSNIMNFFKTEITLANGEIRKRPLIETNGETGEIVWDKGRDFATVRKVLSMPQVNIVKKTEVQTGGFSKESILPKRNSDKLIARKKDWDPKKYGGFDSPTVAYSVLVVAKVEKGKSKKLKSVKELLGITIMERSSFEKNPIDFLEAKGYKEVKKDLIIKLPKYSLFELENGRKRMLASAGELQKGNELALPSKYVNFLYLASHYEKLKGSPEDNEQKQLFVEQHKHYLDEIIEQISEFSKRVILADANLDKVLSAYNKHRDKPIREQAENIIHLFTLTNLGAPAAFKYFDTTIDRKRYTSTKEVLDATLIHQSITGLYETRIDLSQLGGDGGSGSETPGTSESATPESGGTLNIEDEYRLHETSKGPDVPLGSTWLSDFPQAWAETGGMGLAVRQAPLIIPLKATSTPVSIKQYPMSQEARLGIKPHIQRLLDQGILVPCQSPWNTPLLPVKKPGTNDYRPVQDLREVNKRVEDIHPTVPNPYNLLSGLPPSHQWYTVLDLKDAFFCLRLHPTSQSLFAFEWRDPEMGISGQLTWTRLPQGFKNSPTLFNEALHRDLADFRIQHPDLILLQYVDDLLLAATSELDCQQGTRALLQTLGDLGYRASAKKAQICQKQVKYLGYLLKEGQRWLTEARKETVMGQPTPKTPRQLREFLGTAGFCRLWIPGFAEMAAPLYPLTKPGTLFEWGPDQQKAYQEIKQALLTAPALGLPDLTKPFELFVDEKQGYAKGVLTQKLGPWRRPVAYLSKKLDPVAAGWPPCLRMVAAIAVLTKDAGKLTMGQPLVILAPHAVEALVKQPPDRWLSNARMTHYQALLLDTDRVQFGPIVALNPATLLPLPEEGLQHDCLDILAEAHGTRPDLTDQPLPDADHTWYTDGSSFLQEGQRKAGAAVTTETEVVWAKALPAGTSAQRAELIALTQALKMAEGKKLNVYTDSRYAFATAHIHGEIYRRRGWLTSEGKEIKNKDEILALLKALFLPKRLSIIHCPGHQKGNRAEARGNRMADQAAREVATRETPETSTLLAGKRTADGSEFEKRTADGSEFESPKKKAKVE

SEQ ID NO: 2490 - protein, 2097 aa, synthetic construct
MPAAKRVKLDGGDKKYSIGLDIGTNSVGWAVITDEYKVPSKKFKVLGNTDRHSIKKNLIGALLFDSGETAEATRLKRTARRRYTRRKNRICYLQEIFSNEMAKVDDSFFHRLEESFLVEEDKKHERHPIFGNIVDEVAYHEKYPTIYHLRKKLVDSTDKADLRLIYLALAHMIKFRGHFLIEGDLNPDNSDVDKLFIQLVQTYNQLFEENPINASGVDAKAILSARLSKSRRLENLIAQLPGEKKNGLFGNLIALSLGLTPNFKSNFDLAEDAKLQLSKDTYDDDLDNLLAQIGDQYADLFLAAKNLSDAILLSDILRVNTEITKAPLSASMIKRYDEHHQDLTLLKALVRQQLPEKYKEIFFDQSKNGYAGYIDGGASQEEFYKFIKPILEKMDGTEELLVKLNREDLLRKQRTFDNGSIPHQIHLGELHAILRRQEDFYPFLKDNREKIEKILTFRIPYYVGPLARGNSRFAWMTRKSEETITPWNFEEVVDKGASAQSFIERMTNFDKNLPNEKVLPKHSLLYEYFTVYNELTKVKYVTEGMRKPAFLSGEQKKAIVDLLFKTNRKVTVKQLKEDYFKKIECFDSVEISGVEDRFNASLGTYHDLLKIIKDKDFLDNEENEDILEDIVLTLTLFEDREMIEERLKTYAHLFDDKVMKQLKRRRYTGWGRLSRKLINGIRDKQSGKTILDFLKSDGFANRNFMQLIHDDSLTFKEDIQKAQVSGQGDSLHEHIANLAGSPAIKKGILQTVKVVDELVKVMGRHKPENIVIEMARENQTTQKGQKNSRERMKRIEEGIKELGSQILKEHPVENTQLQNEKLYLYYLQNGRDMYVDQELDINRLSDYDVDHIVPQSFLKDDSIDNKVLTRSDKARGKSDNVPSEEVVKKMKNYWRQLLNAKLITQRKFDNLTKAERGGLSELDKAGFIKRQLVETRQITKHVAQILDSRMNTKYDENDKLIREVKVITLKSKLVSDFRKDFQFYKVREINNYHHAHDAYLNAVVGTALIKKYPKLESEFVYGDYKVYDVRKMIAKSEQEIGKATAKYFFYSNIMNFFKTEITLANGEIRKRPLIETNGETGEIVWDKGRDFATVRKVLSMPQVNIVKKTEVQTGGFSKESILPKRNSDKLIARKKDWDPKKYGGFDSPTVAYSVLVVAKVEKGKSKKLKSVKELLGITIMERSSFEKNPIDFLEAKGYKEVKKDLIIKLPKYSLFELENGRKRMLASAGELQKGNELALPSKYVNFLYLASHYEKLKGSPEDNEQKQLFVEQHKHYLDEIIEQISEFSKRVILADANLDKVLSAYNKHRDKPIREQAENIIHLFTLTNLGAPAAFKYFDTTIDRKRYTSTKEVLDATLIHQSITGLYETRIDLSQLGGDGGGSAGSAAGSGEFGGTLNIEDEYRLHETSKGPDVPLGSTWLSDFPQAWAETGGMGLAVRQAPLIIPLKATSTPVSIKQYPMSQEARLGIKPHIQRLLDQGILVPCQSPWNTPLLPVKKPGTNDYRPVQDLREVNKRVEDIHPTVPNPYNLLSGLPPSHQWYTVLDLKDAFFCLRLHPTSQSLFAFEWRDPEMGISGQLTWTRLPQGFKNSPTLFNEALHRDLADFRIQHPDLILLQYVDDLLLAATSELDCQQGTRALLQTLGDLGYRASAKKAQICQKQVKYLGYLLKEGQRWLTEARKETVMGQPTPKTPRQLREFLGTAGFCRLWIPGFAEMAAPLYPLTKPGTLFEWGPDQQKAYQEIKQALLTAPALGLPDLTKPFELFVDEKQGYAKGVLTQKLGPWRRPVAYLSKKLDPVAAGWPPCLRMVAAIAVLTKDAGKLTMGQPLVILAPHAVEALVKQPPDRWLSNARMTHYQALLLDTDRVQFGPIVALNPATLLPLPEEGLQHDCLDILAEAHGTRPDLTDQPLPDADHTWYTDGSSFLQEGQRKAGAAVTTETEVVWAKALPAGTSAQRAELIALTQALKMAEGKKLNVYTDSRYAFATAHIHGEIYRRRGWLTSEGKEIKNKDEILALLKALFLPKRLSIIHCPGHQKGNRAEARGNRMADQAAREVATRETPETSTLLAGKRTADGSEFEKRTADGSEFESPKKKAKVE

SEQ ID NO: 2491 - protein, 2094 aa, synthetic construct
MPAAKRVKLDGGDKKYSIGLDIGTNSVGWAVITDEYKVPSKKFKVLGNTDRHSIKKNLIGALLFDSGETAEATRLKRTARRRYTRRKNRICYLQEIFSNEMAKVDDSFFHRLEESFLVEEDKKHERHPIFGNIVDEVAYHEKYPTIYHLRKKLVDSTDKADLRLIYLALAHMIKFRGHFLIEGDLNPDNSDVDKLFIQLVQTYNQLFEENPINASGVDAKAILSARLSKSRRLENLIAQLPGEKKNGLFGNLIALSLGLTPNFKSNFDLAEDAKLQLSKDTYDDDLDNLLAQIGDQYADLFLAAKNLSDAILLSDILRVNTEITKAPLSASMIKRYDEHHQDLTLLKALVRQQLPEKYKEIFFDQSKNGYAGYIDGGASQEEFYKFIKPILEKMDGTEELLVKLNREDLLRKQRTFDNGSIPHQIHLGELHAILRRQEDFYPFLKDNREKIEKILTFRIPYYVGPLARGNSRFAWMTRKSEETITPWNFEEVVDKGASAQSFIERMTNFDKNLPNEKVLPKHSLLYEYFTVYNELTKVKYVTEGMRKPAFLSGEQKKAIVDLLFKTNRKVTVKQLKEDYFKKIECFDSVEISGVEDRFNASLGTYHDLLKIIKDKDFLDNEENEDILEDIVLTLTLFEDREMIEERLKTYAHLFDDKVMKQLKRRRYTGWGRLSRKLINGIRDKQSGKTILDFLKSDGFANRNFMQLIHDDSLTFKEDIQKAQVSGQGDSLHEHIANLAGSPAIKKGILQTVKVVDELVKVMGRHKPENIVIEMARENQTTQKGQKNSRERMKRIEEGIKELGSQILKEHPVENTQLQNEKLYLYYLQNGRDMYVDQELDINRLSDYDVDHIVPQSFLKDDSIDNKVLTRSDKARGKSDNVPSEEVVKKMKNYWRQLLNAKLITQRKFDNLTKAERGGLSELDKAGFIKRQLVETRQITKHVAQILDSRMNTKYDENDKLIREVKVITLKSKLVSDFRKDFQFYKVREINNYHHAHDAYLNAVVGTALIKKYPKLESEFVYGDYKVYDVRKMIAKSEQEIGKATAKYFFYSNIMNFFKTEITLANGEIRKRPLIETNGETGEIVWDKGRDFATVRKVLSMPQVNIVKKTEVQTGGFSKESILPKRNSDKLIARKKDWDPKKYGGFDSPTVAYSVLVVAKVEKGKSKKLKSVKELLGITIMERSSFEKNPIDFLEAKGYKEVKKDLIIKLPKYSLFELENGRKRMLASAGELQKGNELALPSKYVNFLYLASHYEKLKGSPEDNEQKQLFVEQHKHYLDEIIEQISEFSKRVILADANLDKVLSAYNKHRDKPIREQAENIIHLFTLTNLGAPAAFKYFDTTIDRKRYTSTKEVLDATLIHQSITGLYETRIDLSQLGGDGGGSSGGSPAPGGTLNIEDEYRLHETSKGPDVPLGSTWLSDFPQAWAETGGMGLAVRQAPLIIPLKATSTPVSIKQYPMSQEARLGIKPHIQRLLDQGILVPCQSPWNTPLLPVKKPGTNDYRPVQDLREVNKRVEDIHPTVPNPYNLLSGLPPSHQWYTVLDLKDAFFCLRLHPTSQSLFAFEWRDPEMGISGQLTWTRLPQGFKNSPTLFNEALHRDLADFRIQHPDLILLQYVDDLLLAATSELDCQQGTRALLQTLGDLGYRASAKKAQICQKQVKYLGYLLKEGQRWLTEARKETVMGQPTPKTPRQLREFLGTAGFCRLWIPGFAEMAAPLYPLTKPGTLFEWGPDQQKAYQEIKQALLTAPALGLPDLTKPFELFVDEKQGYAKGVLTQKLGPWRRPVAYLSKKLDPVAAGWPPCLRMVAAIAVLTKDAGKLTMGQPLVILAPHAVEALVKQPPDRWLSNARMTHYQALLLDTDRVQFGPIVALNPATLLPLPEEGLQHDCLDILAEAHGTRPDLTDQPLPDADHTWYTDGSSFLQEGQRKAGAAVTTETEVVWAKALPAGTSAQRAELIALTQALKMAEGKKLNVYTDSRYAFATAHIHGEIYRRRGWLTSEGKEIKNKDEILALLKALFLPKRLSIIHCPGHQKGNRAEARGNRMADQAAREVATRETPETSTLLAGKRTADGSEFEKRTADGSEFESPKKKAKVE

SEQ ID NO: 2492 - protein, 2091 aa, synthetic construct
MPAAKRVKLDGGDKKYSIGLDIGTNSVGWAVITDEYKVPSKKFKVLGNTDRHSIKKNLIGALLFDSGETAEATRLKRTARRRYTRRKNRICYLQEIFSNEMAKVDDSFFHRLEESFLVEEDKKHERHPIFGNIVDEVAYHEKYPTIYHLRKKLVDSTDKADLRLIYLALAHMIKFRGHFLIEGDLNPDNSDVDKLFIQLVQTYNQLFEENPINASGVDAKAILSARLSKSRRLENLIAQLPGEKKNGLFGNLIALSLGLTPNFKSNFDLAEDAKLQLSKDTYDDDLDNLLAQIGDQYADLFLAAKNLSDAILLSDILRVNTEITKAPLSASMIKRYDEHHQDLTLLKALVRQQLPEKYKEIFFDQSKNGYAGYIDGGASQEEFYKFIKPILEKMDGTEELLVKLNREDLLRKQRTFDNGSIPHQIHLGELHAILRRQEDFYPFLKDNREKIEKILTFRIPYYVGPLARGNSRFAWMTRKSEETITPWNFEEVVDKGASAQSFIERMTNFDKNLPNEKVLPKHSLLYEYFTVYNELTKVKYVTEGMRKPAFLSGEQKKAIVDLLFKTNRKVTVKQLKEDYFKKIECFDSVEISGVEDRFNASLGTYHDLLKIIKDKDFLDNEENEDILEDIVLTLTLFEDREMIEERLKTYAHLFDDKVMKQLKRRRYTGWGRLSRKLINGIRDKQSGKTILDFLKSDGFANRNFMQLIHDDSLTFKEDIQKAQVSGQGDSLHEHIANLAGSPAIKKGILQTVKVVDELVKVMGRHKPENIVIEMARENQTTQKGQKNSRERMKRIEEGIKELGSQILKEHPVENTQLQNEKLYLYYLQNGRDMYVDQELDINRLSDYDVDHIVPQSFLKDDSIDNKVLTRSDKARGKSDNVPSEEVVKKMKNYWRQLLNAKLITQRKFDNLTKAERGGLSELDKAGFIKRQLVETRQITKHVAQILDSRMNTKYDENDKLIREVKVITLKSKLVSDFRKDFQFYKVREINNYHHAHDAYLNAVVGTALIKKYPKLESEFVYGDYKVYDVRKMIAKSEQEIGKATAKYFFYSNIMNFFKTEITLANGEIRKRPLIETNGETGEIVWDKGRDFATVRKVLSMPQVNIVKKTEVQTGGFSKESILPKRNSDKLIARKKDWDPKKYGGFDSPTVAYSVLVVAKVEKGKSKKLKSVKELLGITIMERSSFEKNPIDFLEAKGYKEVKKDLIIKLPKYSLFELENGRKRMLASAGELQKGNELALPSKYVNFLYLASHYEKLKGSPEDNEQKQLFVEQHKHYLDEIIEQISEFSKRVILADANLDKVLSAYNKHRDKPIREQAENIIHLFTLTNLGAPAAFKYFDTTIDRKRYTSTKEVLDATLIHQSITGLYETRIDLSQLGGDGGPAPGGGGGTLNIEDEYRLHETSKGPDVPLGSTWLSDFPQAWAETGGMGLAVRQAPLIIPLKATSTPVSIKQYPMSQEARLGIKPHIQRLLDQGILVPCQSPWNTPLLPVKKPGTNDYRPVQDLREVNKRVEDIHPTVPNPYNLLSGLPPSHQWYTVLDLKDAFFCLRLHPTSQSLFAFEWRDPEMGISGQLTWTRLPQGFKNSPTLFNEALHRDLADFRIQHPDLILLQYVDDLLLAATSELDCQQGTRALLQTLGDLGYRASAKKAQICQKQVKYLGYLLKEGQRWLTEARKETVMGQPTPKTPRQLREFLGTAGFCRLWIPGFAEMAAPLYPLTKPGTLFEWGPDQQKAYQEIKQALLTAPALGLPDLTKPFELFVDEKQGYAKGVLTQKLGPWRRPVAYLSKKLDPVAAGWPPCLRMVAAIAVLTKDAGKLTMGQPLVILAPHAVEALVKQPPDRWLSNARMTHYQALLLDTDRVQFGPIVALNPATLLPLPEEGLQHDCLDILAEAHGTRPDLTDQPLPDADHTWYTDGSSFLQEGQRKAGAAVTTETEVVWAKALPAGTSAQRAELIALTQALKMAEGKKLNVYTDSRYAFATAHIHGEIYRRRGWLTSEGKEIKNKDEILALLKALFLPKRLSIIHCPGHQKGNRAEARGNRMADQAAREVATRETPETSTLLAGKRTADGSEFEKRTADGSEFESPKKKAKVE

SEQ ID NO: 2493 - protein, 2094 aa, synthetic construct
MPAAKRVKLDGGDKKYSIGLDIGTNSVGWAVITDEYKVPSKKFKVLGNTDRHSIKKNLIGALLFDSGETAEATRLKRTARRRYTRRKNRICYLQEIFSNEMAKVDDSFFHRLEESFLVEEDKKHERHPIFGNIVDEVAYHEKYPTIYHLRKKLVDSTDKADLRLIYLALAHMIKFRGHFLIEGDLNPDNSDVDKLFIQLVQTYNQLFEENPINASGVDAKAILSARLSKSRRLENLIAQLPGEKKNGLFGNLIALSLGLTPNFKSNFDLAEDAKLQLSKDTYDDDLDNLLAQIGDQYADLFLAAKNLSDAILLSDILRVNTEITKAPLSASMIKRYDEHHQDLTLLKALVRQQLPEKYKEIFFDQSKNGYAGYIDGGASQEEFYKFIKPILEKMDGTEELLVKLNREDLLRKQRTFDNGSIPHQIHLGELHAILRRQEDFYPFLKDNREKIEKILTFRIPYYVGPLARGNSRFAWMTRKSEETITPWNFEEVVDKGASAQSFIERMTNFDKNLPNEKVLPKHSLLYEYFTVYNELTKVKYVTEGMRKPAFLSGEQKKAIVDLLFKTNRKVTVKQLKEDYFKKIECFDSVEISGVEDRFNASLGTYHDLLKIIKDKDFLDNEENEDILEDIVLTLTLFEDREMIEERLKTYAHLFDDKVMKQLKRRRYTGWGRLSRKLINGIRDKQSGKTILDFLKSDGFANRNFMQLIHDDSLTFKEDIQKAQVSGQGDSLHEHIANLAGSPAIKKGILQTVKVVDELVKVMGRHKPENIVIEMARENQTTQKGQKNSRERMKRIEEGIKELGSQILKEHPVENTQLQNEKLYLYYLQNGRDMYVDQELDINRLSDYDVDHIVPQSFLKDDSIDNKVLTRSDKARGKSDNVPSEEVVKKMKNYWRQLLNAKLITQRKFDNLTKAERGGLSELDKAGFIKRQLVETRQITKHVAQILDSRMNTKYDENDKLIREVKVITLKSKLVSDFRKDFQFYKVREINNYHHAHDAYLNAVVGTALIKKYPKLESEFVYGDYKVYDVRKMIAKSEQEIGKATAKYFFYSNIMNFFKTEITLANGEIRKRPLIETNGETGEIVWDKGRDFATVRKVLSMPQVNIVKKTEVQTGGFSKESILPKRNSDKLIARKKDWDPKKYGGFDSPTVAYSVLVVAKVEKGKSKKLKSVKELLGITIMERSSFEKNPIDFLEAKGYKEVKKDLIIKLPKYSLFELENGRKRMLASAGELQKGNELALPSKYVNFLYLASHYEKLKGSPEDNEQKQLFVEQHKHYLDEIIEQISEFSKRVILADANLDKVLSAYNKHRDKPIREQAENIIHLFTLTNLGAPAAFKYFDTTIDRKRYTSTKEVLDATLIHQSITGLYETRIDLSQLGGDGGPAPGGSGGGGGTLNIEDEYRLHETSKGPDVPLGSTWLSDFPQAWAETGGMGLAVRQAPLIIPLKATSTPVSIKQYPMSQEARLGIKPHIQRLLDQGILVPCQSPWNTPLLPVKKPGTNDYRPVQDLREVNKRVEDIHPTVPNPYNLLSGLPPSHQWYTVLDLKDAFFCLRLHPTSQSLFAFEWRDPEMGISGQLTWTRLPQGFKNSPTLFNEALHRDLADFRIQHPDLILLQYVDDLLLAATSELDCQQGTRALLQTLGDLGYRASAKKAQICQKQVKYLGYLLKEGQRWLTEARKETVMGQPTPKTPRQLREFLGTAGFCRLWIPGFAEMAAPLYPLTKPGTLFEWGPDQQKAYQEIKQALLTAPALGLPDLTKPFELFVDEKQGYAKGVLTQKLGPWRRPVAYLSKKLDPVAAGWPPCLRMVAAIAVLTKDAGKLTMGQPLVILAPHAVEALVKQPPDRWLSNARMTHYQALLLDTDRVQFGPIVALNPATLLPLPEEGLQHDCLDILAEAHGTRPDLTDQPLPDADHTWYTDGSSFLQEGQRKAGAAVTTETEVVWAKALPAGTSAQRAELIALTQALKMAEGKKLNVYTDSRYAFATAHIHGEIYRRRGWLTSEGKEIKNKDEILALLKALFLPKRLSIIHCPGHQKGNRAEARGNRMADQAAREVATRETPETSTLLAGKRTADGSEFEKRTADGSEFESPKKKAKVE

SEQ ID NO: 2494 - protein, 2096 aa, synthetic construct
MPAAKRVKLDGGDKKYSIGLDIGTNSVGWAVITDEYKVPSKKFKVLGNTDRHSIKKNLIGALLFDSGETAEATRLKRTARRRYTRRKNRICYLQEIFSNEMAKVDDSFFHRLEESFLVEEDKKHERHPIFGNIVDEVAYHEKYPTIYHLRKKLVDSTDKADLRLIYLALAHMIKFRGHFLIEGDLNPDNSDVDKLFIQLVQTYNQLFEENPINASGVDAKAILSARLSKSRRLENLIAQLPGEKKNGLFGNLIALSLGLTPNFKSNFDLAEDAKLQLSKDTYDDDLDNLLAQIGDQYADLFLAAKNLSDAILLSDILRVNTEITKAPLSASMIKRYDEHHQDLTLLKALVRQQLPEKYKEIFFDQSKNGYAGYIDGGASQEEFYKFIKPILEKMDGTEELLVKLNREDLLRKQRTFDNGSIPHQIHLGELHAILRRQEDFYPFLKDNREKIEKILTFRIPYYVGPLARGNSRFAWMTRKSEETITPWNFEEVVDKGASAQSFIERMTNFDKNLPNEKVLPKHSLLYEYFTVYNELTKVKYVTEGMRKPAFLSGEQKKAIVDLLFKTNRKVTVKQLKEDYFKKIECFDSVEISGVEDRFNASLGTYHDLLKIIKDKDFLDNEENEDILEDIVLTLTLFEDREMIEERLKTYAHLFDDKVMKQLKRRRYTGWGRLSRKLINGIRDKQSGKTILDFLKSDGFANRNFMQLIHDDSLTFKEDIQKAQVSGQGDSLHEHIANLAGSPAIKKGILQTVKVVDELVKVMGRHKPENIVIEMARENQTTQKGQKNSRERMKRIEEGIKELGSQILKEHPVENTQLQNEKLYLYYLQNGRDMYVDQELDINRLSDYDVDHIVPQSFLKDDSIDNKVLTRSDKARGKSDNVPSEEVVKKMKNYWRQLLNAKLITQRKFDNLTKAERGGLSELDKAGFIKRQLVETRQITKHVAQILDSRMNTKYDENDKLIREVKVITLKSKLVSDFRKDFQFYKVREINNYHHAHDAYLNAVVGTALIKKYPKLESEFVYGDYKVYDVRKMIAKSEQEIGKATAKYFFYSNIMNFFKTEITLANGEIRKRPLIETNGETGEIVWDKGRDFATVRKVLSMPQVNIVKKTEVQTGGFSKESILPKRNSDKLIARKKDWDPKKYGGFDSPTVAYSVLVVAKVEKGKSKKLKSVKELLGITIMERSSFEKNPIDFLEAKGYKEVKKDLIIKLPKYSLFELENGRKRMLASAGELQKGNELALPSKYVNFLYLASHYEKLKGSPEDNEQKQLFVEQHKHYLDEIIEQISEFSKRVILADANLDKVLSAYNKHRDKPIREQAENIIHLFTLTNLGAPAAFKYFDTTIDRKRYTSTKEVLDATLIHQSITGLYETRIDLSQLGGDGGPAPEAAAKGGGGGTLNIEDEYRLHETSKGPDVPLGSTWLSDFPQAWAETGGMGLAVRQAPLIIPLKATSTPVSIKQYPMSQEARLGIKPHIQRLLDQGILVPCQSPWNTPLLPVKKPGTNDYRPVQDLREVNKRVEDIHPTVPNPYNLLSGLPPSHQWYTVLDLKDAFFCLRLHPTSQSLFAFEWRDPEMGISGQLTWTRLPQGFKNSPTLFNEALHRDLADFRIQHPDLILLQYVDDLLLAATSELDCQQGTRALLQTLGDLGYRASAKKAQICQKQVKYLGYLLKEGQRWLTEARKETVMGQPTPKTPRQLREFLGTAGFCRLWIPGFAEMAAPLYPLTKPGTLFEWGPDQQKAYQEIKQALLTAPALGLPDLTKPFELFVDEKQGYAKGVLTQKLGPWRRPVAYLSKKLDPVAAGWPPCLRMVAAIAVLTKDAGKLTMGQPLVILAPHAVEALVKQPPDRWLSNARMTHYQALLLDTDRVQFGPIVALNPATLLPLPEEGLQHDCLDILAEAHGTRPDLTDQPLPDADHTWYTDGSSFLQEGQRKAGAAVTTETEVVWAKALPAGTSAQRAELIALTQALKMAEGKKLNVYTDSRYAFATAHIHGEIYRRRGWLTSEGKEIKNKDEILALLKALFLPKRLSIIHCPGHQKGNRAEARGNRMADQAAREVATRETPETSTLLAGKRTADGSEFEKRTADGSEFESPKKKAKVE

SEQ ID NO: 2495 - protein, 2096 aa, synthetic construct
MPAAKRVKLDGGDKKYSIGLDIGTNSVGWAVITDEYKVPSKKFKVLGNTDRHSIKKNLIGALLFDSGETAEATRLKRTARRRYTRRKNRICYLQEIFSNEMAKVDDSFFHRLEESFLVEEDKKHERHPIFGNIVDEVAYHEKYPTIYHLRKKLVDSTDKADLRLIYLALAHMIKFRGHFLIEGDLNPDNSDVDKLFIQLVQTYNQLFEENPINASGVDAKAILSARLSKSRRLENLIAQLPGEKKNGLFGNLIALSLGLTPNFKSNFDLAEDAKLQLSKDTYDDDLDNLLAQIGDQYADLFLAAKNLSDAILLSDILRVNTEITKAPLSASMIKRYDEHHQDLTLLKALVRQQLPEKYKEIFFDQSKNGYAGYIDGGASQEEFYKFIKPILEKMDGTEELLVKLNREDLLRKQRTFDNGSIPHQIHLGELHAILRRQEDFYPFLKDNREKIEKILTFRIPYYVGPLARGNSRFAWMTRKSEETITPWNFEEVVDKGASAQSFIERMTNFDKNLPNEKVLPKHSLLYEYFTVYNELTKVKYVTEGMRKPAFLSGEQKKAIVDLLFKTNRKVTVKQLKEDYFKKIECFDSVEISGVEDRFNASLGTYHDLLKIIKDKDFLDNEENEDILEDIVLTLTLFEDREMIEERLKTYAHLFDDKVMKQLKRRRYTGWGRLSRKLINGIRDKQSGKTILDFLKSDGFANRNFMQLIHDDSLTFKEDIQKAQVSGQGDSLHEHIANLAGSPAIKKGILQTVKVVDELVKVMGRHKPENIVIEMARENQTTQKGQKNSRERMKRIEEGIKELGSQILKEHPVENTQLQNEKLYLYYLQNGRDMYVDQELDINRLSDYDVDHIVPQSFLKDDSIDNKVLTRSDKARGKSDNVPSEEVVKKMKNYWRQLLNAKLITQRKFDNLTKAERGGLSELDKAGFIKRQLVETRQITKHVAQILDSRMNTKYDENDKLIREVKVITLKSKLVSDFRKDFQFYKVREINNYHHAHDAYLNAVVGTALIKKYPKLESEFVYGDYKVYDVRKMIAKSEQEIGKATAKYFFYSNIMNFFKTEITLANGEIRKRPLIETNGETGEIVWDKGRDFATVRKVLSMPQVNIVKKTEVQTGGFSKESILPKRNSDKLIARKKDWDPKKYGGFDSPTVAYSVLVVAKVEKGKSKKLKSVKELLGITIMERSSFEKNPIDFLEAKGYKEVKKDLIIKLPKYSLFELENGRKRMLASAGELQKGNELALPSKYVNFLYLASHYEKLKGSPEDNEQKQLFVEQHKHYLDEIIEQISEFSKRVILADANLDKVLSAYNKHRDKPIREQAENIIHLFTLTNLGAPAAFKYFDTTIDRKRYTSTKEVLDATLIHQSITGLYETRIDLSQLGGDGGEAAAKPAPGGSGGTLNIEDEYRLHETSKGPDVPLGSTWLSDFPQAWAETGGMGLAVRQAPLIIPLKATSTPVSIKQYPMSQEARLGIKPHIQRLLDQGILVPCQSPWNTPLLPVKKPGTNDYRPVQDLREVNKRVEDIHPTVPNPYNLLSGLPPSHQWYTVLDLKDAFFCLRLHPTSQSLFAFEWRDPEMGISGQLTWTRLPQGFKNSPTLFNEALHRDLADFRIQHPDLILLQYVDDLLLAATSELDCQQGTRALLQTLGDLGYRASAKKAQICQKQVKYLGYLLKEGQRWLTEARKETVMGQPTPKTPRQLREFLGTAGFCRLWIPGFAEMAAPLYPLTKPGTLFEWGPDQQKAYQEIKQALLTAPALGLPDLTKPFELFVDEKQGYAKGVLTQKLGPWRRPVAYLSKKLDPVAAGWPPCLRMVAAIAVLTKDAGKLTMGQPLVILAPHAVEALVKQPPDRWLSNARMTHYQALLLDTDRVQFGPIVALNPATLLPLPEEGLQHDCLDILAEAHGTRPDLTDQPLPDADHTWYTDGSSFLQEGQRKAGAAVTTETEVVWAKALPAGTSAQRAELIALTQALKMAEGKKLNVYTDSRYAFATAHIHGEIYRRRGWLTSEGKEIKNKDEILALLKALFLPKRLSIIHCPGHQKGNRAEARGNRMADQAAREVATRETPETSTLLAGKRTADGSEFEKRTADGSEFESPKKKAKVE

SEQ ID NO: 2496 - protein, 2094 aa, synthetic construct
MPAAKRVKLDGGDKKYSIGLDIGTNSVGWAVITDEYKVPSKKFKVLGNTDRHSIKKNLIGALLFDSGETAEATRLKRTARRRYTRRKNRICYLQEIFSNEMAKVDDSFFHRLEESFLVEEDKKHERHPIFGNIVDEVAYHEKYPTIYHLRKKLVDSTDKADLRLIYLALAHMIKFRGHFLIEGDLNPDNSDVDKLFIQLVQTYNQLFEENPINASGVDAKAILSARLSKSRRLENLIAQLPGEKKNGLFGNLIALSLGLTPNFKSNFDLAEDAKLQLSKDTYDDDLDNLLAQIGDQYADLFLAAKNLSDAILLSDILRVNTEITKAPLSASMIKRYDEHHQDLTLLKALVRQQLPEKYKEIFFDQSKNGYAGYIDGGASQEEFYKFIKPILEKMDGTEELLVKLNREDLLRKQRTFDNGSIPHQIHLGELHAILRRQEDFYPFLKDNREKIEKILTFRIPYYVGPLARGNSRFAWMTRKSEETITPWNFEEVVDKGASAQSFIERMTNFDKNLPNEKVLPKHSLLYEYFTVYNELTKVKYVTEGMRKPAFLSGEQKKAIVDLLFKTNRKVTVKQLKEDYFKKIECFDSVEISGVEDRFNASLGTYHDLLKIIKDKDFLDNEENEDILEDIVLTLTLFEDREMIEERLKTYAHLFDDKVMKQLKRRRYTGWGRLSRKLINGIRDKQSGKTILDFLKSDGFANRNFMQLIHDDSLTFKEDIQKAQVSGQGDSLHEHIANLAGSPAIKKGILQTVKVVDELVKVMGRHKPENIVIEMARENQTTQKGQKNSRERMKRIEEGIKELGSQILKEHPVENTQLQNEKLYLYYLQNGRDMYVDQELDINRLSDYDVDHIVPQSFLKDDSIDNKVLTRSDKARGKSDNVPSEEVVKKMKNYWRQLLNAKLITQRKFDNLTKAERGGLSELDKAGFIKRQLVETRQITKHVAQILDSRMNTKYDENDKLIREVKVITLKSKLVSDFRKDFQFYKVREINNYHHAHDAYLNAVVGTALIKKYPKLESEFVYGDYKVYDVRKMIAKSEQEIGKATAKYFFYSNIMNFFKTEITLANGEIRKRPLIETNGETGEIVWDKGRDFATVRKVLSMPQVNIVKKTEVQTGGFSKESILPKRNSDKLIARKKDWDPKKYGGFDSPTVAYSVLVVAKVEKGKSKKLKSVKELLGITIMERSSFEKNPIDFLEAKGYKEVKKDLIIKLPKYSLFELENGRKRMLASAGELQKGNELALPSKYVNFLYLASHYEKLKGSPEDNEQKQLFVEQHKHYLDEIIEQISEFSKRVILADANLDKVLSAYNKHRDKPIREQAENIIHLFTLTNLGAPAAFKYFDTTIDRKRYTSTKEVLDATLIHQSITGLYETRIDLSQLGGDGGGGGPAPGGSGGTLNIEDEYRLHETSKGPDVPLGSTWLSDFPQAWAETGGMGLAVRQAPLIIPLKATSTPVSIKQYPMSQEARLGIKPHIQRLLDQGILVPCQSPWNTPLLPVKKPGTNDYRPVQDLREVNKRVEDIHPTVPNPYNLLSGLPPSHQWYTVLDLKDAFFCLRLHPTSQSLFAFEWRDPEMGISGQLTWTRLPQGFKNSPTLFNEALHRDLADFRIQHPDLILLQYVDDLLLAATSELDCQQGTRALLQTLGDLGYRASAKKAQICQKQVKYLGYLLKEGQRWLTEARKETVMGQPTPKTPRQLREFLGTAGFCRLWIPGFAEMAAPLYPLTKPGTLFEWGPDQQKAYQEIKQALLTAPALGLPDLTKPFELFVDEKQGYAKGVLTQKLGPWRRPVAYLSKKLDPVAAGWPPCLRMVAAIAVLTKDAGKLTMGQPLVILAPHAVEALVKQPPDRWLSNARMTHYQALLLDTDRVQFGPIVALNPATLLPLPEEGLQHDCLDILAEAHGTRPDLTDQPLPDADHTWYTDGSSFLQEGQRKAGAAVTTETEVVWAKALPAGTSAQRAELIALTQALKMAEGKKLNVYTDSRYAFATAHIHGEIYRRRGWLTSEGKEIKNKDEILALLKALFLPKRLSIIHCPGHQKGNRAEARGNRMADQAAREVATRETPETSTLLAGKRTADGSEFEKRTADGSEFESPKKKAKVE

SEQ ID NO: 2497 - protein, 2091 aa, synthetic construct
MPAAKRVKLDGGDKKYSIGLDIGTNSVGWAVITDEYKVPSKKFKVLGNTDRHSIKKNLIGALLFDSGETAEATRLKRTARRRYTRRKNRICYLQEIFSNEMAKVDDSFFHRLEESFLVEEDKKHERHPIFGNIVDEVAYHEKYPTIYHLRKKLVDSTDKADLRLIYLALAHMIKFRGHFLIEGDLNPDNSDVDKLFIQLVQTYNQLFEENPINASGVDAKAILSARLSKSRRLENLIAQLPGEKKNGLFGNLIALSLGLTPNFKSNFDLAEDAKLQLSKDTYDDDLDNLLAQIGDQYADLFLAAKNLSDAILLSDILRVNTEITKAPLSASMIKRYDEHHQDLTLLKALVRQQLPEKYKEIFFDQSKNGYAGYIDGGASQEEFYKFIKPILEKMDGTEELLVKLNREDLLRKQRTFDNGSIPHQIHLGELHAILRRQEDFYPFLKDNREKIEKILTFRIPYYVGPLARGNSRFAWMTRKSEETITPWNFEEVVDKGASAQSFIERMTNFDKNLPNEKVLPKHSLLYEYFTVYNELTKVKYVTEGMRKPAFLSGEQKKAIVDLLFKTNRKVTVKQLKEDYFKKIECFDSVEISGVEDRFNASLGTYHDLLKIIKDKDFLDNEENEDILEDIVLTLTLFEDREMIEERLKTYAHLFDDKVMKQLKRRRYTGWGRLSRKLINGIRDKQSGKTILDFLKSDGFANRNFMQLIHDDSLTFKEDIQKAQVSGQGDSLHEHIANLAGSPAIKKGILQTVKVVDELVKVMGRHKPENIVIEMARENQTTQKGQKNSRERMKRIEEGIKELGSQILKEHPVENTQLQNEKLYLYYLQNGRDMYVDQELDINRLSDYDVDHIVPQSFLKDDSIDNKVLTRSDKARGKSDNVPSEEVVKKMKNYWRQLLNAKLITQRKFDNLTKAERGGLSELDKAGFIKRQLVETRQITKHVAQILDSRMNTKYDENDKLIREVKVITLKSKLVSDFRKDFQFYKVREINNYHHAHDAYLNAVVGTALIKKYPKLESEFVYGDYKVYDVRKMIAKSEQEIGKATAKYFFYSNIMNFFKTEITLANGEIRKRPLIETNGETGEIVWDKGRDFATVRKVLSMPQVNIVKKTEVQTGGFSKESILPKRNSDKLIARKKDWDPKKYGGFDSPTVAYSVLVVAKVEKGKSKKLKSVKELLGITIMERSSFEKNPIDFLEAKGYKEVKKDLIIKLPKYSLFELENGRKRMLASAGELQKGNELALPSKYVNFLYLASHYEKLKGSPEDNEQKQLFVEQHKHYLDEIIEQISEFSKRVILADANLDKVLSAYNKHRDKPIREQAENIIHLFTLTNLGAPAAFKYFDTTIDRKRYTSTKEVLDATLIHQSITGLYETRIDLSQLGGDGGPAPGGSGGTLNIEDEYRLHETSKGPDVPLGSTWLSDFPQAWAETGGMGLAVRQAPLIIPLKATSTPVSIKQYPMSQEARLGIKPHIQRLLDQGILVPCQSPWNTPLLPVKKPGTNDYRPVQDLREVNKRVEDIHPTVPNPYNLLSGLPPSHQWYTVLDLKDAFFCLRLHPTSQSLFAFEWRDPEMGISGQLTWTRLPQGFKNSPTLFNEALHRDLADFRIQHPDLILLQYVDDLLLAATSELDCQQGTRALLQTLGDLGYRASAKKAQICQKQVKYLGYLLKEGQRWLTEARKETVMGQPTPKTPRQLREFLGTAGFCRLWIPGFAEMAAPLYPLTKPGTLFEWGPDQQKAYQEIKQALLTAPALGLPDLTKPFELFVDEKQGYAKGVLTQKLGPWRRPVAYLSKKLDPVAAGWPPCLRMVAAIAVLTKDAGKLTMGQPLVILAPHAVEALVKQPPDRWLSNARMTHYQALLLDTDRVQFGPIVALNPATLLPLPEEGLQHDCLDILAEAHGTRPDLTDQPLPDADHTWYTDGSSFLQEGQRKAGAAVTTETEVVWAKALPAGTSAQRAELIALTQALKMAEGKKLNVYTDSRYAFATAHIHGEIYRRRGWLTSEGKEIKNKDEILALLKALFLPKRLSIIHCPGHQKGNRAEARGNRMADQAAREVATRETPETSTLLAGKRTADGSEFEKRTADGSEFESPKKKAKVE

SEQ ID NO: 2498 - protein, 2094 aa, synthetic construct
MPAAKRVKLDGGDKKYSIGLDIGTNSVGWAVITDEYKVPSKKFKVLGNTDRHSIKKNLIGALLFDSGETAEATRLKRTARRRYTRRKNRICYLQEIFSNEMAKVDDSFFHRLEESFLVEEDKKHERHPIFGNIVDEVAYHEKYPTIYHLRKKLVDSTDKADLRLIYLALAHMIKFRGHFLIEGDLNPDNSDVDKLFIQLVQTYNQLFEENPINASGVDAKAILSARLSKSRRLENLIAQLPGEKKNGLFGNLIALSLGLTPNFKSNFDLAEDAKLQLSKDTYDDDLDNLLAQIGDQYADLFLAAKNLSDAILLSDILRVNTEITKAPLSASMIKRYDEHHQDLTLLKALVRQQLPEKYKEIFFDQSKNGYAGYIDGGASQEEFYKFIKPILEKMDGTEELLVKLNREDLLRKQRTFDNGSIPHQIHLGELHAILRRQEDFYPFLKDNREKIEKILTFRIPYYVGPLARGNSRFAWMTRKSEETITPWNFEEVVDKGASAQSFIERMTNFDKNLPNEKVLPKHSLLYEYFTVYNELTKVKYVTEGMRKPAFLSGEQKKAIVDLLFKTNRKVTVKQLKEDYFKKIECFDSVEISGVEDRFNASLGTYHDLLKIIKDKDFLDNEENEDILEDIVLTLTLFEDREMIEERLKTYAHLFDDKVMKQLKRRRYTGWGRLSRKLINGIRDKQSGKTILDFLKSDGFANRNFMQLIHDDSLTFKEDIQKAQVSGQGDSLHEHIANLAGSPAIKKGILQTVKVVDELVKVMGRHKPENIVIEMARENQTTQKGQKNSRERMKRIEEGIKELGSQILKEHPVENTQLQNEKLYLYYLQNGRDMYVDQELDINRLSDYDVDHIVPQSFLKDDSIDNKVLTRSDKARGKSDNVPSEEVVKKMKNYWRQLLNAKLITQRKFDNLTKAERGGLSELDKAGFIKRQLVETRQITKHVAQILDSRMNTKYDENDKLIREVKVITLKSKLVSDFRKDFQFYKVREINNYHHAHDAYLNAVVGTALIKKYPKLESEFVYGDYKVYDVRKMIAKSEQEIGKATAKYFFYSNIMNFFKTEITLANGEIRKRPLIETNGETGEIVWDKGRDFATVRKVLSMPQVNIVKKTEVQTGGFSKESILPKRNSDKLIARKKDWDPKKYGGFDSPTVAYSVLVVAKVEKGKSKKLKSVKELLGITIMERSSFEKNPIDFLEAKGYKEVKKDLIIKLPKYSLFELENGRKRMLASAGELQKGNELALPSKYVNFLYLASHYEKLKGSPEDNEQKQLFVEQHKHYLDEIIEQISEFSKRVILADANLDKVLSAYNKHRDKPIREQAENIIHLFTLTNLGAPAAFKYFDTTIDRKRYTSTKEVLDATLIHQSITGLYETRIDLSQLGGDGGGGGGGSPAPGGTLNIEDEYRLHETSKGPDVPLGSTWLSDFPQAWAETGGMGLAVRQAPLIIPLKATSTPVSIKQYPMSQEARLGIKPHIQRLLDQGILVPCQSPWNTPLLPVKKPGTNDYRPVQDLREVNKRVEDIHPTVPNPYNLLSGLPPSHQWYTVLDLKDAFFCLRLHPTSQSLFAFEWRDPEMGISGQLTWTRLPQGFKNSPTLFNEALHRDLADFRIQHPDLILLQYVDDLLLAATSELDCQQGTRALLQTLGDLGYRASAKKAQICQKQVKYLGYLLKEGQRWLTEARKETVMGQPTPKTPRQLREFLGTAGFCRLWIPGFAEMAAPLYPLTKPGTLFEWGPDQQKAYQEIKQALLTAPALGLPDLTKPFELFVDEKQGYAKGVLTQKLGPWRRPVAYLSKKLDPVAAGWPPCLRMVAAIAVLTKDAGKLTMGQPLVILAPHAVEALVKQPPDRWLSNARMTHYQALLLDTDRVQFGPIVALNPATLLPLPEEGLQHDCLDILAEAHGTRPDLTDQPLPDADHTWYTDGSSFLQEGQRKAGAAVTTETEVVWAKALPAGTSAQRAELIALTQALKMAEGKKLNVYTDSRYAFATAHIHGEIYRRRGWLTSEGKEIKNKDEILALLKALFLPKRLSIIHCPGHQKGNRAEARGNRMADQAAREVATRETPETSTLLAGKRTADGSEFEKRTADGSEFESPKKKAKVE

SEQ ID NO: 2499 - protein, 2094 aa, synthetic construct
MPAAKRVKLDGGDKKYSIGLDIGTNSVGWAVITDEYKVPSKKFKVLGNTDRHSIKKNLIGALLFDSGETAEATRLKRTARRRYTRRKNRICYLQEIFSNEMAKVDDSFFHRLEESFLVEEDKKHERHPIFGNIVDEVAYHEKYPTIYHLRKKLVDSTDKADLRLIYLALAHMIKFRGHFLIEGDLNPDNSDVDKLFIQLVQTYNQLFEENPINASGVDAKAILSARLSKSRRLENLIAQLPGEKKNGLFGNLIALSLGLTPNFKSNFDLAEDAKLQLSKDTYDDDLDNLLAQIGDQYADLFLAAKNLSDAILLSDILRVNTEITKAPLSASMIKRYDEHHQDLTLLKALVRQQLPEKYKEIFFDQSKNGYAGYIDGGASQEEFYKFIKPILEKMDGTEELLVKLNREDLLRKQRTFDNGSIPHQIHLGELHAILRRQEDFYPFLKDNREKIEKILTFRIPYYVGPLARGNSRFAWMTRKSEETITPWNFEEVVDKGASAQSFIERMTNFDKNLPNEKVLPKHSLLYEYFTVYNELTKVKYVTEGMRKPAFLSGEQKKAIVDLLFKTNRKVTVKQLKEDYFKKIECFDSVEISGVEDRFNASLGTYHDLLKIIKDKDFLDNEENEDILEDIVLTLTLFEDREMIEERLKTYAHLFDDKVMKQLKRRRYTGWGRLSRKLINGIRDKQSGKTILDFLKSDGFANRNFMQLIHDDSLTFKEDIQKAQVSGQGDSLHEHIANLAGSPAIKKGILQTVKVVDELVKVMGRHKPENIVIEMARENQTTQKGQKNSRERMKRIEEGIKELGSQILKEHPVENTQLQNEKLYLYYLQNGRDMYVDQELDINRLSDYDVDHIVPQSFLKDDSIDNKVLTRSDKARGKSDNVPSEEVVKKMKNYWRQLLNAKLITQRKFDNLTKAERGGLSELDKAGFIKRQLVETRQITKHVAQILDSRMNTKYDENDKLIREVKVITLKSKLVSDFRKDFQFYKVREINNYHHAHDAYLNAVVGTALIKKYPKLESEFVYGDYKVYDVRKMIAKSEQEIGKATAKYFFYSNIMNFFKTEITLANGEIRKRPLIETNGETGEIVWDKGRDFATVRKVLSMPQVNIVKKTEVQTGGFSKESILPKRNSDKLIARKKDWDPKKYGGFDSPTVAYSVLVVAKVEKGKSKKLKSVKELLGITIMERSSFEKNPIDFLEAKGYKEVKKDLIIKLPKYSLFELENGRKRMLASAGELQKGNELALPSKYVNFLYLASHYEKLKGSPEDNEQKQLFVEQHKHYLDEIIEQISEFSKRVILADANLDKVLSAYNKHRDKPIREQAENIIHLFTLTNLGAPAAFKYFDTTIDRKRYTSTKEVLDATLIHQSITGLYETRIDLSQLGGDGGGGSGGSGGSGGTLNIEDEYRLHETSKGPDVPLGSTWLSDFPQAWAETGGMGLAVRQAPLIIPLKATSTPVSIKQYPMSQEARLGIKPHIQRLLDQGILVPCQSPWNTPLLPVKKPGTNDYRPVQDLREVNKRVEDIHPTVPNPYNLLSGLPPSHQWYTVLDLKDAFFCLRLHPTSQSLFAFEWRDPEMGISGQLTWTRLPQGFKNSPTLFNEALHRDLADFRIQHPDLILLQYVDDLLLAATSELDCQQGTRALLQTLGDLGYRASAKKAQICQKQVKYLGYLLKEGQRWLTEARKETVMGQPTPKTPRQLREFLGTAGFCRLWIPGFAEMAAPLYPLTKPGTLFEWGPDQQKAYQEIKQALLTAPALGLPDLTKPFELFVDEKQGYAKGVLTQKLGPWRRPVAYLSKKLDPVAAGWPPCLRMVAAIAVLTKDAGKLTMGQPLVILAPHAVEALVKQPPDRWLSNARMTHYQALLLDTDRVQFGPIVALNPATLLPLPEEGLQHDCLDILAEAHGTRPDLTDQPLPDADHTWYTDGSSFLQEGQRKAGAAVTTETEVVWAKALPAGTSAQRAELIALTQALKMAEGKKLNVYTDSRYAFATAHIHGEIYRRRGWLTSEGKEIKNKDEILALLKALFLPKRLSIIHCPGHQKGNRAEARGNRMADQAAREVATRETPETSTLLAGKRTADGSEFEKRTADGSEFESPKKKAKVE

SEQ ID NO: 2500 - protein, 2093 aa, synthetic construct
MPAAKRVKLDGGDKKYSIGLDIGTNSVGWAVITDEYKVPSKKFKVLGNTDRHSIKKNLIGALLFDSGETAEATRLKRTARRRYTRRKNRICYLQEIFSNEMAKVDDSFFHRLEESFLVEEDKKHERHPIFGNIVDEVAYHEKYPTIYHLRKKLVDSTDKADLRLIYLALAHMIKFRGHFLIEGDLNPDNSDVDKLFIQLVQTYNQLFEENPINASGVDAKAILSARLSKSRRLENLIAQLPGEKKNGLFGNLIALSLGLTPNFKSNFDLAEDAKLQLSKDTYDDDLDNLLAQIGDQYADLFLAAKNLSDAILLSDILRVNTEITKAPLSASMIKRYDEHHQDLTLLKALVRQQLPEKYKEIFFDQSKNGYAGYIDGGASQEEFYKFIKPILEKMDGTEELLVKLNREDLLRKQRTFDNGSIPHQIHLGELHAILRRQEDFYPFLKDNREKIEKILTFRIPYYVGPLARGNSRFAWMTRKSEETITPWNFEEVVDKGASAQSFIERMTNFDKNLPNEKVLPKHSLLYEYFTVYNELTKVKYVTEGMRKPAFLSGEQKKAIVDLLFKTNRKVTVKQLKEDYFKKIECFDSVEISGVEDRFNASLGTYHDLLKIIKDKDFLDNEENEDILEDIVLTLTLFEDREMIEERLKTYAHLFDDKVMKQLKRRRYTGWGRLSRKLINGIRDKQSGKTILDFLKSDGFANRNFMQLIHDDSLTFKEDIQKAQVSGQGDSLHEHIANLAGSPAIKKGILQTVKVVDELVKVMGRHKPENIVIEMARENQTTQKGQKNSRERMKRIEEGIKELGSQILKEHPVENTQLQNEKLYLYYLQNGRDMYVDQELDINRLSDYDVDHIVPQSFLKDDSIDNKVLTRSDKARGKSDNVPSEEVVKKMKNYWRQLLNAKLITQRKFDNLTKAERGGLSELDKAGFIKRQLVETRQITKHVAQILDSRMNTKYDENDKLIREVKVITLKSKLVSDFRKDFQFYKVREINNYHHAHDAYLNAVVGTALIKKYPKLESEFVYGDYKVYDVRKMIAKSEQEIGKATAKYFFYSNIMNFFKTEITLANGEIRKRPLIETNGETGEIVWDKGRDFATVRKVLSMPQVNIVKKTEVQTGGFSKESILPKRNSDKLIARKKDWDPKKYGGFDSPTVAYSVLVVAKVEKGKSKKLKSVKELLGITIMERSSFEKNPIDFLEAKGYKEVKKDLIIKLPKYSLFELENGRKRMLASAGELQKGNELALPSKYVNFLYLASHYEKLKGSPEDNEQKQLFVEQHKHYLDEIIEQISEFSKRVILADANLDKVLSAYNKHRDKPIREQAENIIHLFTLTNLGAPAAFKYFDTTIDRKRYTSTKEVLDATLIHQSITGLYETRIDLSQLGGDGGGGGGGGGGGGTLNIEDEYRLHETSKGPDVPLGSTWLSDFPQAWAETGGMGLAVRQAPLIIPLKATSTPVSIKQYPMSQEARLGIKPHIQRLLDQGILVPCQSPWNTPLLPVKKPGTNDYRPVQDLREVNKRVEDIHPTVPNPYNLLSGLPPSHQWYTVLDLKDAFFCLRLHPTSQSLFAFEWRDPEMGISGQLTWTRLPQGFKNSPTLFNEALHRDLADFRIQHPDLILLQYVDDLLLAATSELDCQQGTRALLQTLGDLGYRASAKKAQICQKQVKYLGYLLKEGQRWLTEARKETVMGQPTPKTPRQLREFLGTAGFCRLWIPGFAEMAAPLYPLTKPGTLFEWGPDQQKAYQEIKQALLTAPALGLPDLTKPFELFVDEKQGYAKGVLTQKLGPWRRPVAYLSKKLDPVAAGWPPCLRMVAAIAVLTKDAGKLTMGQPLVILAPHAVEALVKQPPDRWLSNARMTHYQALLLDTDRVQFGPIVALNPATLLPLPEEGLQHDCLDILAEAHGTRPDLTDQPLPDADHTWYTDGSSFLQEGQRKAGAAVTTETEVVWAKALPAGTSAQRAELIALTQALKMAEGKKLNVYTDSRYAFATAHIHGEIYRRRGWLTSEGKEIKNKDEILALLKALFLPKRLSIIHCPGHQKGNRAEARGNRMADQAAREVATRETPETSTLLAGKRTADGSEFEKRTADGSEFESPKKKAKVE

SEQ ID NO: 2501 - protein, 2094 aa, synthetic construct
MPAAKRVKLDGGDKKYSIGLDIGTNSVGWAVITDEYKVPSKKFKVLGNTDRHSIKKNLIGALLFDSGETAEATRLKRTARRRYTRRKNRICYLQEIFSNEMAKVDDSFFHRLEESFLVEEDKKHERHPIFGNIVDEVAYHEKYPTIYHLRKKLVDSTDKADLRLIYLALAHMIKFRGHFLIEGDLNPDNSDVDKLFIQLVQTYNQLFEENPINASGVDAKAILSARLSKSRRLENLIAQLPGEKKNGLFGNLIALSLGLTPNFKSNFDLAEDAKLQLSKDTYDDDLDNLLAQIGDQYADLFLAAKNLSDAILLSDILRVNTEITKAPLSASMIKRYDEHHQDLTLLKALVRQQLPEKYKEIFFDQSKNGYAGYIDGGASQEEFYKFIKPILEKMDGTEELLVKLNREDLLRKQRTFDNGSIPHQIHLGELHAILRRQEDFYPFLKDNREKIEKILTFRIPYYVGPLARGNSRFAWMTRKSEETITPWNFEEVVDKGASAQSFIERMTNFDKNLPNEKVLPKHSLLYEYFTVYNELTKVKYVTEGMRKPAFLSGEQKKAIVDLLFKTNRKVTVKQLKEDYFKKIECFDSVEISGVEDRFNASLGTYHDLLKIIKDKDFLDNEENEDILEDIVLTLTLFEDREMIEERLKTYAHLFDDKVMKQLKRRRYTGWGRLSRKLINGIRDKQSGKTILDFLKSDGFANRNFMQLIHDDSLTFKEDIQKAQVSGQGDSLHEHIANLAGSPAIKKGILQTVKVVDELVKVMGRHKPENIVIEMARENQTTQKGQKNSRERMKRIEEGIKELGSQILKEHPVENTQLQNEKLYLYYLQNGRDMYVDQELDINRLSDYDVDHIVPQSFLKDDSIDNKVLTRSDKARGKSDNVPSEEVVKKMKNYWRQLLNAKLITQRKFDNLTKAERGGLSELDKAGFIKRQLVETRQITKHVAQILDSRMNTKYDENDKLIREVKVITLKSKLVSDFRKDFQFYKVREINNYHHAHDAYLNAVVGTALIKKYPKLESEFVYGDYKVYDVRKMIAKSEQEIGKATAKYFFYSNIMNFFKTEITLANGEIRKRPLIETNGETGEIVWDKGRDFATVRKVLSMPQVNIVKKTEVQTGGFSKESILPKRNSDKLIARKKDWDPKKYGGFDSPTVAYSVLVVAKVEKGKSKKLKSVKELLGITIMERSSFEKNPIDFLEAKGYKEVKKDLIIKLPKYSLFELENGRKRMLASAGELQKGNELALPSKYVNFLYLASHYEKLKGSPEDNEQKQLFVEQHKHYLDEIIEQISEFSKRVILADANLDKVLSAYNKHRDKPIREQAENIIHLFTLTNLGAPAAFKYFDTTIDRKRYTSTKEVLDATLIHQSITGLYETRIDLSQLGGDGGGSSPAPGGSGGTLNIEDEYRLHETSKGPDVPLGSTWLSDFPQAWAETGGMGLAVRQAPLIIPLKATSTPVSIKQYPMSQEARLGIKPHIQRLLDQGILVPCQSPWNTPLLPVKKPGTNDYRPVQDLREVNKRVEDIHPTVPNPYNLLSGLPPSHQWYTVLDLKDAFFCLRLHPTSQSLFAFEWRDPEMGISGQLTWTRLPQGFKNSPTLFNEALHRDLADFRIQHPDLILLQYVDDLLLAATSELDCQQGTRALLQTLGDLGYRASAKKAQICQKQVKYLGYLLKEGQRWLTEARKETVMGQPTPKTPRQLREFLGTAGFCRLWIPGFAEMAAPLYPLTKPGTLFEWGPDQQKAYQEIKQALLTAPALGLPDLTKPFELFVDEKQGYAKGVLTQKLGPWRRPVAYLSKKLDPVAAGWPPCLRMVAAIAVLTKDAGKLTMGQPLVILAPHAVEALVKQPPDRWLSNARMTHYQALLLDTDRVQFGPIVALNPATLLPLPEEGLQHDCLDILAEAHGTRPDLTDQPLPDADHTWYTDGSSFLQEGQRKAGAAVTTETEVVWAKALPAGTSAQRAELIALTQALKMAEGKKLNVYTDSRYAFATAHIHGEIYRRRGWLTSEGKEIKNKDEILALLKALFLPKRLSIIHCPGHQKGNRAEARGNRMADQAAREVATRETPETSTLLAGKRTADGSEFEKRTADGSEFESPKKKAKVE

SEQ ID NO: 2502 - protein, 2094 aa, synthetic construct
MPAAKRVKLDGGDKKYSIGLDIGTNSVGWAVITDEYKVPSKKFKVLGNTDRHSIKKNLIGALLFDSGETAEATRLKRTARRRYTRRKNRICYLQEIFSNEMAKVDDSFFHRLEESFLVEEDKKHERHPIFGNIVDEVAYHEKYPTIYHLRKKLVDSTDKADLRLIYLALAHMIKFRGHFLIEGDLNPDNSDVDKLFIQLVQTYNQLFEENPINASGVDAKAILSARLSKSRRLENLIAQLPGEKKNGLFGNLIALSLGLTPNFKSNFDLAEDAKLQLSKDTYDDDLDNLLAQIGDQYADLFLAAKNLSDAILLSDILRVNTEITKAPLSASMIKRYDEHHQDLTLLKALVRQQLPEKYKEIFFDQSKNGYAGYIDGGASQEEFYKFIKPILEKMDGTEELLVKLNREDLLRKQRTFDNGSIPHQIHLGELHAILRRQEDFYPFLKDNREKIEKILTFRIPYYVGPLARGNSRFAWMTRKSEETITPWNFEEVVDKGASAQSFIERMTNFDKNLPNEKVLPKHSLLYEYFTVYNELTKVKYVTEGMRKPAFLSGEQKKAIVDLLFKTNRKVTVKQLKEDYFKKIECFDSVEISGVEDRFNASLGTYHDLLKIIKDKDFLDNEENEDILEDIVLTLTLFEDREMIEERLKTYAHLFDDKVMKQLKRRRYTGWGRLSRKLINGIRDKQSGKTILDFLKSDGFANRNFMQLIHDDSLTFKEDIQKAQVSGQGDSLHEHIANLAGSPAIKKGILQTVKVVDELVKVMGRHKPENIVIEMARENQTTQKGQKNSRERMKRIEEGIKELGSQILKEHPVENTQLQNEKLYLYYLQNGRDMYVDQELDINRLSDYDVDHIVPQSFLKDDSIDNKVLTRSDKARGKSDNVPSEEVVKKMKNYWRQLLNAKLITQRKFDNLTKAERGGLSELDKAGFIKRQLVETRQITKHVAQILDSRMNTKYDENDKLIREVKVITLKSKLVSDFRKDFQFYKVREINNYHHAHDAYLNAVVGTALIKKYPKLESEFVYGDYKVYDVRKMIAKSEQEIGKATAKYFFYSNIMNFFKTEITLANGEIRKRPLIETNGETGEIVWDKGRDFATVRKVLSMPQVNIVKKTEVQTGGFSKESILPKRNSDKLIARKKDWDPKKYGGFDSPTVAYSVLVVAKVEKGKSKKLKSVKELLGITIMERSSFEKNPIDFLEAKGYKEVKKDLIIKLPKYSLFELENGRKRMLASAGELQKGNELALPSKYVNFLYLASHYEKLKGSPEDNEQKQLFVEQHKHYLDEIIEQISEFSKRVILADANLDKVLSAYNKHRDKPIREQAENIIHLFTLTNLGAPAAFKYFDTTIDRKRYTSTKEVLDATLIHQSITGLYETRIDLSQLGGDGGPAPGGGGGSGGTLNIEDEYRLHETSKGPDVPLGSTWLSDFPQAWAETGGMGLAVRQAPLIIPLKATSTPVSIKQYPMSQEARLGIKPHIQRLLDQGILVPCQSPWNTPLLPVKKPGTNDYRPVQDLREVNKRVEDIHPTVPNPYNLLSGLPPSHQWYTVLDLKDAFFCLRLHPTSQSLFAFEWRDPEMGISGQLTWTRLPQGFKNSPTLFNEALHRDLADFRIQHPDLILLQYVDDLLLAATSELDCQQGTRALLQTLGDLGYRASAKKAQICQKQVKYLGYLLKEGQRWLTEARKETVMGQPTPKTPRQLREFLGTAGFCRLWIPGFAEMAAPLYPLTKPGTLFEWGPDQQKAYQEIKQALLTAPALGLPDLTKPFELFVDEKQGYAKGVLTQKLGPWRRPVAYLSKKLDPVAAGWPPCLRMVAAIAVLTKDAGKLTMGQPLVILAPHAVEALVKQPPDRWLSNARMTHYQALLLDTDRVQFGPIVALNPATLLPLPEEGLQHDCLDILAEAHGTRPDLTDQPLPDADHTWYTDGSSFLQEGQRKAGAAVTTETEVVWAKALPAGTSAQRAELIALTQALKMAEGKKLNVYTDSRYAFATAHIHGEIYRRRGWLTSEGKEIKNKDEILALLKALFLPKRLSIIHCPGHQKGNRAEARGNRMADQAAREVATRETPETSTLLAGKRTADGSEFEKRTADGSEFESPKKKAKVE

SEQ ID NO: 2503 - protein, 2093 aa, synthetic construct
MPAAKRVKLDGGDKKYSIGLDIGTNSVGWAVITDEYKVPSKKFKVLGNTDRHSIKKNLIGALLFDSGETAEATRLKRTARRRYTRRKNRICYLQEIFSNEMAKVDDSFFHRLEESFLVEEDKKHERHPIFGNIVDEVAYHEKYPTIYHLRKKLVDSTDKADLRLIYLALAHMIKFRGHFLIEGDLNPDNSDVDKLFIQLVQTYNQLFEENPINASGVDAKAILSARLSKSRRLENLIAQLPGEKKNGLFGNLIALSLGLTPNFKSNFDLAEDAKLQLSKDTYDDDLDNLLAQIGDQYADLFLAAKNLSDAILLSDILRVNTEITKAPLSASMIKRYDEHHQDLTLLKALVRQQLPEKYKEIFFDQSKNGYAGYIDGGASQEEFYKFIKPILEKMDGTEELLVKLNREDLLRKQRTFDNGSIPHQIHLGELHAILRRQEDFYPFLKDNREKIEKILTFRIPYYVGPLARGNSRFAWMTRKSEETITPWNFEEVVDKGASAQSFIERMTNFDKNLPNEKVLPKHSLLYEYFTVYNELTKVKYVTEGMRKPAFLSGEQKKAIVDLLFKTNRKVTVKQLKEDYFKKIECFDSVEISGVEDRFNASLGTYHDLLKIIKDKDFLDNEENEDILEDIVLTLTLFEDREMIEERLKTYAHLFDDKVMKQLKRRRYTGWGRLSRKLINGIRDKQSGKTILDFLKSDGFANRNFMQLIHDDSLTFKEDIQKAQVSGQGDSLHEHIANLAGSPAIKKGILQTVKVVDELVKVMGRHKPENIVIEMARENQTTQKGQKNSRERMKRIEEGIKELGSQILKEHPVENTQLQNEKLYLYYLQNGRDMYVDQELDINRLSDYDVDHIVPQSFLKDDSIDNKVLTRSDKARGKSDNVPSEEVVKKMKNYWRQLLNAKLITQRKFDNLTKAERGGLSELDKAGFIKRQLVETRQITKHVAQILDSRMNTKYDENDKLIREVKVITLKSKLVSDFRKDFQFYKVREINNYHHAHDAYLNAVVGTALIKKYPKLESEFVYGDYKVYDVRKMIAKSEQEIGKATAKYFFYSNIMNFFKTEITLANGEIRKRPLIETNGETGEIVWDKGRDFATVRKVLSMPQVNIVKKTEVQTGGFSKESILPKRNSDKLIARKKDWDPKKYGGFDSPTVAYSVLVVAKVEKGKSKKLKSVKELLGITIMERSSFEKNPIDFLEAKGYKEVKKDLIIKLPKYSLFELENGRKRMLASAGELQKGNELALPSKYVNFLYLASHYEKLKGSPEDNEQKQLFVEQHKHYLDEIIEQISEFSKRVILADANLDKVLSAYNKHRDKPIREQAENIIHLFTLTNLGAPAAFKYFDTTIDRKRYTSTKEVLDATLIHQSITGLYETRIDLSQLGGDGGGSSEAAAKGGTLNIEDEYRLHETSKGPDVPLGSTWLSDFPQAWAETGGMGLAVRQAPLIIPLKATSTPVSIKQYPMSQEARLGIKPHIQRLLDQGILVPCQSPWNTPLLPVKKPGTNDYRPVQDLREVNKRVEDIHPTVPNPYNLLSGLPPSHQWYTVLDLKDAFFCLRLHPTSQSLFAFEWRDPEMGISGQLTWTRLPQGFKNSPTLFNEALHRDLADFRIQHPDLILLQYVDDLLLAATSELDCQQGTRALLQTLGDLGYRASAKKAQICQKQVKYLGYLLKEGQRWLTEARKETVMGQPTPKTPRQLREFLGKAGFCRLFIPGFAEMAAPLYPLTKPGTLFEWGPDQQKAYQEIKQALLTAPALGLPDLTKPFELFVDEKQGYAKGVLTQKLGPWRRPVAYLSKKLDPVAAGWPPCLRMVAAIAVLTKDAGKLTMGQPLVILAPHAVEALVKQPPDRWLSNARMTHYQALLLDTDRVQFGPIVALNPATLLPLPEEGLQHDCLDILAEAHGTRPDLTDQPLPDADHTWYTDGSSFLQEGQRKAGAAVTTETEVVWAKALPAGTSAQRAELIALTQALKMAEGKKLNVYTDSRYAFATAHIHGEIYRRRGWLTSEGKEIKNKDEILALLKALFLPKRLSIIHCPGHQKGNRAEARGNRMADQAAREVATRETPETSTLLAGKRTADGSEFEKRTADGSEFESPKKKAKVE

SEQ ID NO: 2504 - protein, 2090 aa, synthetic construct
MPAAKRVKLDGGDKKYSIGLDIGTNSVGWAVITDEYKVPSKKFKVLGNTDRHSIKKNLIGALLFDSGETAEATRLKRTARRRYTRRKNRICYLQEIFSNEMAKVDDSFFHRLEESFLVEEDKKHERHPIFGNIVDEVAYHEKYPTIYHLRKKLVDSTDKADLRLIYLALAHMIKFRGHFLIEGDLNPDNSDVDKLFIQLVQTYNQLFEENPINASGVDAKAILSARLSKSRRLENLIAQLPGEKKNGLFGNLIALSLGLTPNFKSNFDLAEDAKLQLSKDTYDDDLDNLLAQIGDQYADLFLAAKNLSDAILLSDILRVNTEITKAPLSASMIKRYDEHHQDLTLLKALVRQQLPEKYKEIFFDQSKNGYAGYIDGGASQEEFYKFIKPILEKMDGTEELLVKLNREDLLRKQRTFDNGSIPHQIHLGELHAILRRQEDFYPFLKDNREKIEKILTFRIPYYVGPLARGNSRFAWMTRKSEETITPWNFEEVVDKGASAQSFIERMTNFDKNLPNEKVLPKHSLLYEYFTVYNELTKVKYVTEGMRKPAFLSGEQKKAIVDLLFKTNRKVTVKQLKEDYFKKIECFDSVEISGVEDRFNASLGTYHDLLKIIKDKDFLDNEENEDILEDIVLTLTLFEDREMIEERLKTYAHLFDDKVMKQLKRRRYTGWGRLSRKLINGIRDKQSGKTILDFLKSDGFANRNFMQLIHDDSLTFKEDIQKAQVSGQGDSLHEHIANLAGSPAIKKGILQTVKVVDELVKVMGRHKPENIVIEMARENQTTQKGQKNSRERMKRIEEGIKELGSQILKEHPVENTQLQNEKLYLYYLQNGRDMYVDQELDINRLSDYDVDHIVPQSFLKDDSIDNKVLTRSDKARGKSDNVPSEEVVKKMKNYWRQLLNAKLITQRKFDNLTKAERGGLSELDKAGFIKRQLVETRQITKHVAQILDSRMNTKYDENDKLIREVKVITLKSKLVSDFRKDFQFYKVREINNYHHAHDAYLNAVVGTALIKKYPKLESEFVYGDYKVYDVRKMIAKSEQEIGKATAKYFFYSNIMNFFKTEITLANGEIRKRPLIETNGETGEIVWDKGRDFATVRKVLSMPQVNIVKKTEVQTGGFSKESILPKRNSDKLIARKKDWDPKKYGGFDSPTVAYSVLVVAKVEKGKSKKLKSVKELLGITIMERSSFEKNPIDFLEAKGYKEVKKDLIIKLPKYSLFELENGRKRMLASAGELQKGNELALPSKYVNFLYLASHYEKLKGSPEDNEQKQLFVEQHKHYLDEIIEQISEFSKRVILADANLDKVLSAYNKHRDKPIREQAENIIHLFTLTNLGAPAAFKYFDTTIDRKRYTSTKEVLDATLIHQSITGLYETRIDLSQLGGDGGGGGGSGGTLNIEDEYRLHETSKGPDVPLGSTWLSDFPQAWAETGGMGLAVRQAPLIIPLKATSTPVSIKQYPMSQEARLGIKPHIQRLLDQGILVPCQSPWNTPLLPVKKPGTNDYRPVQDLREVNKRVEDIHPTVPNPYNLLSGLPPSHQWYTVLDLKDAFFCLRLHPTSQSLFAFEWRDPEMGISGQLTWTRLPQGFKNSPTLFNEALHRDLADFRIQHPDLILLQYVDDLLLAATSELDCQQGTRALLQTLGDLGYRASAKKAQICQKQVKYLGYLLKEGQRWLTEARKETVMGQPTPKTPRQLREFLGKAGFCRLFIPGFAEMAAPLYPLTKPGTLFEWGPDQQKAYQEIKQALLTAPALGLPDLTKPFELFVDEKQGYAKGVLTQKLGPWRRPVAYLSKKLDPVAAGWPPCLRMVAAIAVLTKDAGKLTMGQPLVILAPHAVEALVKQPPDRWLSNARMTHYQALLLDTDRVQFGPIVALNPATLLPLPEEGLQHDCLDILAEAHGTRPDLTDQPLPDADHTWYTDGSSFLQEGQRKAGAAVTTETEVVWAKALPAGTSAQRAELIALTQALKMAEGKKLNVYTDSRYAFATAHIHGEIYRRRGWLTSEGKEIKNKDEILALLKALFLPKRLSIIHCPGHQKGNRAEARGNRMADQAAREVATRETPETSTLLAGKRTADGSEFEKRTADGSEFESPKKKAKVE

SEQ ID NO: 2505 - protein, 2093 aa, synthetic construct
MPAAKRVKLDGGDKKYSIGLDIGTNSVGWAVITDEYKVPSKKFKVLGNTDRHSIKKNLIGALLFDSGETAEATRLKRTARRRYTRRKNRICYLQEIFSNEMAKVDDSFFHRLEESFLVEEDKKHERHPIFGNIVDEVAYHEKYPTIYHLRKKLVDSTDKADLRLIYLALAHMIKFRGHFLIEGDLNPDNSDVDKLFIQLVQTYNQLFEENPINASGVDAKAILSARLSKSRRLENLIAQLPGEKKNGLFGNLIALSLGLTPNFKSNFDLAEDAKLQLSKDTYDDDLDNLLAQIGDQYADLFLAAKNLSDAILLSDILRVNTEITKAPLSASMIKRYDEHHQDLTLLKALVRQQLPEKYKEIFFDQSKNGYAGYIDGGASQEEFYKFIKPILEKMDGTEELLVKLNREDLLRKQRTFDNGSIPHQIHLGELHAILRRQEDFYPFLKDNREKIEKILTFRIPYYVGPLARGNSRFAWMTRKSEETITPWNFEEVVDKGASAQSFIERMTNFDKNLPNEKVLPKHSLLYEYFTVYNELTKVKYVTEGMRKPAFLSGEQKKAIVDLLFKTNRKVTVKQLKEDYFKKIECFDSVEISGVEDRFNASLGTYHDLLKIIKDKDFLDNEENEDILEDIVLTLTLFEDREMIEERLKTYAHLFDDKVMKQLKRRRYTGWGRLSRKLINGIRDKQSGKTILDFLKSDGFANRNFMQLIHDDSLTFKEDIQKAQVSGQGDSLHEHIANLAGSPAIKKGILQTVKVVDELVKVMGRHKPENIVIEMARENQTTQKGQKNSRERMKRIEEGIKELGSQILKEHPVENTQLQNEKLYLYYLQNGRDMYVDQELDINRLSDYDVDHIVPQSFLKDDSIDNKVLTRSDKARGKSDNVPSEEVVKKMKNYWRQLLNAKLITQRKFDNLTKAERGGLSELDKAGFIKRQLVETRQITKHVAQILDSRMNTKYDENDKLIREVKVITLKSKLVSDFRKDFQFYKVREINNYHHAHDAYLNAVVGTALIKKYPKLESEFVYGDYKVYDVRKMIAKSEQEIGKATAKYFFYSNIMNFFKTEITLANGEIRKRPLIETNGETGEIVWDKGRDFATVRKVLSMPQVNIVKKTEVQTGGFSKESILPKRNSDKLIARKKDWDPKKYGGFDSPTVAYSVLVVAKVEKGKSKKLKSVKELLGITIMERSSFEKNPIDFLEAKGYKEVKKDLIIKLPKYSLFELENGRKRMLASAGELQKGNELALPSKYVNFLYLASHYEKLKGSPEDNEQKQLFVEQHKHYLDEIIEQISEFSKRVILADANLDKVLSAYNKHRDKPIREQAENIIHLFTLTNLGAPAAFKYFDTTIDRKRYTSTKEVLDATLIHQSITGLYETRIDLSQLGGDGGPAPEAAAKGGTLNIEDEYRLHETSKGPDVPLGSTWLSDFPQAWAETGGMGLAVRQAPLIIPLKATSTPVSIKQYPMSQEARLGIKPHIQRLLDQGILVPCQSPWNTPLLPVKKPGTNDYRPVQDLREVNKRVEDIHPTVPNPYNLLSGLPPSHQWYTVLDLKDAFFCLRLHPTSQSLFAFEWRDPEMGISGQLTWTRLPQGFKNSPTLFNEALHRDLADFRIQHPDLILLQYVDDLLLAATSELDCQQGTRALLQTLGDLGYRASAKKAQICQKQVKYLGYLLKEGQRWLTEARKETVMGQPTPKTPRQLREFLGKAGFCRLFIPGFAEMAAPLYPLTKPGTLFEWGPDQQKAYQEIKQALLTAPALGLPDLTKPFELFVDEKQGYAKGVLTQKLGPWRRPVAYLSKKLDPVAAGWPPCLRMVAAIAVLTKDAGKLTMGQPLVILAPHAVEALVKQPPDRWLSNARMTHYQALLLDTDRVQFGPIVALNPATLLPLPEEGLQHDCLDILAEAHGTRPDLTDQPLPDADHTWYTDGSSFLQEGQRKAGAAVTTETEVVWAKALPAGTSAQRAELIALTQALKMAEGKKLNVYTDSRYAFATAHIHGEIYRRRGWLTSEGKEIKNKDEILALLKALFLPKRLSIIHCPGHQKGNRAEARGNRMADQAAREVATRETPETSTLLAGKRTADGSEFEKRTADGSEFESPKKKAKVE

SEQ ID NO: 2506 - protein, 2096 aa, synthetic construct
MPAAKRVKLDGGDKKYSIGLDIGTNSVGWAVITDEYKVPSKKFKVLGNTDRHSIKKNLIGALLFDSGETAEATRLKRTARRRYTRRKNRICYLQEIFSNEMAKVDDSFFHRLEESFLVEEDKKHERHPIFGNIVDEVAYHEKYPTIYHLRKKLVDSTDKADLRLIYLALAHMIKFRGHFLIEGDLNPDNSDVDKLFIQLVQTYNQLFEENPINASGVDAKAILSARLSKSRRLENLIAQLPGEKKNGLFGNLIALSLGLTPNFKSNFDLAEDAKLQLSKDTYDDDLDNLLAQIGDQYADLFLAAKNLSDAILLSDILRVNTEITKAPLSASMIKRYDEHHQDLTLLKALVRQQLPEKYKEIFFDQSKNGYAGYIDGGASQEEFYKFIKPILEKMDGTEELLVKLNREDLLRKQRTFDNGSIPHQIHLGELHAILRRQEDFYPFLKDNREKIEKILTFRIPYYVGPLARGNSRFAWMTRKSEETITPWNFEEVVDKGASAQSFIERMTNFDKNLPNEKVLPKHSLLYEYFTVYNELTKVKYVTEGMRKPAFLSGEQKKAIVDLLFKTNRKVTVKQLKEDYFKKIECFDSVEISGVEDRFNASLGTYHDLLKIIKDKDFLDNEENEDILEDIVLTLTLFEDREMIEERLKTYAHLFDDKVMKQLKRRRYTGWGRLSRKLINGIRDKQSGKTILDFLKSDGFANRNFMQLIHDDSLTFKEDIQKAQVSGQGDSLHEHIANLAGSPAIKKGILQTVKVVDELVKVMGRHKPENIVIEMARENQTTQKGQKNSRERMKRIEEGIKELGSQILKEHPVENTQLQNEKLYLYYLQNGRDMYVDQELDINRLSDYDVDHIVPQSFLKDDSIDNKVLTRSDKARGKSDNVPSEEVVKKMKNYWRQLLNAKLITQRKFDNLTKAERGGLSELDKAGFIKRQLVETRQITKHVAQILDSRMNTKYDENDKLIREVKVITLKSKLVSDFRKDFQFYKVREINNYHHAHDAYLNAVVGTALIKKYPKLESEFVYGDYKVYDVRKMIAKSEQEIGKATAKYFFYSNIMNFFKTEITLANGEIRKRPLIETNGETGEIVWDKGRDFATVRKVLSMPQVNIVKKTEVQTGGFSKESILPKRNSDKLIARKKDWDPKKYGGFDSPTVAYSVLVVAKVEKGKSKKLKSVKELLGITIMERSSFEKNPIDFLEAKGYKEVKKDLIIKLPKYSLFELENGRKRMLASAGELQKGNELALPSKYVNFLYLASHYEKLKGSPEDNEQKQLFVEQHKHYLDEIIEQISEFSKRVILADANLDKVLSAYNKHRDKPIREQAENIIHLFTLTNLGAPAAFKYFDTTIDRKRYTSTKEVLDATLIHQSITGLYETRIDLSQLGGDGGEAAAKPAPGGGGGTLNIEDEYRLHETSKGPDVPLGSTWLSDFPQAWAETGGMGLAVRQAPLIIPLKATSTPVSIKQYPMSQEARLGIKPHIQRLLDQGILVPCQSPWNTPLLPVKKPGTNDYRPVQDLREVNKRVEDIHPTVPNPYNLLSGLPPSHQWYTVLDLKDAFFCLRLHPTSQSLFAFEWRDPEMGISGQLTWTRLPQGFKNSPTLFNEALHRDLADFRIQHPDLILLQYVDDLLLAATSELDCQQGTRALLQTLGDLGYRASAKKAQICQKQVKYLGYLLKEGQRWLTEARKETVMGQPTPKTPRQLREFLGKAGFCRLFIPGFAEMAAPLYPLTKPGTLFEWGPDQQKAYQEIKQALLTAPALGLPDLTKPFELFVDEKQGYAKGVLTQKLGPWRRPVAYLSKKLDPVAAGWPPCLRMVAAIAVLTKDAGKLTMGQPLVILAPHAVEALVKQPPDRWLSNARMTHYQALLLDTDRVQFGPIVALNPATLLPLPEEGLQHDCLDILAEAHGTRPDLTDQPLPDADHTWYTDGSSFLQEGQRKAGAAVTTETEVVWAKALPAGTSAQRAELIALTQALKMAEGKKLNVYTDSRYAFATAHIHGEIYRRRGWLTSEGKEIKNKDEILALLKALFLPKRLSIIHCPGHQKGNRAEARGNRMADQAAREVATRETPETSTLLAGKRTADGSEFEKRTADGSEFESPKKKAKVE

SEQ ID NO: 2507 - protein, 2100 aa, synthetic construct
MPAAKRVKLDGGDKKYSIGLDIGTNSVGWAVITDEYKVPSKKFKVLGNTDRHSIKKNLIGALLFDSGETAEATRLKRTARRRYTRRKNRICYLQEIFSNEMAKVDDSFFHRLEESFLVEEDKKHERHPIFGNIVDEVAYHEKYPTIYHLRKKLVDSTDKADLRLIYLALAHMIKFRGHFLIEGDLNPDNSDVDKLFIQLVQTYNQLFEENPINASGVDAKAILSARLSKSRRLENLIAQLPGEKKNGLFGNLIALSLGLTPNFKSNFDLAEDAKLQLSKDTYDDDLDNLLAQIGDQYADLFLAAKNLSDAILLSDILRVNTEITKAPLSASMIKRYDEHHQDLTLLKALVRQQLPEKYKEIFFDQSKNGYAGYIDGGASQEEFYKFIKPILEKMDGTEELLVKLNREDLLRKQRTFDNGSIPHQIHLGELHAILRRQEDFYPFLKDNREKIEKILTFRIPYYVGPLARGNSRFAWMTRKSEETITPWNFEEVVDKGASAQSFIERMTNFDKNLPNEKVLPKHSLLYEYFTVYNELTKVKYVTEGMRKPAFLSGEQKKAIVDLLFKTNRKVTVKQLKEDYFKKIECFDSVEISGVEDRFNASLGTYHDLLKIIKDKDFLDNEENEDILEDIVLTLTLFEDREMIEERLKTYAHLFDDKVMKQLKRRRYTGWGRLSRKLINGIRDKQSGKTILDFLKSDGFANRNFMQLIHDDSLTFKEDIQKAQVSGQGDSLHEHIANLAGSPAIKKGILQTVKVVDELVKVMGRHKPENIVIEMARENQTTQKGQKNSRERMKRIEEGIKELGSQILKEHPVENTQLQNEKLYLYYLQNGRDMYVDQELDINRLSDYDVDHIVPQSFLKDDSIDNKVLTRSDKARGKSDNVPSEEVVKKMKNYWRQLLNAKLITQRKFDNLTKAERGGLSELDKAGFIKRQLVETRQITKHVAQILDSRMNTKYDENDKLIREVKVITLKSKLVSDFRKDFQFYKVREINNYHHAHDAYLNAVVGTALIKKYPKLESEFVYGDYKVYDVRKMIAKSEQEIGKATAKYFFYSNIMNFFKTEITLANGEIRKRPLIETNGETGEIVWDKGRDFATVRKVLSMPQVNIVKKTEVQTGGFSKESILPKRNSDKLIARKKDWDPKKYGGFDSPTVAYSVLVVAKVEKGKSKKLKSVKELLGITIMERSSFEKNPIDFLEAKGYKEVKKDLIIKLPKYSLFELENGRKRMLASAGELQKGNELALPSKYVNFLYLASHYEKLKGSPEDNEQKQLFVEQHKHYLDEIIEQISEFSKRVILADANLDKVLSAYNKHRDKPIREQAENIIHLFTLTNLGAPAAFKYFDTTIDRKRYTSTKEVLDATLIHQSITGLYETRIDLSQLGGDGGEAAAKEAAAKEAAAKGGTLNIEDEYRLHETSKGPDVPLGSTWLSDFPQAWAETGGMGLAVRQAPLIIPLKATSTPVSIKQYPMSQEARLGIKPHIQRLLDQGILVPCQSPWNTPLLPVKKPGTNDYRPVQDLREVNKRVEDIHPTVPNPYNLLSGLPPSHQWYTVLDLKDAFFCLRLHPTSQSLFAFEWRDPEMGISGQLTWTRLPQGFKNSPTLFNEALHRDLADFRIQHPDLILLQYVDDLLLAATSELDCQQGTRALLQTLGDLGYRASAKKAQICQKQVKYLGYLLKEGQRWLTEARKETVMGQPTPKTPRQLREFLGKAGFCRLFIPGFAEMAAPLYPLTKPGTLFEWGPDQQKAYQEIKQALLTAPALGLPDLTKPFELFVDEKQGYAKGVLTQKLGPWRRPVAYLSKKLDPVAAGWPPCLRMVAAIAVLTKDAGKLTMGQPLVILAPHAVEALVKQPPDRWLSNARMTHYQALLLDTDRVQFGPIVALNPATLLPLPEEGLQHDCLDILAEAHGTRPDLTDQPLPDADHTWYTDGSSFLQEGQRKAGAAVTTETEVVWAKALPAGTSAQRAELIALTQALKMAEGKKLNVYTDSRYAFATAHIHGEIYRRRGWLTSEGKEIKNKDEILALLKALFLPKRLSIIHCPGHQKGNRAEARGNRMADQAAREVATRETPETSTLLAGKRTADGSEFEKRTADGSEFESPKKKAKVE

SEQ ID NO: 2508 - protein, 2088 aa, synthetic construct
MPAAKRVKLDGGDKKYSIGLDIGTNSVGWAVITDEYKVPSKKFKVLGNTDRHSIKKNLIGALLFDSGETAEATRLKRTARRRYTRRKNRICYLQEIFSNEMAKVDDSFFHRLEESFLVEEDKKHERHPIFGNIVDEVAYHEKYPTIYHLRKKLVDSTDKADLRLIYLALAHMIKFRGHFLIEGDLNPDNSDVDKLFIQLVQTYNQLFEENPINASGVDAKAILSARLSKSRRLENLIAQLPGEKKNGLFGNLIALSLGLTPNFKSNFDLAEDAKLQLSKDTYDDDLDNLLAQIGDQYADLFLAAKNLSDAILLSDILRVNTEITKAPLSASMIKRYDEHHQDLTLLKALVRQQLPEKYKEIFFDQSKNGYAGYIDGGASQEEFYKFIKPILEKMDGTEELLVKLNREDLLRKQRTFDNGSIPHQIHLGELHAILRRQEDFYPFLKDNREKIEKILTFRIPYYVGPLARGNSRFAWMTRKSEETITPWNFEEVVDKGASAQSFIERMTNFDKNLPNEKVLPKHSLLYEYFTVYNELTKVKYVTEGMRKPAFLSGEQKKAIVDLLFKTNRKVTVKQLKEDYFKKIECFDSVEISGVEDRFNASLGTYHDLLKIIKDKDFLDNEENEDILEDIVLTLTLFEDREMIEERLKTYAHLFDDKVMKQLKRRRYTGWGRLSRKLINGIRDKQSGKTILDFLKSDGFANRNFMQLIHDDSLTFKEDIQKAQVSGQGDSLHEHIANLAGSPAIKKGILQTVKVVDELVKVMGRHKPENIVIEMARENQTTQKGQKNSRERMKRIEEGIKELGSQILKEHPVENTQLQNEKLYLYYLQNGRDMYVDQELDINRLSDYDVDHIVPQSFLKDDSIDNKVLTRSDKARGKSDNVPSEEVVKKMKNYWRQLLNAKLITQRKFDNLTKAERGGLSELDKAGFIKRQLVETRQITKHVAQILDSRMNTKYDENDKLIREVKVITLKSKLVSDFRKDFQFYKVREINNYHHAHDAYLNAVVGTALIKKYPKLESEFVYGDYKVYDVRKMIAKSEQEIGKATAKYFFYSNIMNFFKTEITLANGEIRKRPLIETNGETGEIVWDKGRDFATVRKVLSMPQVNIVKKTEVQTGGFSKESILPKRNSDKLIARKKDWDPKKYGGFDSPTVAYSVLVVAKVEKGKSKKLKSVKELLGITIMERSSFEKNPIDFLEAKGYKEVKKDLIIKLPKYSLFELENGRKRMLASAGELQKGNELALPSKYVNFLYLASHYEKLKGSPEDNEQKQLFVEQHKHYLDEIIEQISEFSKRVILADANLDKVLSAYNKHRDKPIREQAENIIHLFTLTNLGAPAAFKYFDTTIDRKRYTSTKEVLDATLIHQSITGLYETRIDLSQLGGDGGGSSGGTLNIEDEYRLHETSKGPDVPLGSTWLSDFPQAWAETGGMGLAVRQAPLIIPLKATSTPVSIKQYPMSQEARLGIKPHIQRLLDQGILVPCQSPWNTPLLPVKKPGTNDYRPVQDLREVNKRVEDIHPTVPNPYNLLSGLPPSHQWYTVLDLKDAFFCLRLHPTSQSLFAFEWRDPEMGISGQLTWTRLPQGFKNSPTLFNEALHRDLADFRIQHPDLILLQYVDDLLLAATSELDCQQGTRALLQTLGDLGYRASAKKAQICQKQVKYLGYLLKEGQRWLTEARKETVMGQPTPKTPRQLREFLGKAGFCRLFIPGFAEMAAPLYPLTKPGTLFEWGPDQQKAYQEIKQALLTAPALGLPDLTKPFELFVDEKQGYAKGVLTQKLGPWRRPVAYLSKKLDPVAAGWPPCLRMVAAIAVLTKDAGKLTMGQPLVILAPHAVEALVKQPPDRWLSNARMTHYQALLLDTDRVQFGPIVALNPATLLPLPEEGLQHDCLDILAEAHGTRPDLTDQPLPDADHTWYTDGSSFLQEGQRKAGAAVTTETEVVWAKALPAGTSAQRAELIALTQALKMAEGKKLNVYTDSRYAFATAHIHGEIYRRRGWLTSEGKEIKNKDEILALLKALFLPKRLSIIHCPGHQKGNRAEARGNRMADQAAREVATRETPETSTLLAGKRTADGSEFEKRTADGSEFESPKKKAKVE

SEQ ID NO: 2509 - protein, 2096 aa, synthetic construct
MPAAKRVKLDGGDKKYSIGLDIGTNSVGWAVITDEYKVPSKKFKVLGNTDRHSIKKNLIGALLFDSGETAEATRLKRTARRRYTRRKNRICYLQEIFSNEMAKVDDSFFHRLEESFLVEEDKKHERHPIFGNIVDEVAYHEKYPTIYHLRKKLVDSTDKADLRLIYLALAHMIKFRGHFLIEGDLNPDNSDVDKLFIQLVQTYNQLFEENPINASGVDAKAILSARLSKSRRLENLIAQLPGEKKNGLFGNLIALSLGLTPNFKSNFDLAEDAKLQLSKDTYDDDLDNLLAQIGDQYADLFLAAKNLSDAILLSDILRVNTEITKAPLSASMIKRYDEHHQDLTLLKALVRQQLPEKYKEIFFDQSKNGYAGYIDGGASQEEFYKFIKPILEKMDGTEELLVKLNREDLLRKQRTFDNGSIPHQIHLGELHAILRRQEDFYPFLKDNREKIEKILTFRIPYYVGPLARGNSRFAWMTRKSEETITPWNFEEVVDKGASAQSFIERMTNFDKNLPNEKVLPKHSLLYEYFTVYNELTKVKYVTEGMRKPAFLSGEQKKAIVDLLFKTNRKVTVKQLKEDYFKKIECFDSVEISGVEDRFNASLGTYHDLLKIIKDKDFLDNEENEDILEDIVLTLTLFEDREMIEERLKTYAHLFDDKVMKQLKRRRYTGWGRLSRKLINGIRDKQSGKTILDFLKSDGFANRNFMQLIHDDSLTFKEDIQKAQVSGQGDSLHEHIANLAGSPAIKKGILQTVKVVDELVKVMGRHKPENIVIEMARENQTTQKGQKNSRERMKRIEEGIKELGSQILKEHPVENTQLQNEKLYLYYLQNGRDMYVDQELDINRLSDYDVDHIVPQSFLKDDSIDNKVLTRSDKARGKSDNVPSEEVVKKMKNYWRQLLNAKLITQRKFDNLTKAERGGLSELDKAGFIKRQLVETRQITKHVAQILDSRMNTKYDENDKLIREVKVITLKSKLVSDFRKDFQFYKVREINNYHHAHDAYLNAVVGTALIKKYPKLESEFVYGDYKVYDVRKMIAKSEQEIGKATAKYFFYSNIMNFFKTEITLANGEIRKRPLIETNGETGEIVWDKGRDFATVRKVLSMPQVNIVKKTEVQTGGFSKESILPKRNSDKLIARKKDWDPKKYGGFDSPTVAYSVLVVAKVEKGKSKKLKSVKELLGITIMERSSFEKNPIDFLEAKGYKEVKKDLIIKLPKYSLFELENGRKRMLASAGELQKGNELALPSKYVNFLYLASHYEKLKGSPEDNEQKQLFVEQHKHYLDEIIEQISEFSKRVILADANLDKVLSAYNKHRDKPIREQAENIIHLFTLTNLGAPAAFKYFDTTIDRKRYTSTKEVLDATLIHQSITGLYETRIDLSQLGGDGGEAAAKGSSPAPGGTLNIEDEYRLHETSKGPDVPLGSTWLSDFPQAWAETGGMGLAVRQAPLIIPLKATSTPVSIKQYPMSQEARLGIKPHIQRLLDQGILVPCQSPWNTPLLPVKKPGTNDYRPVQDLREVNKRVEDIHPTVPNPYNLLSGLPPSHQWYTVLDLKDAFFCLRLHPTSQSLFAFEWRDPEMGISGQLTWTRLPQGFKNSPTLFNEALHRDLADFRIQHPDLILLQYVDDLLLAATSELDCQQGTRALLQTLGDLGYRASAKKAQICQKQVKYLGYLLKEGQRWLTEARKETVMGQPTPKTPRQLREFLGKAGFCRLFIPGFAEMAAPLYPLTKPGTLFEWGPDQQKAYQEIKQALLTAPALGLPDLTKPFELFVDEKQGYAKGVLTQKLGPWRRPVAYLSKKLDPVAAGWPPCLRMVAAIAVLTKDAGKLTMGQPLVILAPHAVEALVKQPPDRWLSNARMTHYQALLLDTDRVQFGPIVALNPATLLPLPEEGLQHDCLDILAEAHGTRPDLTDQPLPDADHTWYTDGSSFLQEGQRKAGAAVTTETEVVWAKALPAGTSAQRAELIALTQALKMAEGKKLNVYTDSRYAFATAHIHGEIYRRRGWLTSEGKEIKNKDEILALLKALFLPKRLSIIHCPGHQKGNRAEARGNRMADQAAREVATRETPETSTLLAGKRTADGSEFEKRTADGSEFESPKKKAKVE

SEQ ID NO: 2510 - protein, 2096 aa, synthetic construct
MPAAKRVKLDGGDKKYSIGLDIGTNSVGWAVITDEYKVPSKKFKVLGNTDRHSIKKNLIGALLFDSGETAEATRLKRTARRRYTRRKNRICYLQEIFSNEMAKVDDSFFHRLEESFLVEEDKKHERHPIFGNIVDEVAYHEKYPTIYHLRKKLVDSTDKADLRLIYLALAHMIKFRGHFLIEGDLNPDNSDVDKLFIQLVQTYNQLFEENPINASGVDAKAILSARLSKSRRLENLIAQLPGEKKNGLFGNLIALSLGLTPNFKSNFDLAEDAKLQLSKDTYDDDLDNLLAQIGDQYADLFLAAKNLSDAILLSDILRVNTEITKAPLSASMIKRYDEHHQDLTLLKALVRQQLPEKYKEIFFDQSKNGYAGYIDGGASQEEFYKFIKPILEKMDGTEELLVKLNREDLLRKQRTFDNGSIPHQIHLGELHAILRRQEDFYPFLKDNREKIEKILTFRIPYYVGPLARGNSRFAWMTRKSEETITPWNFEEVVDKGASAQSFIERMTNFDKNLPNEKVLPKHSLLYEYFTVYNELTKVKYVTEGMRKPAFLSGEQKKAIVDLLFKTNRKVTVKQLKEDYFKKIECFDSVEISGVEDRFNASLGTYHDLLKIIKDKDFLDNEENEDILEDIVLTLTLFEDREMIEERLKTYAHLFDDKVMKQLKRRRYTGWGRLSRKLINGIRDKQSGKTILDFLKSDGFANRNFMQLIHDDSLTFKEDIQKAQVSGQGDSLHEHIANLAGSPAIKKGILQTVKVVDELVKVMGRHKPENIVIEMARENQTTQKGQKNSRERMKRIEEGIKELGSQILKEHPVENTQLQNEKLYLYYLQNGRDMYVDQELDINRLSDYDVDHIVPQSFLKDDSIDNKVLTRSDKARGKSDNVPSEEVVKKMKNYWRQLLNAKLITQRKFDNLTKAERGGLSELDKAGFIKRQLVETRQITKHVAQILDSRMNTKYDENDKLIREVKVITLKSKLVSDFRKDFQFYKVREINNYHHAHDAYLNAVVGTALIKKYPKLESEFVYGDYKVYDVRKMIAKSEQEIGKATAKYFFYSNIMNFFKTEITLANGEIRKRPLIETNGETGEIVWDKGRDFATVRKVLSMPQVNIVKKTEVQTGGFSKESILPKRNSDKLIARKKDWDPKKYGGFDSPTVAYSVLVVAKVEKGKSKKLKSVKELLGITIMERSSFEKNPIDFLEAKGYKEVKKDLIIKLPKYSLFELENGRKRMLASAGELQKGNELALPSKYVNFLYLASHYEKLKGSPEDNEQKQLFVEQHKHYLDEIIEQISEFSKRVILADANLDKVLSAYNKHRDKPIREQAENIIHLFTLTNLGAPAAFKYFDTTIDRKRYTSTKEVLDATLIHQSITGLYETRIDLSQLGGDGGPAPAPAPAPAPGGTLNIEDEYRLHETSKGPDVPLGSTWLSDFPQAWAETGGMGLAVRQAPLIIPLKATSTPVSIKQYPMSQEARLGIKPHIQRLLDQGILVPCQSPWNTPLLPVKKPGTNDYRPVQDLREVNKRVEDIHPTVPNPYNLLSGLPPSHQWYTVLDLKDAFFCLRLHPTSQSLFAFEWRDPEMGISGQLTWTRLPQGFKNSPTLFNEALHRDLADFRIQHPDLILLQYVDDLLLAATSELDCQQGTRALLQTLGDLGYRASAKKAQICQKQVKYLGYLLKEGQRWLTEARKETVMGQPTPKTPRQLREFLGKAGFCRLFIPGFAEMAAPLYPLTKPGTLFEWGPDQQKAYQEIKQALLTAPALGLPDLTKPFELFVDEKQGYAKGVLTQKLGPWRRPVAYLSKKLDPVAAGWPPCLRMVAAIAVLTKDAGKLTMGQPLVILAPHAVEALVKQPPDRWLSNARMTHYQALLLDTDRVQFGPIVALNPATLLPLPEEGLQHDCLDILAEAHGTRPDLTDQPLPDADHTWYTDGSSFLQEGQRKAGAAVTTETEVVWAKALPAGTSAQRAELIALTQALKMAEGKKLNVYTDSRYAFATAHIHGEIYRRRGWLTSEGKEIKNKDEILALLKALFLPKRLSIIHCPGHQKGNRAEARGNRMADQAAREVATRETPETSTLLAGKRTADGSEFEKRTADGSEFESPKKKAKVE

SEQ ID NO: 2511 - protein, 2095 aa, synthetic construct
MPAAKRVKLDGGDKKYSIGLDIGTNSVGWAVITDEYKVPSKKFKVLGNTDRHSIKKNLIGALLFDSGETAEATRLKRTARRRYTRRKNRICYLQEIFSNEMAKVDDSFFHRLEESFLVEEDKKHERHPIFGNIVDEVAYHEKYPTIYHLRKKLVDSTDKADLRLIYLALAHMIKFRGHFLIEGDLNPDNSDVDKLFIQLVQTYNQLFEENPINASGVDAKAILSARLSKSRRLENLIAQLPGEKKNGLFGNLIALSLGLTPNFKSNFDLAEDAKLQLSKDTYDDDLDNLLAQIGDQYADLFLAAKNLSDAILLSDILRVNTEITKAPLSASMIKRYDEHHQDLTLLKALVRQQLPEKYKEIFFDQSKNGYAGYIDGGASQEEFYKFIKPILEKMDGTEELLVKLNREDLLRKQRTFDNGSIPHQIHLGELHAILRRQEDFYPFLKDNREKIEKILTFRIPYYVGPLARGNSRFAWMTRKSEETITPWNFEEVVDKGASAQSFIERMTNFDKNLPNEKVLPKHSLLYEYFTVYNELTKVKYVTEGMRKPAFLSGEQKKAIVDLLFKTNRKVTVKQLKEDYFKKIECFDSVEISGVEDRFNASLGTYHDLLKIIKDKDFLDNEENEDILEDIVLTLTLFEDREMIEERLKTYAHLFDDKVMKQLKRRRYTGWGRLSRKLINGIRDKQSGKTILDFLKSDGFANRNFMQLIHDDSLTFKEDIQKAQVSGQGDSLHEHIANLAGSPAIKKGILQTVKVVDELVKVMGRHKPENIVIEMARENQTTQKGQKNSRERMKRIEEGIKELGSQILKEHPVENTQLQNEKLYLYYLQNGRDMYVDQELDINRLSDYDVDHIVPQSFLKDDSIDNKVLTRSDKARGKSDNVPSEEVVKKMKNYWRQLLNAKLITQRKFDNLTKAERGGLSELDKAGFIKRQLVETRQITKHVAQILDSRMNTKYDENDKLIREVKVITLKSKLVSDFRKDFQFYKVREINNYHHAHDAYLNAVVGTALIKKYPKLESEFVYGDYKVYDVRKMIAKSEQEIGKATAKYFFYSNIMNFFKTEITLANGEIRKRPLIETNGETGEIVWDKGRDFATVRKVLSMPQVNIVKKTEVQTGGFSKESILPKRNSDKLIARKKDWDPKKYGGFDSPTVAYSVLVVAKVEKGKSKKLKSVKELLGITIMERSSFEKNPIDFLEAKGYKEVKKDLIIKLPKYSLFELENGRKRMLASAGELQKGNELALPSKYVNFLYLASHYEKLKGSPEDNEQKQLFVEQHKHYLDEIIEQISEFSKRVILADANLDKVLSAYNKHRDKPIREQAENIIHLFTLTNLGAPAAFKYFDTTIDRKRYTSTKEVLDATLIHQSITGLYETRIDLSQLGGDGGGGGGSGGGGSGGTLNIEDEYRLHETSKGPDVPLGSTWLSDFPQAWAETGGMGLAVRQAPLIIPLKATSTPVSIKQYPMSQEARLGIKPHIQRLLDQGILVPCQSPWNTPLLPVKKPGTNDYRPVQDLREVNKRVEDIHPTVPNPYNLLSGLPPSHQWYTVLDLKDAFFCLRLHPTSQSLFAFEWRDPEMGISGQLTWTRLPQGFKNSPTLFNEALHRDLADFRIQHPDLILLQYVDDLLLAATSELDCQQGTRALLQTLGDLGYRASAKKAQICQKQVKYLGYLLKEGQRWLTEARKETVMGQPTPKTPRQLREFLGKAGFCRLFIPGFAEMAAPLYPLTKPGTLFEWGPDQQKAYQEIKQALLTAPALGLPDLTKPFELFVDEKQGYAKGVLTQKLGPWRRPVAYLSKKLDPVAAGWPPCLRMVAAIAVLTKDAGKLTMGQPLVILAPHAVEALVKQPPDRWLSNARMTHYQALLLDTDRVQFGPIVALNPATLLPLPEEGLQHDCLDILAEAHGTRPDLTDQPLPDADHTWYTDGSSFLQEGQRKAGAAVTTETEVVWAKALPAGTSAQRAELIALTQALKMAEGKKLNVYTDSRYAFATAHIHGEIYRRRGWLTSEGKEIKNKDEILALLKALFLPKRLSIIHCPGHQKGNRAEARGNRMADQAAREVATRETPETSTLLAGKRTADGSEFEKRTADGSEFESPKKKAKVE

SEQ ID NO: 2512 - protein, 2096 aa, synthetic construct
MPAAKRVKLDGGDKKYSIGLDIGTNSVGWAVITDEYKVPSKKFKVLGNTDRHSIKKNLIGALLFDSGETAEATRLKRTARRRYTRRKNRICYLQEIFSNEMAKVDDSFFHRLEESFLVEEDKKHERHPIFGNIVDEVAYHEKYPTIYHLRKKLVDSTDKADLRLIYLALAHMIKFRGHFLIEGDLNPDNSDVDKLFIQLVQTYNQLFEENPINASGVDAKAILSARLSKSRRLENLIAQLPGEKKNGLFGNLIALSLGLTPNFKSNFDLAEDAKLQLSKDTYDDDLDNLLAQIGDQYADLFLAAKNLSDAILLSDILRVNTEITKAPLSASMIKRYDEHHQDLTLLKALVRQQLPEKYKEIFFDQSKNGYAGYIDGGASQEEFYKFIKPILEKMDGTEELLVKLNREDLLRKQRTFDNGSIPHQIHLGELHAILRRQEDFYPFLKDNREKIEKILTFRIPYYVGPLARGNSRFAWMTRKSEETITPWNFEEVVDKGASAQSFIERMTNFDKNLPNEKVLPKHSLLYEYFTVYNELTKVKYVTEGMRKPAFLSGEQKKAIVDLLFKTNRKVTVKQLKEDYFKKIECFDSVEISGVEDRFNASLGTYHDLLKIIKDKDFLDNEENEDILEDIVLTLTLFEDREMIEERLKTYAHLFDDKVMKQLKRRRYTGWGRLSRKLINGIRDKQSGKTILDFLKSDGFANRNFMQLIHDDSLTFKEDIQKAQVSGQGDSLHEHIANLAGSPAIKKGILQTVKVVDELVKVMGRHKPENIVIEMARENQTTQKGQKNSRERMKRIEEGIKELGSQILKEHPVENTQLQNEKLYLYYLQNGRDMYVDQELDINRLSDYDVDHIVPQSFLKDDSIDNKVLTRSDKARGKSDNVPSEEVVKKMKNYWRQLLNAKLITQRKFDNLTKAERGGLSELDKAGFIKRQLVETRQITKHVAQILDSRMNTKYDENDKLIREVKVITLKSKLVSDFRKDFQFYKVREINNYHHAHDAYLNAVVGTALIKKYPKLESEFVYGDYKVYDVRKMIAKSEQEIGKATAKYFFYSNIMNFFKTEITLANGEIRKRPLIETNGETGEIVWDKGRDFATVRKVLSMPQVNIVKKTEVQTGGFSKESILPKRNSDKLIARKKDWDPKKYGGFDSPTVAYSVLVVAKVEKGKSKKLKSVKELLGITIMERSSFEKNPIDFLEAKGYKEVKKDLIIKLPKYSLFELENGRKRMLASAGELQKGNELALPSKYVNFLYLASHYEKLKGSPEDNEQKQLFVEQHKHYLDEIIEQISEFSKRVILADANLDKVLSAYNKHRDKPIREQAENIIHLFTLTNLGAPAAFKYFDTTIDRKRYTSTKEVLDATLIHQSITGLYETRIDLSQLGGDGGEAAAKPAPGGSGGTLNIEDEYRLHETSKGPDVPLGSTWLSDFPQAWAETGGMGLAVRQAPLIIPLKATSTPVSIKQYPMSQEARLGIKPHIQRLLDQGILVPCQSPWNTPLLPVKKPGTNDYRPVQDLREVNKRVEDIHPTVPNPYNLLSGLPPSHQWYTVLDLKDAFFCLRLHPTSQSLFAFEWRDPEMGISGQLTWTRLPQGFKNSPTLFNEALHRDLADFRIQHPDLILLQYVDDLLLAATSELDCQQGTRALLQTLGDLGYRASAKKAQICQKQVKYLGYLLKEGQRWLTEARKETVMGQPTPKTPRQLREFLGKAGFCRLFIPGFAEMAAPLYPLTKPGTLFEWGPDQQKAYQEIKQALLTAPALGLPDLTKPFELFVDEKQGYAKGVLTQKLGPWRRPVAYLSKKLDPVAAGWPPCLRMVAAIAVLTKDAGKLTMGQPLVILAPHAVEALVKQPPDRWLSNARMTHYQALLLDTDRVQFGPIVALNPATLLPLPEEGLQHDCLDILAEAHGTRPDLTDQPLPDADHTWYTDGSSFLQEGQRKAGAAVTTETEVVWAKALPAGTSAQRAELIALTQALKMAEGKKLNVYTDSRYAFATAHIHGEIYRRRGWLTSEGKEIKNKDEILALLKALFLPKRLSIIHCPGHQKGNRAEARGNRMADQAAREVATRETPETSTLLAGKRTADGSEFEKRTADGSEFESPKKKAKVE

SEQ ID NO: 2513 - protein, 2103 aa, synthetic construct
MPAAKRVKLDGGDKKYSIGLDIGTNSVGWAVITDEYKVPSKKFKVLGNTDRHSIKKNLIGALLFDSGETAEATRLKRTARRRYTRRKNRICYLQEIFSNEMAKVDDSFFHRLEESFLVEEDKKHERHPIFGNIVDEVAYHEKYPTIYHLRKKLVDSTDKADLRLIYLALAHMIKFRGHFLIEGDLNPDNSDVDKLFIQLVQTYNQLFEENPINASGVDAKAILSARLSKSRRLENLIAQLPGEKKNGLFGNLIALSLGLTPNFKSNFDLAEDAKLQLSKDTYDDDLDNLLAQIGDQYADLFLAAKNLSDAILLSDILRVNTEITKAPLSASMIKRYDEHHQDLTLLKALVRQQLPEKYKEIFFDQSKNGYAGYIDGGASQEEFYKFIKPILEKMDGTEELLVKLNREDLLRKQRTFDNGSIPHQIHLGELHAILRRQEDFYPFLKDNREKIEKILTFRIPYYVGPLARGNSRFAWMTRKSEETITPWNFEEVVDKGASAQSFIERMTNFDKNLPNEKVLPKHSLLYEYFTVYNELTKVKYVTEGMRKPAFLSGEQKKAIVDLLFKTNRKVTVKQLKEDYFKKIECFDSVEISGVEDRFNASLGTYHDLLKIIKDKDFLDNEENEDILEDIVLTLTLFEDREMIEERLKTYAHLFDDKVMKQLKRRRYTGWGRLSRKLINGIRDKQSGKTILDFLKSDGFANRNFMQLIHDDSLTFKEDIQKAQVSGQGDSLHEHIANLAGSPAIKKGILQTVKVVDELVKVMGRHKPENIVIEMARENQTTQKGQKNSRERMKRIEEGIKELGSQILKEHPVENTQLQNEKLYLYYLQNGRDMYVDQELDINRLSDYDVDHIVPQSFLKDDSIDNKVLTRSDKARGKSDNVPSEEVVKKMKNYWRQLLNAKLITQRKFDNLTKAERGGLSELDKAGFIKRQLVETRQITKHVAQILDSRMNTKYDENDKLIREVKVITLKSKLVSDFRKDFQFYKVREINNYHHAHDAYLNAVVGTALIKKYPKLESEFVYGDYKVYDVRKMIAKSEQEIGKATAKYFFYSNIMNFFKTEITLANGEIRKRPLIETNGETGEIVWDKGRDFATVRKVLSMPQVNIVKKTEVQTGGFSKESILPKRNSDKLIARKKDWDPKKYGGFDSPTVAYSVLVVAKVEKGKSKKLKSVKELLGITIMERSSFEKNPIDFLEAKGYKEVKKDLIIKLPKYSLFELENGRKRMLASAGELQKGNELALPSKYVNFLYLASHYEKLKGSPEDNEQKQLFVEQHKHYLDEIIEQISEFSKRVILADANLDKVLSAYNKHRDKPIREQAENIIHLFTLTNLGAPAAFKYFDTTIDRKRYTSTKEVLDATLIHQSITGLYETRIDLSQLGGDGGGGSGGSGGSGGSGGSGGSGGTLNIEDEYRLHETSKGPDVPLGSTWLSDFPQAWAETGGMGLAVRQAPLIIPLKATSTPVSIKQYPMSQEARLGIKPHIQRLLDQGILVPCQSPWNTPLLPVKKPGTNDYRPVQDLREVNKRVEDIHPTVPNPYNLLSGLPPSHQWYTVLDLKDAFFCLRLHPTSQSLFAFEWRDPEMGISGQLTWTRLPQGFKNSPTLFNEALHRDLADFRIQHPDLILLQYVDDLLLAATSELDCQQGTRALLQTLGDLGYRASAKKAQICQKQVKYLGYLLKEGQRWLTEARKETVMGQPTPKTPRQLREFLGKAGFCRLFIPGFAEMAAPLYPLTKPGTLFEWGPDQQKAYQEIKQALLTAPALGLPDLTKPFELFVDEKQGYAKGVLTQKLGPWRRPVAYLSKKLDPVAAGWPPCLRMVAAIAVLTKDAGKLTMGQPLVILAPHAVEALVKQPPDRWLSNARMTHYQALLLDTDRVQFGPIVALNPATLLPLPEEGLQHDCLDILAEAHGTRPDLTDQPLPDADHTWYTDGSSFLQEGQRKAGAAVTTETEVVWAKALPAGTSAQRAELIALTQALKMAEGKKLNVYTDSRYAFATAHIHGEIYRRRGWLTSEGKEIKNKDEILALLKALFLPKRLSIIHCPGHQKGNRAEARGNRMADQAAREVATRETPETSTLLAGKRTADGSEFEKRTADGSEFESPKKKAKVE

SEQ ID NO: 2514 - protein, 2096 aa, synthetic construct
MPAAKRVKLDGGDKKYSIGLDIGTNSVGWAVITDEYKVPSKKFKVLGNTDRHSIKKNLIGALLFDSGETAEATRLKRTARRRYTRRKNRICYLQEIFSNEMAKVDDSFFHRLEESFLVEEDKKHERHPIFGNIVDEVAYHEKYPTIYHLRKKLVDSTDKADLRLIYLALAHMIKFRGHFLIEGDLNPDNSDVDKLFIQLVQTYNQLFEENPINASGVDAKAILSARLSKSRRLENLIAQLPGEKKNGLFGNLIALSLGLTPNFKSNFDLAEDAKLQLSKDTYDDDLDNLLAQIGDQYADLFLAAKNLSDAILLSDILRVNTEITKAPLSASMIKRYDEHHQDLTLLKALVRQQLPEKYKEIFFDQSKNGYAGYIDGGASQEEFYKFIKPILEKMDGTEELLVKLNREDLLRKQRTFDNGSIPHQIHLGELHAILRRQEDFYPFLKDNREKIEKILTFRIPYYVGPLARGNSRFAWMTRKSEETITPWNFEEVVDKGASAQSFIERMTNFDKNLPNEKVLPKHSLLYEYFTVYNELTKVKYVTEGMRKPAFLSGEQKKAIVDLLFKTNRKVTVKQLKEDYFKKIECFDSVEISGVEDRFNASLGTYHDLLKIIKDKDFLDNEENEDILEDIVLTLTLFEDREMIEERLKTYAHLFDDKVMKQLKRRRYTGWGRLSRKLINGIRDKQSGKTILDFLKSDGFANRNFMQLIHDDSLTFKEDIQKAQVSGQGDSLHEHIANLAGSPAIKKGILQTVKVVDELVKVMGRHKPENIVIEMARENQTTQKGQKNSRERMKRIEEGIKELGSQILKEHPVENTQLQNEKLYLYYLQNGRDMYVDQELDINRLSDYDVDHIVPQSFLKDDSIDNKVLTRSDKARGKSDNVPSEEVVKKMKNYWRQLLNAKLITQRKFDNLTKAERGGLSELDKAGFIKRQLVETRQITKHVAQILDSRMNTKYDENDKLIREVKVITLKSKLVSDFRKDFQFYKVREINNYHHAHDAYLNAVVGTALIKKYPKLESEFVYGDYKVYDVRKMIAKSEQEIGKATAKYFFYSNIMNFFKTEITLANGEIRKRPLIETNGETGEIVWDKGRDFATVRKVLSMPQVNIVKKTEVQTGGFSKESILPKRNSDKLIARKKDWDPKKYGGFDSPTVAYSVLVVAKVEKGKSKKLKSVKELLGITIMERSSFEKNPIDFLEAKGYKEVKKDLIIKLPKYSLFELENGRKRMLASAGELQKGNELALPSKYVNFLYLASHYEKLKGSPEDNEQKQLFVEQHKHYLDEIIEQISEFSKRVILADANLDKVLSAYNKHRDKPIREQAENIIHLFTLTNLGAPAAFKYFDTTIDRKRYTSTKEVLDATLIHQSITGLYETRIDLSQLGGDGGPAPEAAAKGSSGGTLNIEDEYRLHETSKGPDVPLGSTWLSDFPQAWAETGGMGLAVRQAPLIIPLKATSTPVSIKQYPMSQEARLGIKPHIQRLLDQGILVPCQSPWNTPLLPVKKPGTNDYRPVQDLREVNKRVEDIHPTVPNPYNLLSGLPPSHQWYTVLDLKDAFFCLRLHPTSQSLFAFEWRDPEMGISGQLTWTRLPQGFKNSPTLFNEALHRDLADFRIQHPDLILLQYVDDLLLAATSELDCQQGTRALLQTLGDLGYRASAKKAQICQKQVKYLGYLLKEGQRWLTEARKETVMGQPTPKTPRQLREFLGKAGFCRLFIPGFAEMAAPLYPLTKPGTLFEWGPDQQKAYQEIKQALLTAPALGLPDLTKPFELFVDEKQGYAKGVLTQKLGPWRRPVAYLSKKLDPVAAGWPPCLRMVAAIAVLTKDAGKLTMGQPLVILAPHAVEALVKQPPDRWLSNARMTHYQALLLDTDRVQFGPIVALNPATLLPLPEEGLQHDCLDILAEAHGTRPDLTDQPLPDADHTWYTDGSSFLQEGQRKAGAAVTTETEVVWAKALPAGTSAQRAELIALTQALKMAEGKKLNVYTDSRYAFATAHIHGEIYRRRGWLTSEGKEIKNKDEILALLKALFLPKRLSIIHCPGHQKGNRAEARGNRMADQAAREVATRETPETSTLLAGKRTADGSEFEKRTADGSEFESPKKKAKVE

SEQ ID NO: 2515 - protein, 2096 aa, synthetic construct
MPAAKRVKLDGGDKKYSIGLDIGTNSVGWAVITDEYKVPSKKFKVLGNTDRHSIKKNLIGALLFDSGETAEATRLKRTARRRYTRRKNRICYLQEIFSNEMAKVDDSFFHRLEESFLVEEDKKHERHPIFGNIVDEVAYHEKYPTIYHLRKKLVDSTDKADLRLIYLALAHMIKFRGHFLIEGDLNPDNSDVDKLFIQLVQTYNQLFEENPINASGVDAKAILSARLSKSRRLENLIAQLPGEKKNGLFGNLIALSLGLTPNFKSNFDLAEDAKLQLSKDTYDDDLDNLLAQIGDQYADLFLAAKNLSDAILLSDILRVNTEITKAPLSASMIKRYDEHHQDLTLLKALVRQQLPEKYKEIFFDQSKNGYAGYIDGGASQEEFYKFIKPILEKMDGTEELLVKLNREDLLRKQRTFDNGSIPHQIHLGELHAILRRQEDFYPFLKDNREKIEKILTFRIPYYVGPLARGNSRFAWMTRKSEETITPWNFEEVVDKGASAQSFIERMTNFDKNLPNEKVLPKHSLLYEYFTVYNELTKVKYVTEGMRKPAFLSGEQKKAIVDLLFKTNRKVTVKQLKEDYFKKIECFDSVEISGVEDRFNASLGTYHDLLKIIKDKDFLDNEENEDILEDIVLTLTLFEDREMIEERLKTYAHLFDDKVMKQLKRRRYTGWGRLSRKLINGIRDKQSGKTILDFLKSDGFANRNFMQLIHDDSLTFKEDIQKAQVSGQGDSLHEHIANLAGSPAIKKGILQTVKVVDELVKVMGRHKPENIVIEMARENQTTQKGQKNSRERMKRIEEGIKELGSQILKEHPVENTQLQNEKLYLYYLQNGRDMYVDQELDINRLSDYDVDHIVPQSFLKDDSIDNKVLTRSDKARGKSDNVPSEEVVKKMKNYWRQLLNAKLITQRKFDNLTKAERGGLSELDKAGFIKRQLVETRQITKHVAQILDSRMNTKYDENDKLIREVKVITLKSKLVSDFRKDFQFYKVREINNYHHAHDAYLNAVVGTALIKKYPKLESEFVYGDYKVYDVRKMIAKSEQEIGKATAKYFFYSNIMNFFKTEITLANGEIRKRPLIETNGETGEIVWDKGRDFATVRKVLSMPQVNIVKKTEVQTGGFSKESILPKRNSDKLIARKKDWDPKKYGGFDSPTVAYSVLVVAKVEKGKSKKLKSVKELLGITIMERSSFEKNPIDFLEAKGYKEVKKDLIIKLPKYSLFELENGRKRMLASAGELQKGNELALPSKYVNFLYLASHYEKLKGSPEDNEQKQLFVEQHKHYLDEIIEQISEFSKRVILADANLDKVLSAYNKHRDKPIREQAENIIHLFTLTNLGAPAAFKYFDTTIDRKRYTSTKEVLDATLIHQSITGLYETRIDLSQLGGDGGGSSGGGEAAAKGGTLNIEDEYRLHETSKGPDVPLGSTWLSDFPQAWAETGGMGLAVRQAPLIIPLKATSTPVSIKQYPMSQEARLGIKPHIQRLLDQGILVPCQSPWNTPLLPVKKPGTNDYRPVQDLREVNKRVEDIHPTVPNPYNLLSGLPPSHQWYTVLDLKDAFFCLRLHPTSQSLFAFEWRDPEMGISGQLTWTRLPQGFKNSPTLFNEALHRDLADFRIQHPDLILLQYVDDLLLAATSELDCQQGTRALLQTLGDLGYRASAKKAQICQKQVKYLGYLLKEGQRWLTEARKETVMGQPTPKTPRQLREFLGKAGFCRLFIPGFAEMAAPLYPLTKPGTLFEWGPDQQKAYQEIKQALLTAPALGLPDLTKPFELFVDEKQGYAKGVLTQKLGPWRRPVAYLSKKLDPVAAGWPPCLRMVAAIAVLTKDAGKLTMGQPLVILAPHAVEALVKQPPDRWLSNARMTHYQALLLDTDRVQFGPIVALNPATLLPLPEEGLQHDCLDILAEAHGTRPDLTDQPLPDADHTWYTDGSSFLQEGQRKAGAAVTTETEVVWAKALPAGTSAQRAELIALTQALKMAEGKKLNVYTDSRYAFATAHIHGEIYRRRGWLTSEGKEIKNKDEILALLKALFLPKRLSIIHCPGHQKGNRAEARGNRMADQAAREVATRETPETSTLLAGKRTADGSEFEKRTADGSEFESPKKKAKVE

SEQ ID NO: 2516 - protein, 2100 aa, synthetic construct
MPAAKRVKLDGGDKKYSIGLDIGTNSVGWAVITDEYKVPSKKFKVLGNTDRHSIKKNLIGALLFDSGETAEATRLKRTARRRYTRRKNRICYLQEIFSNEMAKVDDSFFHRLEESFLVEEDKKHERHPIFGNIVDEVAYHEKYPTIYHLRKKLVDSTDKADLRLIYLALAHMIKFRGHFLIEGDLNPDNSDVDKLFIQLVQTYNQLFEENPINASGVDAKAILSARLSKSRRLENLIAQLPGEKKNGLFGNLIALSLGLTPNFKSNFDLAEDAKLQLSKDTYDDDLDNLLAQIGDQYADLFLAAKNLSDAILLSDILRVNTEITKAPLSASMIKRYDEHHQDLTLLKALVRQQLPEKYKEIFFDQSKNGYAGYIDGGASQEEFYKFIKPILEKMDGTEELLVKLNREDLLRKQRTFDNGSIPHQIHLGELHAILRRQEDFYPFLKDNREKIEKILTFRIPYYVGPLARGNSRFAWMTRKSEETITPWNFEEVVDKGASAQSFIERMTNFDKNLPNEKVLPKHSLLYEYFTVYNELTKVKYVTEGMRKPAFLSGEQKKAIVDLLFKTNRKVTVKQLKEDYFKKIECFDSVEISGVEDRFNASLGTYHDLLKIIKDKDFLDNEENEDILEDIVLTLTLFEDREMIEERLKTYAHLFDDKVMKQLKRRRYTGWGRLSRKLINGIRDKQSGKTILDFLKSDGFANRNFMQLIHDDSLTFKEDIQKAQVSGQGDSLHEHIANLAGSPAIKKGILQTVKVVDELVKVMGRHKPENIVIEMARENQTTQKGQKNSRERMKRIEEGIKELGSQILKEHPVENTQLQNEKLYLYYLQNGRDMYVDQELDINRLSDYDVDHIVPQSFLKDDSIDNKVLTRSDKARGKSDNVPSEEVVKKMKNYWRQLLNAKLITQRKFDNLTKAERGGLSELDKAGFIKRQLVETRQITKHVAQILDSRMNTKYDENDKLIREVKVITLKSKLVSDFRKDFQFYKVREINNYHHAHDAYLNAVVGTALIKKYPKLESEFVYGDYKVYDVRKMIAKSEQEIGKATAKYFFYSNIMNFFKTEITLANGEIRKRPLIETNGETGEIVWDKGRDFATVRKVLSMPQVNIVKKTEVQTGGFSKESILPKRNSDKLIARKKDWDPKKYGGFDSPTVAYSVLVVAKVEKGKSKKLKSVKELLGITIMERSSFEKNPIDFLEAKGYKEVKKDLIIKLPKYSLFELENGRKRMLASAGELQKGNELALPSKYVNFLYLASHYEKLKGSPEDNEQKQLFVEQHKHYLDEIIEQISEFSKRVILADANLDKVLSAYNKHRDKPIREQAENIIHLFTLTNLGAPAAFKYFDTTIDRKRYTSTKEVLDATLIHQSITGLYETRIDLSQLGGDGGGGGGSGGGGSGGGGSGGTLNIEDEYRLHETSKGPDVPLGSTWLSDFPQAWAETGGMGLAVRQAPLIIPLKATSTPVSIKQYPMSQEARLGIKPHIQRLLDQGILVPCQSPWNTPLLPVKKPGTNDYRPVQDLREVNKRVEDIHPTVPNPYNLLSGLPPSHQWYTVLDLKDAFFCLRLHPTSQSLFAFEWRDPEMGISGQLTWTRLPQGFKNSPTLFNEALHRDLADFRIQHPDLILLQYVDDLLLAATSELDCQQGTRALLQTLGDLGYRASAKKAQICQKQVKYLGYLLKEGQRWLTEARKETVMGQPTPKTPRQLREFLGKAGFCRLFIPGFAEMAAPLYPLTKPGTLFEWGPDQQKAYQEIKQALLTAPALGLPDLTKPFELFVDEKQGYAKGVLTQKLGPWRRPVAYLSKKLDPVAAGWPPCLRMVAAIAVLTKDAGKLTMGQPLVILAPHAVEALVKQPPDRWLSNARMTHYQALLLDTDRVQFGPIVALNPATLLPLPEEGLQHDCLDILAEAHGTRPDLTDQPLPDADHTWYTDGSSFLQEGQRKAGAAVTTETEVVWAKALPAGTSAQRAELIALTQALKMAEGKKLNVYTDSRYAFATAHIHGEIYRRRGWLTSEGKEIKNKDEILALLKALFLPKRLSIIHCPGHQKGNRAEARGNRMADQAAREVATRETPETSTLLAGKRTADGSEFEKRTADGSEFESPKKKAKVE

SEQ ID NO: 2517 - protein, 2093 aa, synthetic construct
MPAAKRVKLDGGDKKYSIGLDIGTNSVGWAVITDEYKVPSKKFKVLGNTDRHSIKKNLIGALLFDSGETAEATRLKRTARRRYTRRKNRICYLQEIFSNEMAKVDDSFFHRLEESFLVEEDKKHERHPIFGNIVDEVAYHEKYPTIYHLRKKLVDSTDKADLRLIYLALAHMIKFRGHFLIEGDLNPDNSDVDKLFIQLVQTYNQLFEENPINASGVDAKAILSARLSKSRRLENLIAQLPGEKKNGLFGNLIALSLGLTPNFKSNFDLAEDAKLQLSKDTYDDDLDNLLAQIGDQYADLFLAAKNLSDAILLSDILRVNTEITKAPLSASMIKRYDEHHQDLTLLKALVRQQLPEKYKEIFFDQSKNGYAGYIDGGASQEEFYKFIKPILEKMDGTEELLVKLNREDLLRKQRTFDNGSIPHQIHLGELHAILRRQEDFYPFLKDNREKIEKILTFRIPYYVGPLARGNSRFAWMTRKSEETITPWNFEEVVDKGASAQSFIERMTNFDKNLPNEKVLPKHSLLYEYFTVYNELTKVKYVTEGMRKPAFLSGEQKKAIVDLLFKTNRKVTVKQLKEDYFKKIECFDSVEISGVEDRFNASLGTYHDLLKIIKDKDFLDNEENEDILEDIVLTLTLFEDREMIEERLKTYAHLFDDKVMKQLKRRRYTGWGRLSRKLINGIRDKQSGKTILDFLKSDGFANRNFMQLIHDDSLTFKEDIQKAQVSGQGDSLHEHIANLAGSPAIKKGILQTVKVVDELVKVMGRHKPENIVIEMARENQTTQKGQKNSRERMKRIEEGIKELGSQILKEHPVENTQLQNEKLYLYYLQNGRDMYVDQELDINRLSDYDVDHIVPQSFLKDDSIDNKVLTRSDKARGKSDNVPSEEVVKKMKNYWRQLLNAKLITQRKFDNLTKAERGGLSELDKAGFIKRQLVETRQITKHVAQILDSRMNTKYDENDKLIREVKVITLKSKLVSDFRKDFQFYKVREINNYHHAHDAYLNAVVGTALIKKYPKLESEFVYGDYKVYDVRKMIAKSEQEIGKATAKYFFYSNIMNFFKTEITLANGEIRKRPLIETNGETGEIVWDKGRDFATVRKVLSMPQVNIVKKTEVQTGGFSKESILPKRNSDKLIARKKDWDPKKYGGFDSPTVAYSVLVVAKVEKGKSKKLKSVKELLGITIMERSSFEKNPIDFLEAKGYKEVKKDLIIKLPKYSLFELENGRKRMLASAGELQKGNELALPSKYVNFLYLASHYEKLKGSPEDNEQKQLFVEQHKHYLDEIIEQISEFSKRVILADANLDKVLSAYNKHRDKPIREQAENIIHLFTLTNLGAPAAFKYFDTTIDRKRYTSTKEVLDATLIHQSITGLYETRIDLSQLGGDGGEAAAKGGGGGTLNIEDEYRLHETSKGPDVPLGSTWLSDFPQAWAETGGMGLAVRQAPLIIPLKATSTPVSIKQYPMSQEARLGIKPHIQRLLDQGILVPCQSPWNTPLLPVKKPGTNDYRPVQDLREVNKRVEDIHPTVPNPYNLLSGLPPSHQWYTVLDLKDAFFCLRLHPTSQSLFAFEWRDPEMGISGQLTWTRLPQGFKNSPTLFNEALHRDLADFRIQHPDLILLQYVDDLLLAATSELDCQQGTRALLQTLGDLGYRASAKKAQICQKQVKYLGYLLKEGQRWLTEARKETVMGQPTPKTPRQLREFLGKAGFCRLFIPGFAEMAAPLYPLTKPGTLFEWGPDQQKAYQEIKQALLTAPALGLPDLTKPFELFVDEKQGYAKGVLTQKLGPWRRPVAYLSKKLDPVAAGWPPCLRMVAAIAVLTKDAGKLTMGQPLVILAPHAVEALVKQPPDRWLSNARMTHYQALLLDTDRVQFGPIVALNPATLLPLPEEGLQHDCLDILAEAHGTRPDLTDQPLPDADHTWYTDGSSFLQEGQRKAGAAVTTETEVVWAKALPAGTSAQRAELIALTQALKMAEGKKLNVYTDSRYAFATAHIHGEIYRRRGWLTSEGKEIKNKDEILALLKALFLPKRLSIIHCPGHQKGNRAEARGNRMADQAAREVATRETPETSTLLAGKRTADGSEFEKRTADGSEFESPKKKAKVE

SEQ ID NO: 2518 - protein, 2101 aa, synthetic construct
MPAAKRVKLDGGDKKYSIGLDIGTNSVGWAVITDEYKVPSKKFKVLGNTDRHSIKKNLIGALLFDSGETAEATRLKRTARRRYTRRKNRICYLQEIFSNEMAKVDDSFFHRLEESFLVEEDKKHERHPIFGNIVDEVAYHEKYPTIYHLRKKLVDSTDKADLRLIYLALAHMIKFRGHFLIEGDLNPDNSDVDKLFIQLVQTYNQLFEENPINASGVDAKAILSARLSKSRRLENLIAQLPGEKKNGLFGNLIALSLGLTPNFKSNFDLAEDAKLQLSKDTYDDDLDNLLAQIGDQYADLFLAAKNLSDAILLSDILRVNTEITKAPLSASMIKRYDEHHQDLTLLKALVRQQLPEKYKEIFFDQSKNGYAGYIDGGASQEEFYKFIKPILEKMDGTEELLVKLNREDLLRKQRTFDNGSIPHQIHLGELHAILRRQEDFYPFLKDNREKIEKILTFRIPYYVGPLARGNSRFAWMTRKSEETITPWNFEEVVDKGASAQSFIERMTNFDKNLPNEKVLPKHSLLYEYFTVYNELTKVKYVTEGMRKPAFLSGEQKKAIVDLLFKTNRKVTVKQLKEDYFKKIECFDSVEISGVEDRFNASLGTYHDLLKIIKDKDFLDNEENEDILEDIVLTLTLFEDREMIEERLKTYAHLFDDKVMKQLKRRRYTGWGRLSRKLINGIRDKQSGKTILDFLKSDGFANRNFMQLIHDDSLTFKEDIQKAQVSGQGDSLHEHIANLAGSPAIKKGILQTVKVVDELVKVMGRHKPENIVIEMARENQTTQKGQKNSRERMKRIEEGIKELGSQILKEHPVENTQLQNEKLYLYYLQNGRDMYVDQELDINRLSDYDVDHIVPQSFLKDDSIDNKVLTRSDKARGKSDNVPSEEVVKKMKNYWRQLLNAKLITQRKFDNLTKAERGGLSELDKAGFIKRQLVETRQITKHVAQILDSRMNTKYDENDKLIREVKVITLKSKLVSDFRKDFQFYKVREINNYHHAHDAYLNAVVGTALIKKYPKLESEFVYGDYKVYDVRKMIAKSEQEIGKATAKYFFYSNIMNFFKTEITLANGEIRKRPLIETNGETGEIVWDKGRDFATVRKVLSMPQVNIVKKTEVQTGGFSKESILPKRNSDKLIARKKDWDPKKYGGFDSPTVAYSVLVVAKVEKGKSKKLKSVKELLGITIMERSSFEKNPIDFLEAKGYKEVKKDLIIKLPKYSLFELENGRKRMLASAGELQKGNELALPSKYVNFLYLASHYEKLKGSPEDNEQKQLFVEQHKHYLDEIIEQISEFSKRVILADANLDKVLSAYNKHRDKPIREQAENIIHLFTLTNLGAPAAFKYFDTTIDRKRYTSTKEVLDATLIHQSITGLYETRIDLSQLGGDGGSGSETPGTSESATPESGGTLNIEDEYRLHETSKGPDVPLGSTWLSDFPQAWAETGGMGLAVRQAPLIIPLKATSTPVSIKQYPMSQEARLGIKPHIQRLLDQGILVPCQSPWNTPLLPVKKPGTNDYRPVQDLREVNKRVEDIHPTVPNPYNLLSGLPPSHQWYTVLDLKDAFFCLRLHPTSQSLFAFEWRDPEMGISGQLTWTRLPQGFKNSPTLFNEALHRDLADFRIQHPDLILLQYVDDLLLAATSELDCQQGTRALLQTLGDLGYRASAKKAQICQKQVKYLGYLLKEGQRWLTEARKETVMGQPTPKTPRQLREFLGKAGFCRLFIPGFAEMAAPLYPLTKPGTLFEWGPDQQKAYQEIKQALLTAPALGLPDLTKPFELFVDEKQGYAKGVLTQKLGPWRRPVAYLSKKLDPVAAGWPPCLRMVAAIAVLTKDAGKLTMGQPLVILAPHAVEALVKQPPDRWLSNARMTHYQALLLDTDRVQFGPIVALNPATLLPLPEEGLQHDCLDILAEAHGTRPDLTDQPLPDADHTWYTDGSSFLQEGQRKAGAAVTTETEVVWAKALPAGTSAQRAELIALTQALKMAEGKKLNVYTDSRYAFATAHIHGEIYRRRGWLTSEGKEIKNKDEILALLKALFLPKRLSIIHCPGHQKGNRAEARGNRMADQAAREVATRETPETSTLLAGKRTADGSEFEKRTADGSEFESPKKKAKVE

SEQ ID NO: 2519 - protein, 2096 aa, synthetic construct
MPAAKRVKLDGGDKKYSIGLDIGTNSVGWAVITDEYKVPSKKFKVLGNTDRHSIKKNLIGALLFDSGETAEATRLKRTARRRYTRRKNRICYLQEIFSNEMAKVDDSFFHRLEESFLVEEDKKHERHPIFGNIVDEVAYHEKYPTIYHLRKKLVDSTDKADLRLIYLALAHMIKFRGHFLIEGDLNPDNSDVDKLFIQLVQTYNQLFEENPINASGVDAKAILSARLSKSRRLENLIAQLPGEKKNGLFGNLIALSLGLTPNFKSNFDLAEDAKLQLSKDTYDDDLDNLLAQIGDQYADLFLAAKNLSDAILLSDILRVNTEITKAPLSASMIKRYDEHHQDLTLLKALVRQQLPEKYKEIFFDQSKNGYAGYIDGGASQEEFYKFIKPILEKMDGTEELLVKLNREDLLRKQRTFDNGSIPHQIHLGELHAILRRQEDFYPFLKDNREKIEKILTFRIPYYVGPLARGNSRFAWMTRKSEETITPWNFEEVVDKGASAQSFIERMTNFDKNLPNEKVLPKHSLLYEYFTVYNELTKVKYVTEGMRKPAFLSGEQKKAIVDLLFKTNRKVTVKQLKEDYFKKIECFDSVEISGVEDRFNASLGTYHDLLKIIKDKDFLDNEENEDILEDIVLTLTLFEDREMIEERLKTYAHLFDDKVMKQLKRRRYTGWGRLSRKLINGIRDKQSGKTILDFLKSDGFANRNFMQLIHDDSLTFKEDIQKAQVSGQGDSLHEHIANLAGSPAIKKGILQTVKVVDELVKVMGRHKPENIVIEMARENQTTQKGQKNSRERMKRIEEGIKELGSQILKEHPVENTQLQNEKLYLYYLQNGRDMYVDQELDINRLSDYDVDHIVPQSFLKDDSIDNKVLTRSDKARGKSDNVPSEEVVKKMKNYWRQLLNAKLITQRKFDNLTKAERGGLSELDKAGFIKRQLVETRQITKHVAQILDSRMNTKYDENDKLIREVKVITLKSKLVSDFRKDFQFYKVREINNYHHAHDAYLNAVVGTALIKKYPKLESEFVYGDYKVYDVRKMIAKSEQEIGKATAKYFFYSNIMNFFKTEITLANGEIRKRPLIETNGETGEIVWDKGRDFATVRKVLSMPQVNIVKKTEVQTGGFSKESILPKRNSDKLIARKKDWDPKKYGGFDSPTVAYSVLVVAKVEKGKSKKLKSVKELLGITIMERSSFEKNPIDFLEAKGYKEVKKDLIIKLPKYSLFELENGRKRMLASAGELQKGNELALPSKYVNFLYLASHYEKLKGSPEDNEQKQLFVEQHKHYLDEIIEQISEFSKRVILADANLDKVLSAYNKHRDKPIREQAENIIHLFTLTNLGAPAAFKYFDTTIDRKRYTSTKEVLDATLIHQSITGLYETRIDLSQLGGDGGEAAAKPAPGSSGGTLNIEDEYRLHETSKGPDVPLGSTWLSDFPQAWAETGGMGLAVRQAPLIIPLKATSTPVSIKQYPMSQEARLGIKPHIQRLLDQGILVPCQSPWNTPLLPVKKPGTNDYRPVQDLREVNKRVEDIHPTVPNPYNLLSGLPPSHQWYTVLDLKDAFFCLRLHPTSQSLFAFEWRDPEMGISGQLTWTRLPQGFKNSPTLFNEALHRDLADFRIQHPDLILLQYVDDLLLAATSELDCQQGTRALLQTLGDLGYRASAKKAQICQKQVKYLGYLLKEGQRWLTEARKETVMGQPTPKTPRQLREFLGKAGFCRLFIPGFAEMAAPLYPLTKPGTLFEWGPDQQKAYQEIKQALLTAPALGLPDLTKPFELFVDEKQGYAKGVLTQKLGPWRRPVAYLSKKLDPVAAGWPPCLRMVAAIAVLTKDAGKLTMGQPLVILAPHAVEALVKQPPDRWLSNARMTHYQALLLDTDRVQFGPIVALNPATLLPLPEEGLQHDCLDILAEAHGTRPDLTDQPLPDADHTWYTDGSSFLQEGQRKAGAAVTTETEVVWAKALPAGTSAQRAELIALTQALKMAEGKKLNVYTDSRYAFATAHIHGEIYRRRGWLTSEGKEIKNKDEILALLKALFLPKRLSIIHCPGHQKGNRAEARGNRMADQAAREVATRETPETSTLLAGKRTADGSEFEKRTADGSEFESPKKKAKVE

SEQ ID NO: 2520 - protein, 2091 aa, synthetic construct
MPAAKRVKLDGGDKKYSIGLDIGTNSVGWAVITDEYKVPSKKFKVLGNTDRHSIKKNLIGALLFDSGETAEATRLKRTARRRYTRRKNRICYLQEIFSNEMAKVDDSFFHRLEESFLVEEDKKHERHPIFGNIVDEVAYHEKYPTIYHLRKKLVDSTDKADLRLIYLALAHMIKFRGHFLIEGDLNPDNSDVDKLFIQLVQTYNQLFEENPINASGVDAKAILSARLSKSRRLENLIAQLPGEKKNGLFGNLIALSLGLTPNFKSNFDLAEDAKLQLSKDTYDDDLDNLLAQIGDQYADLFLAAKNLSDAILLSDILRVNTEITKAPLSASMIKRYDEHHQDLTLLKALVRQQLPEKYKEIFFDQSKNGYAGYIDGGASQEEFYKFIKPILEKMDGTEELLVKLNREDLLRKQRTFDNGSIPHQIHLGELHAILRRQEDFYPFLKDNREKIEKILTFRIPYYVGPLARGNSRFAWMTRKSEETITPWNFEEVVDKGASAQSFIERMTNFDKNLPNEKVLPKHSLLYEYFTVYNELTKVKYVTEGMRKPAFLSGEQKKAIVDLLFKTNRKVTVKQLKEDYFKKIECFDSVEISGVEDRFNASLGTYHDLLKIIKDKDFLDNEENEDILEDIVLTLTLFEDREMIEERLKTYAHLFDDKVMKQLKRRRYTGWGRLSRKLINGIRDKQSGKTILDFLKSDGFANRNFMQLIHDDSLTFKEDIQKAQVSGQGDSLHEHIANLAGSPAIKKGILQTVKVVDELVKVMGRHKPENIVIEMARENQTTQKGQKNSRERMKRIEEGIKELGSQILKEHPVENTQLQNEKLYLYYLQNGRDMYVDQELDINRLSDYDVDHIVPQSFLKDDSIDNKVLTRSDKARGKSDNVPSEEVVKKMKNYWRQLLNAKLITQRKFDNLTKAERGGLSELDKAGFIKRQLVETRQITKHVAQILDSRMNTKYDENDKLIREVKVITLKSKLVSDFRKDFQFYKVREINNYHHAHDAYLNAVVGTALIKKYPKLESEFVYGDYKVYDVRKMIAKSEQEIGKATAKYFFYSNIMNFFKTEITLANGEIRKRPLIETNGETGEIVWDKGRDFATVRKVLSMPQVNIVKKTEVQTGGFSKESILPKRNSDKLIARKKDWDPKKYGGFDSPTVAYSVLVVAKVEKGKSKKLKSVKELLGITIMERSSFEKNPIDFLEAKGYKEVKKDLIIKLPKYSLFELENGRKRMLASAGELQKGNELALPSKYVNFLYLASHYEKLKGSPEDNEQKQLFVEQHKHYLDEIIEQISEFSKRVILADANLDKVLSAYNKHRDKPIREQAENIIHLFTLTNLGAPAAFKYFDTTIDRKRYTSTKEVLDATLIHQSITGLYETRIDLSQLGGDGGGSSGSSGGTLNIEDEYRLHETSKGPDVPLGSTWLSDFPQAWAETGGMGLAVRQAPLIIPLKATSTPVSIKQYPMSQEARLGIKPHIQRLLDQGILVPCQSPWNTPLLPVKKPGTNDYRPVQDLREVNKRVEDIHPTVPNPYNLLSGLPPSHQWYTVLDLKDAFFCLRLHPTSQSLFAFEWRDPEMGISGQLTWTRLPQGFKNSPTLFNEALHRDLADFRIQHPDLILLQYVDDLLLAATSELDCQQGTRALLQTLGDLGYRASAKKAQICQKQVKYLGYLLKEGQRWLTEARKETVMGQPTPKTPRQLREFLGKAGFCRLFIPGFAEMAAPLYPLTKPGTLFEWGPDQQKAYQEIKQALLTAPALGLPDLTKPFELFVDEKQGYAKGVLTQKLGPWRRPVAYLSKKLDPVAAGWPPCLRMVAAIAVLTKDAGKLTMGQPLVILAPHAVEALVKQPPDRWLSNARMTHYQALLLDTDRVQFGPIVALNPATLLPLPEEGLQHDCLDILAEAHGTRPDLTDQPLPDADHTWYTDGSSFLQEGQRKAGAAVTTETEVVWAKALPAGTSAQRAELIALTQALKMAEGKKLNVYTDSRYAFATAHIHGEIYRRRGWLTSEGKEIKNKDEILALLKALFLPKRLSIIHCPGHQKGNRAEARGNRMADQAAREVATRETPETSTLLAGKRTADGSEFEKRTADGSEFESPKKKAKVE

SEQ ID NO: 2521 - protein, 2096 aa, synthetic construct
MPAAKRVKLDGGDKKYSIGLDIGTNSVGWAVITDEYKVPSKKFKVLGNTDRHSIKKNLIGALLFDSGETAEATRLKRTARRRYTRRKNRICYLQEIFSNEMAKVDDSFFHRLEESFLVEEDKKHERHPIFGNIVDEVAYHEKYPTIYHLRKKLVDSTDKADLRLIYLALAHMIKFRGHFLIEGDLNPDNSDVDKLFIQLVQTYNQLFEENPINASGVDAKAILSARLSKSRRLENLIAQLPGEKKNGLFGNLIALSLGLTPNFKSNFDLAEDAKLQLSKDTYDDDLDNLLAQIGDQYADLFLAAKNLSDAILLSDILRVNTEITKAPLSASMIKRYDEHHQDLTLLKALVRQQLPEKYKEIFFDQSKNGYAGYIDGGASQEEFYKFIKPILEKMDGTEELLVKLNREDLLRKQRTFDNGSIPHQIHLGELHAILRRQEDFYPFLKDNREKIEKILTFRIPYYVGPLARGNSRFAWMTRKSEETITPWNFEEVVDKGASAQSFIERMTNFDKNLPNEKVLPKHSLLYEYFTVYNELTKVKYVTEGMRKPAFLSGEQKKAIVDLLFKTNRKVTVKQLKEDYFKKIECFDSVEISGVEDRFNASLGTYHDLLKIIKDKDFLDNEENEDILEDIVLTLTLFEDREMIEERLKTYAHLFDDKVMKQLKRRRYTGWGRLSRKLINGIRDKQSGKTILDFLKSDGFANRNFMQLIHDDSLTFKEDIQKAQVSGQGDSLHEHIANLAGSPAIKKGILQTVKVVDELVKVMGRHKPENIVIEMARENQTTQKGQKNSRERMKRIEEGIKELGSQILKEHPVENTQLQNEKLYLYYLQNGRDMYVDQELDINRLSDYDVDHIVPQSFLKDDSIDNKVLTRSDKARGKSDNVPSEEVVKKMKNYWRQLLNAKLITQRKFDNLTKAERGGLSELDKAGFIKRQLVETRQITKHVAQILDSRMNTKYDENDKLIREVKVITLKSKLVSDFRKDFQFYKVREINNYHHAHDAYLNAVVGTALIKKYPKLESEFVYGDYKVYDVRKMIAKSEQEIGKATAKYFFYSNIMNFFKTEITLANGEIRKRPLIETNGETGEIVWDKGRDFATVRKVLSMPQVNIVKKTEVQTGGFSKESILPKRNSDKLIARKKDWDPKKYGGFDSPTVAYSVLVVAKVEKGKSKKLKSVKELLGITIMERSSFEKNPIDFLEAKGYKEVKKDLIIKLPKYSLFELENGRKRMLASAGELQKGNELALPSKYVNFLYLASHYEKLKGSPEDNEQKQLFVEQHKHYLDEIIEQISEFSKRVILADANLDKVLSAYNKHRDKPIREQAENIIHLFTLTNLGAPAAFKYFDTTIDRKRYTSTKEVLDATLIHQSITGLYETRIDLSQLGGDGGGGGEAAAKGGSGGTLNIEDEYRLHETSKGPDVPLGSTWLSDFPQAWAETGGMGLAVRQAPLIIPLKATSTPVSIKQYPMSQEARLGIKPHIQRLLDQGILVPCQSPWNTPLLPVKKPGTNDYRPVQDLREVNKRVEDIHPTVPNPYNLLSGLPPSHQWYTVLDLKDAFFCLRLHPTSQSLFAFEWRDPEMGISGQLTWTRLPQGFKNSPTLFNEALHRDLADFRIQHPDLILLQYVDDLLLAATSELDCQQGTRALLQTLGDLGYRASAKKAQICQKQVKYLGYLLKEGQRWLTEARKETVMGQPTPKTPRQLREFLGKAGFCRLFIPGFAEMAAPLYPLTKPGTLFEWGPDQQKAYQEIKQALLTAPALGLPDLTKPFELFVDEKQGYAKGVLTQKLGPWRRPVAYLSKKLDPVAAGWPPCLRMVAAIAVLTKDAGKLTMGQPLVILAPHAVEALVKQPPDRWLSNARMTHYQALLLDTDRVQFGPIVALNPATLLPLPEEGLQHDCLDILAEAHGTRPDLTDQPLPDADHTWYTDGSSFLQEGQRKAGAAVTTETEVVWAKALPAGTSAQRAELIALTQALKMAEGKKLNVYTDSRYAFATAHIHGEIYRRRGWLTSEGKEIKNKDEILALLKALFLPKRLSIIHCPGHQKGNRAEARGNRMADQAAREVATRETPETSTLLAGKRTADGSEFEKRTADGSEFESPKKKAKVE

SEQ ID NO: 2522 - protein, 2105 aa, synthetic construct
MPAAKRVKLDGGDKKYSIGLDIGTNSVGWAVITDEYKVPSKKFKVLGNTDRHSIKKNLIGALLFDSGETAEATRLKRTARRRYTRRKNRICYLQEIFSNEMAKVDDSFFHRLEESFLVEEDKKHERHPIFGNIVDEVAYHEKYPTIYHLRKKLVDSTDKADLRLIYLALAHMIKFRGHFLIEGDLNPDNSDVDKLFIQLVQTYNQLFEENPINASGVDAKAILSARLSKSRRLENLIAQLPGEKKNGLFGNLIALSLGLTPNFKSNFDLAEDAKLQLSKDTYDDDLDNLLAQIGDQYADLFLAAKNLSDAILLSDILRVNTEITKAPLSASMIKRYDEHHQDLTLLKALVRQQLPEKYKEIFFDQSKNGYAGYIDGGASQEEFYKFIKPILEKMDGTEELLVKLNREDLLRKQRTFDNGSIPHQIHLGELHAILRRQEDFYPFLKDNREKIEKILTFRIPYYVGPLARGNSRFAWMTRKSEETITPWNFEEVVDKGASAQSFIERMTNFDKNLPNEKVLPKHSLLYEYFTVYNELTKVKYVTEGMRKPAFLSGEQKKAIVDLLFKTNRKVTVKQLKEDYFKKIECFDSVEISGVEDRFNASLGTYHDLLKIIKDKDFLDNEENEDILEDIVLTLTLFEDREMIEERLKTYAHLFDDKVMKQLKRRRYTGWGRLSRKLINGIRDKQSGKTILDFLKSDGFANRNFMQLIHDDSLTFKEDIQKAQVSGQGDSLHEHIANLAGSPAIKKGILQTVKVVDELVKVMGRHKPENIVIEMARENQTTQKGQKNSRERMKRIEEGIKELGSQILKEHPVENTQLQNEKLYLYYLQNGRDMYVDQELDINRLSDYDVDHIVPQSFLKDDSIDNKVLTRSDKARGKSDNVPSEEVVKKMKNYWRQLLNAKLITQRKFDNLTKAERGGLSELDKAGFIKRQLVETRQITKHVAQILDSRMNTKYDENDKLIREVKVITLKSKLVSDFRKDFQFYKVREINNYHHAHDAYLNAVVGTALIKKYPKLESEFVYGDYKVYDVRKMIAKSEQEIGKATAKYFFYSNIMNFFKTEITLANGEIRKRPLIETNGETGEIVWDKGRDFATVRKVLSMPQVNIVKKTEVQTGGFSKESILPKRNSDKLIARKKDWDPKKYGGFDSPTVAYSVLVVAKVEKGKSKKLKSVKELLGITIMERSSFEKNPIDFLEAKGYKEVKKDLIIKLPKYSLFELENGRKRMLASAGELQKGNELALPSKYVNFLYLASHYEKLKGSPEDNEQKQLFVEQHKHYLDEIIEQISEFSKRVILADANLDKVLSAYNKHRDKPIREQAENIIHLFTLTNLGAPAAFKYFDTTIDRKRYTSTKEVLDATLIHQSITGLYETRIDLSQLGGDGGEAAAKEAAAKEAAAKEAAAKGGTLNIEDEYRLHETSKGPDVPLGSTWLSDFPQAWAETGGMGLAVRQAPLIIPLKATSTPVSIKQYPMSQEARLGIKPHIQRLLDQGILVPCQSPWNTPLLPVKKPGTNDYRPVQDLREVNKRVEDIHPTVPNPYNLLSGLPPSHQWYTVLDLKDAFFCLRLHPTSQSLFAFEWRDPEMGISGQLTWTRLPQGFKNSPTLFNEALHRDLADFRIQHPDLILLQYVDDLLLAATSELDCQQGTRALLQTLGDLGYRASAKKAQICQKQVKYLGYLLKEGQRWLTEARKETVMGQPTPKTPRQLREFLGKAGFCRLFIPGFAEMAAPLYPLTKPGTLFEWGPDQQKAYQEIKQALLTAPALGLPDLTKPFELFVDEKQGYAKGVLTQKLGPWRRPVAYLSKKLDPVAAGWPPCLRMVAAIAVLTKDAGKLTMGQPLVILAPHAVEALVKQPPDRWLSNARMTHYQALLLDTDRVQFGPIVALNPATLLPLPEEGLQHDCLDILAEAHGTRPDLTDQPLPDADHTWYTDGSSFLQEGQRKAGAAVTTETEVVWAKALPAGTSAQRAELIALTQALKMAEGKKLNVYTDSRYAFATAHIHGEIYRRRGWLTSEGKEIKNKDEILALLKALFLPKRLSIIHCPGHQKGNRAEARGNRMADQAAREVATRETPETSTLLAGKRTADGSEFEKRTADGSEFESPKKKAKVE

SEQ ID NO: 2523 - protein, 2094 aa, synthetic construct
MPAAKRVKLDGGDKKYSIGLDIGTNSVGWAVITDEYKVPSKKFKVLGNTDRHSIKKNLIGALLFDSGETAEATRLKRTARRRYTRRKNRICYLQEIFSNEMAKVDDSFFHRLEESFLVEEDKKHERHPIFGNIVDEVAYHEKYPTIYHLRKKLVDSTDKADLRLIYLALAHMIKFRGHFLIEGDLNPDNSDVDKLFIQLVQTYNQLFEENPINASGVDAKAILSARLSKSRRLENLIAQLPGEKKNGLFGNLIALSLGLTPNFKSNFDLAEDAKLQLSKDTYDDDLDNLLAQIGDQYADLFLAAKNLSDAILLSDILRVNTEITKAPLSASMIKRYDEHHQDLTLLKALVRQQLPEKYKEIFFDQSKNGYAGYIDGGASQEEFYKFIKPILEKMDGTEELLVKLNREDLLRKQRTFDNGSIPHQIHLGELHAILRRQEDFYPFLKDNREKIEKILTFRIPYYVGPLARGNSRFAWMTRKSEETITPWNFEEVVDKGASAQSFIERMTNFDKNLPNEKVLPKHSLLYEYFTVYNELTKVKYVTEGMRKPAFLSGEQKKAIVDLLFKTNRKVTVKQLKEDYFKKIECFDSVEISGVEDRFNASLGTYHDLLKIIKDKDFLDNEENEDILEDIVLTLTLFEDREMIEERLKTYAHLFDDKVMKQLKRRRYTGWGRLSRKLINGIRDKQSGKTILDFLKSDGFANRNFMQLIHDDSLTFKEDIQKAQVSGQGDSLHEHIANLAGSPAIKKGILQTVKVVDELVKVMGRHKPENIVIEMARENQTTQKGQKNSRERMKRIEEGIKELGSQILKEHPVENTQLQNEKLYLYYLQNGRDMYVDQELDINRLSDYDVDHIVPQSFLKDDSIDNKVLTRSDKARGKSDNVPSEEVVKKMKNYWRQLLNAKLITQRKFDNLTKAERGGLSELDKAGFIKRQLVETRQITKHVAQILDSRMNTKYDENDKLIREVKVITLKSKLVSDFRKDFQFYKVREINNYHHAHDAYLNAVVGTALIKKYPKLESEFVYGDYKVYDVRKMIAKSEQEIGKATAKYFFYSNIMNFFKTEITLANGEIRKRPLIETNGETGEIVWDKGRDFATVRKVLSMPQVNIVKKTEVQTGGFSKESILPKRNSDKLIARKKDWDPKKYGGFDSPTVAYSVLVVAKVEKGKSKKLKSVKELLGITIMERSSFEKNPIDFLEAKGYKEVKKDLIIKLPKYSLFELENGRKRMLASAGELQKGNELALPSKYVNFLYLASHYEKLKGSPEDNEQKQLFVEQHKHYLDEIIEQISEFSKRVILADANLDKVLSAYNKHRDKPIREQAENIIHLFTLTNLGAPAAFKYFDTTIDRKRYTSTKEVLDATLIHQSITGLYETRIDLSQLGGDGGGGSGGSGGSGGTLNIEDEYRLHETSKGPDVPLGSTWLSDFPQAWAETGGMGLAVRQAPLIIPLKATSTPVSIKQYPMSQEARLGIKPHIQRLLDQGILVPCQSPWNTPLLPVKKPGTNDYRPVQDLREVNKRVEDIHPTVPNPYNLLSGLPPSHQWYTVLDLKDAFFCLRLHPTSQSLFAFEWRDPEMGISGQLTWTRLPQGFKNSPTLFNEALHRDLADFRIQHPDLILLQYVDDLLLAATSELDCQQGTRALLQTLGDLGYRASAKKAQICQKQVKYLGYLLKEGQRWLTEARKETVMGQPTPKTPRQLREFLGKAGFCRLFIPGFAEMAAPLYPLTKPGTLFEWGPDQQKAYQEIKQALLTAPALGLPDLTKPFELFVDEKQGYAKGVLTQKLGPWRRPVAYLSKKLDPVAAGWPPCLRMVAAIAVLTKDAGKLTMGQPLVILAPHAVEALVKQPPDRWLSNARMTHYQALLLDTDRVQFGPIVALNPATLLPLPEEGLQHDCLDILAEAHGTRPDLTDQPLPDADHTWYTDGSSFLQEGQRKAGAAVTTETEVVWAKALPAGTSAQRAELIALTQALKMAEGKKLNVYTDSRYAFATAHIHGEIYRRRGWLTSEGKEIKNKDEILALLKALFLPKRLSIIHCPGHQKGNRAEARGNRMADQAAREVATRETPETSTLLAGKRTADGSEFEKRTADGSEFESPKKKAKVE

SEQ ID NO: 2524 - protein, 2088 aa, synthetic construct
MPAAKRVKLDGGDKKYSIGLDIGTNSVGWAVITDEYKVPSKKFKVLGNTDRHSIKKNLIGALLFDSGETAEATRLKRTARRRYTRRKNRICYLQEIFSNEMAKVDDSFFHRLEESFLVEEDKKHERHPIFGNIVDEVAYHEKYPTIYHLRKKLVDSTDKADLRLIYLALAHMIKFRGHFLIEGDLNPDNSDVDKLFIQLVQTYNQLFEENPINASGVDAKAILSARLSKSRRLENLIAQLPGEKKNGLFGNLIALSLGLTPNFKSNFDLAEDAKLQLSKDTYDDDLDNLLAQIGDQYADLFLAAKNLSDAILLSDILRVNTEITKAPLSASMIKRYDEHHQDLTLLKALVRQQLPEKYKEIFFDQSKNGYAGYIDGGASQEEFYKFIKPILEKMDGTEELLVKLNREDLLRKQRTFDNGSIPHQIHLGELHAILRRQEDFYPFLKDNREKIEKILTFRIPYYVGPLARGNSRFAWMTRKSEETITPWNFEEVVDKGASAQSFIERMTNFDKNLPNEKVLPKHSLLYEYFTVYNELTKVKYVTEGMRKPAFLSGEQKKAIVDLLFKTNRKVTVKQLKEDYFKKIECFDSVEISGVEDRFNASLGTYHDLLKIIKDKDFLDNEENEDILEDIVLTLTLFEDREMIEERLKTYAHLFDDKVMKQLKRRRYTGWGRLSRKLINGIRDKQSGKTILDFLKSDGFANRNFMQLIHDDSLTFKEDIQKAQVSGQGDSLHEHIANLAGSPAIKKGILQTVKVVDELVKVMGRHKPENIVIEMARENQTTQKGQKNSRERMKRIEEGIKELGSQILKEHPVENTQLQNEKLYLYYLQNGRDMYVDQELDINRLSDYDVDHIVPQSFLKDDSIDNKVLTRSDKARGKSDNVPSEEVVKKMKNYWRQLLNAKLITQRKFDNLTKAERGGLSELDKAGFIKRQLVETRQITKHVAQILDSRMNTKYDENDKLIREVKVITLKSKLVSDFRKDFQFYKVREINNYHHAHDAYLNAVVGTALIKKYPKLESEFVYGDYKVYDVRKMIAKSEQEIGKATAKYFFYSNIMNFFKTEITLANGEIRKRPLIETNGETGEIVWDKGRDFATVRKVLSMPQVNIVKKTEVQTGGFSKESILPKRNSDKLIARKKDWDPKKYGGFDSPTVAYSVLVVAKVEKGKSKKLKSVKELLGITIMERSSFEKNPIDFLEAKGYKEVKKDLIIKLPKYSLFELENGRKRMLASAGELQKGNELALPSKYVNFLYLASHYEKLKGSPEDNEQKQLFVEQHKHYLDEIIEQISEFSKRVILADANLDKVLSAYNKHRDKPIREQAENIIHLFTLTNLGAPAAFKYFDTTIDRKRYTSTKEVLDATLIHQSITGLYETRIDLSQLGGDGGPAPGGTLNIEDEYRLHETSKGPDVPLGSTWLSDFPQAWAETGGMGLAVRQAPLIIPLKATSTPVSIKQYPMSQEARLGIKPHIQRLLDQGILVPCQSPWNTPLLPVKKPGTNDYRPVQDLREVNKRVEDIHPTVPNPYNLLSGLPPSHQWYTVLDLKDAFFCLRLHPTSQSLFAFEWRDPEMGISGQLTWTRLPQGFKNSPTLFNEALHRDLADFRIQHPDLILLQYVDDLLLAATSELDCQQGTRALLQTLGDLGYRASAKKAQICQKQVKYLGYLLKEGQRWLTEARKETVMGQPTPKTPRQLREFLGKAGFCRLFIPGFAEMAAPLYPLTKPGTLFEWGPDQQKAYQEIKQALLTAPALGLPDLTKPFELFVDEKQGYAKGVLTQKLGPWRRPVAYLSKKLDPVAAGWPPCLRMVAAIAVLTKDAGKLTMGQPLVILAPHAVEALVKQPPDRWLSNARMTHYQALLLDTDRVQFGPIVALNPATLLPLPEEGLQHDCLDILAEAHGTRPDLTDQPLPDADHTWYTDGSSFLQEGQRKAGAAVTTETEVVWAKALPAGTSAQRAELIALTQALKMAEGKKLNVYTDSRYAFATAHIHGEIYRRRGWLTSEGKEIKNKDEILALLKALFLPKRLSIIHCPGHQKGNRAEARGNRMADQAAREVATRETPETSTLLAGKRTADGSEFEKRTADGSEFESPKKKAKVE

SEQ ID NO: 2525 - protein, 2094 aa, synthetic construct
MPAAKRVKLDGGDKKYSIGLDIGTNSVGWAVITDEYKVPSKKFKVLGNTDRHSIKKNLIGALLFDSGETAEATRLKRTARRRYTRRKNRICYLQEIFSNEMAKVDDSFFHRLEESFLVEEDKKHERHPIFGNIVDEVAYHEKYPTIYHLRKKLVDSTDKADLRLIYLALAHMIKFRGHFLIEGDLNPDNSDVDKLFIQLVQTYNQLFEENPINASGVDAKAILSARLSKSRRLENLIAQLPGEKKNGLFGNLIALSLGLTPNFKSNFDLAEDAKLQLSKDTYDDDLDNLLAQIGDQYADLFLAAKNLSDAILLSDILRVNTEITKAPLSASMIKRYDEHHQDLTLLKALVRQQLPEKYKEIFFDQSKNGYAGYIDGGASQEEFYKFIKPILEKMDGTEELLVKLNREDLLRKQRTFDNGSIPHQIHLGELHAILRRQEDFYPFLKDNREKIEKILTFRIPYYVGPLARGNSRFAWMTRKSEETITPWNFEEVVDKGASAQSFIERMTNFDKNLPNEKVLPKHSLLYEYFTVYNELTKVKYVTEGMRKPAFLSGEQKKAIVDLLFKTNRKVTVKQLKEDYFKKIECFDSVEISGVEDRFNASLGTYHDLLKIIKDKDFLDNEENEDILEDIVLTLTLFEDREMIEERLKTYAHLFDDKVMKQLKRRRYTGWGRLSRKLINGIRDKQSGKTILDFLKSDGFANRNFMQLIHDDSLTFKEDIQKAQVSGQGDSLHEHIANLAGSPAIKKGILQTVKVVDELVKVMGRHKPENIVIEMARENQTTQKGQKNSRERMKRIEEGIKELGSQILKEHPVENTQLQNEKLYLYYLQNGRDMYVDQELDINRLSDYDVDHIVPQSFLKDDSIDNKVLTRSDKARGKSDNVPSEEVVKKMKNYWRQLLNAKLITQRKFDNLTKAERGGLSELDKAGFIKRQLVETRQITKHVAQILDSRMNTKYDENDKLIREVKVITLKSKLVSDFRKDFQFYKVREINNYHHAHDAYLNAVVGTALIKKYPKLESEFVYGDYKVYDVRKMIAKSEQEIGKATAKYFFYSNIMNFFKTEITLANGEIRKRPLIETNGETGEIVWDKGRDFATVRKVLSMPQVNIVKKTEVQTGGFSKESILPKRNSDKLIARKKDWDPKKYGGFDSPTVAYSVLVVAKVEKGKSKKLKSVKELLGITIMERSSFEKNPIDFLEAKGYKEVKKDLIIKLPKYSLFELENGRKRMLASAGELQKGNELALPSKYVNFLYLASHYEKLKGSPEDNEQKQLFVEQHKHYLDEIIEQISEFSKRVILADANLDKVLSAYNKHRDKPIREQAENIIHLFTLTNLGAPAAFKYFDTTIDRKRYTSTKEVLDATLIHQSITGLYETRIDLSQLGGDGGPAPAPAPAPGGTLNIEDEYRLHETSKGPDVPLGSTWLSDFPQAWAETGGMGLAVRQAPLIIPLKATSTPVSIKQYPMSQEARLGIKPHIQRLLDQGILVPCQSPWNTPLLPVKKPGTNDYRPVQDLREVNKRVEDIHPTVPNPYNLLSGLPPSHQWYTVLDLKDAFFCLRLHPTSQSLFAFEWRDPEMGISGQLTWTRLPQGFKNSPTLFNEALHRDLADFRIQHPDLILLQYVDDLLLAATSELDCQQGTRALLQTLGDLGYRASAKKAQICQKQVKYLGYLLKEGQRWLTEARKETVMGQPTPKTPRQLREFLGKAGFCRLFIPGFAEMAAPLYPLTKPGTLFEWGPDQQKAYQEIKQALLTAPALGLPDLTKPFELFVDEKQGYAKGVLTQKLGPWRRPVAYLSKKLDPVAAGWPPCLRMVAAIAVLTKDAGKLTMGQPLVILAPHAVEALVKQPPDRWLSNARMTHYQALLLDTDRVQFGPIVALNPATLLPLPEEGLQHDCLDILAEAHGTRPDLTDQPLPDADHTWYTDGSSFLQEGQRKAGAAVTTETEVVWAKALPAGTSAQRAELIALTQALKMAEGKKLNVYTDSRYAFATAHIHGEIYRRRGWLTSEGKEIKNKDEILALLKALFLPKRLSIIHCPGHQKGNRAEARGNRMADQAAREVATRETPETSTLLAGKRTADGSEFEKRTADGSEFESPKKKAKVE

SEQ ID NO: 2526 - protein, 2096 aa, synthetic construct
MPAAKRVKLDGGDKKYSIGLDIGTNSVGWAVITDEYKVPSKKFKVLGNTDRHSIKKNLIGALLFDSGETAEATRLKRTARRRYTRRKNRICYLQEIFSNEMAKVDDSFFHRLEESFLVEEDKKHERHPIFGNIVDEVAYHEKYPTIYHLRKKLVDSTDKADLRLIYLALAHMIKFRGHFLIEGDLNPDNSDVDKLFIQLVQTYNQLFEENPINASGVDAKAILSARLSKSRRLENLIAQLPGEKKNGLFGNLIALSLGLTPNFKSNFDLAEDAKLQLSKDTYDDDLDNLLAQIGDQYADLFLAAKNLSDAILLSDILRVNTEITKAPLSASMIKRYDEHHQDLTLLKALVRQQLPEKYKEIFFDQSKNGYAGYIDGGASQEEFYKFIKPILEKMDGTEELLVKLNREDLLRKQRTFDNGSIPHQIHLGELHAILRRQEDFYPFLKDNREKIEKILTFRIPYYVGPLARGNSRFAWMTRKSEETITPWNFEEVVDKGASAQSFIERMTNFDKNLPNEKVLPKHSLLYEYFTVYNELTKVKYVTEGMRKPAFLSGEQKKAIVDLLFKTNRKVTVKQLKEDYFKKIECFDSVEISGVEDRFNASLGTYHDLLKIIKDKDFLDNEENEDILEDIVLTLTLFEDREMIEERLKTYAHLFDDKVMKQLKRRRYTGWGRLSRKLINGIRDKQSGKTILDFLKSDGFANRNFMQLIHDDSLTFKEDIQKAQVSGQGDSLHEHIANLAGSPAIKKGILQTVKVVDELVKVMGRHKPENIVIEMARENQTTQKGQKNSRERMKRIEEGIKELGSQILKEHPVENTQLQNEKLYLYYLQNGRDMYVDQELDINRLSDYDVDHIVPQSFLKDDSIDNKVLTRSDKARGKSDNVPSEEVVKKMKNYWRQLLNAKLITQRKFDNLTKAERGGLSELDKAGFIKRQLVETRQITKHVAQILDSRMNTKYDENDKLIREVKVITLKSKLVSDFRKDFQFYKVREINNYHHAHDAYLNAVVGTALIKKYPKLESEFVYGDYKVYDVRKMIAKSEQEIGKATAKYFFYSNIMNFFKTEITLANGEIRKRPLIETNGETGEIVWDKGRDFATVRKVLSMPQVNIVKKTEVQTGGFSKESILPKRNSDKLIARKKDWDPKKYGGFDSPTVAYSVLVVAKVEKGKSKKLKSVKELLGITIMERSSFEKNPIDFLEAKGYKEVKKDLIIKLPKYSLFELENGRKRMLASAGELQKGNELALPSKYVNFLYLASHYEKLKGSPEDNEQKQLFVEQHKHYLDEIIEQISEFSKRVILADANLDKVLSAYNKHRDKPIREQAENIIHLFTLTNLGAPAAFKYFDTTIDRKRYTSTKEVLDATLIHQSITGLYETRIDLSQLGGDGGGGGEAAAKPAPGGTLNIEDEYRLHETSKGPDVPLGSTWLSDFPQAWAETGGMGLAVRQAPLIIPLKATSTPVSIKQYPMSQEARLGIKPHIQRLLDQGILVPCQSPWNTPLLPVKKPGTNDYRPVQDLREVNKRVEDIHPTVPNPYNLLSGLPPSHQWYTVLDLKDAFFCLRLHPTSQSLFAFEWRDPEMGISGQLTWTRLPQGFKNSPTLFNEALHRDLADFRIQHPDLILLQYVDDLLLAATSELDCQQGTRALLQTLGDLGYRASAKKAQICQKQVKYLGYLLKEGQRWLTEARKETVMGQPTPKTPRQLREFLGKAGFCRLFIPGFAEMAAPLYPLTKPGTLFEWGPDQQKAYQEIKQALLTAPALGLPDLTKPFELFVDEKQGYAKGVLTQKLGPWRRPVAYLSKKLDPVAAGWPPCLRMVAAIAVLTKDAGKLTMGQPLVILAPHAVEALVKQPPDRWLSNARMTHYQALLLDTDRVQFGPIVALNPATLLPLPEEGLQHDCLDILAEAHGTRPDLTDQPLPDADHTWYTDGSSFLQEGQRKAGAAVTTETEVVWAKALPAGTSAQRAELIALTQALKMAEGKKLNVYTDSRYAFATAHIHGEIYRRRGWLTSEGKEIKNKDEILALLKALFLPKRLSIIHCPGHQKGNRAEARGNRMADQAAREVATRETPETSTLLAGKRTADGSEFEKRTADGSEFESPKKKAKVE

SEQ ID NO: 2527 - protein, 2096 aa, synthetic construct
MPAAKRVKLDGGDKKYSIGLDIGTNSVGWAVITDEYKVPSKKFKVLGNTDRHSIKKNLIGALLFDSGETAEATRLKRTARRRYTRRKNRICYLQEIFSNEMAKVDDSFFHRLEESFLVEEDKKHERHPIFGNIVDEVAYHEKYPTIYHLRKKLVDSTDKADLRLIYLALAHMIKFRGHFLIEGDLNPDNSDVDKLFIQLVQTYNQLFEENPINASGVDAKAILSARLSKSRRLENLIAQLPGEKKNGLFGNLIALSLGLTPNFKSNFDLAEDAKLQLSKDTYDDDLDNLLAQIGDQYADLFLAAKNLSDAILLSDILRVNTEITKAPLSASMIKRYDEHHQDLTLLKALVRQQLPEKYKEIFFDQSKNGYAGYIDGGASQEEFYKFIKPILEKMDGTEELLVKLNREDLLRKQRTFDNGSIPHQIHLGELHAILRRQEDFYPFLKDNREKIEKILTFRIPYYVGPLARGNSRFAWMTRKSEETITPWNFEEVVDKGASAQSFIERMTNFDKNLPNEKVLPKHSLLYEYFTVYNELTKVKYVTEGMRKPAFLSGEQKKAIVDLLFKTNRKVTVKQLKEDYFKKIECFDSVEISGVEDRFNASLGTYHDLLKIIKDKDFLDNEENEDILEDIVLTLTLFEDREMIEERLKTYAHLFDDKVMKQLKRRRYTGWGRLSRKLINGIRDKQSGKTILDFLKSDGFANRNFMQLIHDDSLTFKEDIQKAQVSGQGDSLHEHIANLAGSPAIKKGILQTVKVVDELVKVMGRHKPENIVIEMARENQTTQKGQKNSRERMKRIEEGIKELGSQILKEHPVENTQLQNEKLYLYYLQNGRDMYVDQELDINRLSDYDVDHIVPQSFLKDDSIDNKVLTRSDKARGKSDNVPSEEVVKKMKNYWRQLLNAKLITQRKFDNLTKAERGGLSELDKAGFIKRQLVETRQITKHVAQILDSRMNTKYDENDKLIREVKVITLKSKLVSDFRKDFQFYKVREINNYHHAHDAYLNAVVGTALIKKYPKLESEFVYGDYKVYDVRKMIAKSEQEIGKATAKYFFYSNIMNFFKTEITLANGEIRKRPLIETNGETGEIVWDKGRDFATVRKVLSMPQVNIVKKTEVQTGGFSKESILPKRNSDKLIARKKDWDPKKYGGFDSPTVAYSVLVVAKVEKGKSKKLKSVKELLGITIMERSSFEKNPIDFLEAKGYKEVKKDLIIKLPKYSLFELENGRKRMLASAGELQKGNELALPSKYVNFLYLASHYEKLKGSPEDNEQKQLFVEQHKHYLDEIIEQISEFSKRVILADANLDKVLSAYNKHRDKPIREQAENIIHLFTLTNLGAPAAFKYFDTTIDRKRYTSTKEVLDATLIHQSITGLYETRIDLSQLGGDGGGGSPAPEAAAKGGTLNIEDEYRLHETSKGPDVPLGSTWLSDFPQAWAETGGMGLAVRQAPLIIPLKATSTPVSIKQYPMSQEARLGIKPHIQRLLDQGILVPCQSPWNTPLLPVKKPGTNDYRPVQDLREVNKRVEDIHPTVPNPYNLLSGLPPSHQWYTVLDLKDAFFCLRLHPTSQSLFAFEWRDPEMGISGQLTWTRLPQGFKNSPTLFNEALHRDLADFRIQHPDLILLQYVDDLLLAATSELDCQQGTRALLQTLGDLGYRASAKKAQICQKQVKYLGYLLKEGQRWLTEARKETVMGQPTPKTPRQLREFLGKAGFCRLFIPGFAEMAAPLYPLTKPGTLFEWGPDQQKAYQEIKQALLTAPALGLPDLTKPFELFVDEKQGYAKGVLTQKLGPWRRPVAYLSKKLDPVAAGWPPCLRMVAAIAVLTKDAGKLTMGQPLVILAPHAVEALVKQPPDRWLSNARMTHYQALLLDTDRVQFGPIVALNPATLLPLPEEGLQHDCLDILAEAHGTRPDLTDQPLPDADHTWYTDGSSFLQEGQRKAGAAVTTETEVVWAKALPAGTSAQRAELIALTQALKMAEGKKLNVYTDSRYAFATAHIHGEIYRRRGWLTSEGKEIKNKDEILALLKALFLPKRLSIIHCPGHQKGNRAEARGNRMADQAAREVATRETPETSTLLAGKRTADGSEFEKRTADGSEFESPKKKAKVE

SEQ ID NO: 2528 - protein, 2100 aa, synthetic construct
MPAAKRVKLDGGDKKYSIGLDIGTNSVGWAVITDEYKVPSKKFKVLGNTDRHSIKKNLIGALLFDSGETAEATRLKRTARRRYTRRKNRICYLQEIFSNEMAKVDDSFFHRLEESFLVEEDKKHERHPIFGNIVDEVAYHEKYPTIYHLRKKLVDSTDKADLRLIYLALAHMIKFRGHFLIEGDLNPDNSDVDKLFIQLVQTYNQLFEENPINASGVDAKAILSARLSKSRRLENLIAQLPGEKKNGLFGNLIALSLGLTPNFKSNFDLAEDAKLQLSKDTYDDDLDNLLAQIGDQYADLFLAAKNLSDAILLSDILRVNTEITKAPLSASMIKRYDEHHQDLTLLKALVRQQLPEKYKEIFFDQSKNGYAGYIDGGASQEEFYKFIKPILEKMDGTEELLVKLNREDLLRKQRTFDNGSIPHQIHLGELHAILRRQEDFYPFLKDNREKIEKILTFRIPYYVGPLARGNSRFAWMTRKSEETITPWNFEEVVDKGASAQSFIERMTNFDKNLPNEKVLPKHSLLYEYFTVYNELTKVKYVTEGMRKPAFLSGEQKKAIVDLLFKTNRKVTVKQLKEDYFKKIECFDSVEISGVEDRFNASLGTYHDLLKIIKDKDFLDNEENEDILEDIVLTLTLFEDREMIEERLKTYAHLFDDKVMKQLKRRRYTGWGRLSRKLINGIRDKQSGKTILDFLKSDGFANRNFMQLIHDDSLTFKEDIQKAQVSGQGDSLHEHIANLAGSPAIKKGILQTVKVVDELVKVMGRHKPENIVIEMARENQTTQKGQKNSRERMKRIEEGIKELGSQILKEHPVENTQLQNEKLYLYYLQNGRDMYVDQELDINRLSDYDVDHIVPQSFLKDDSIDNKVLTRSDKARGKSDNVPSEEVVKKMKNYWRQLLNAKLITQRKFDNLTKAERGGLSELDKAGFIKRQLVETRQITKHVAQILDSRMNTKYDENDKLIREVKVITLKSKLVSDFRKDFQFYKVREINNYHHAHDAYLNAVVGTALIKKYPKLESEFVYGDYKVYDVRKMIAKSEQEIGKATAKYFFYSNIMNFFKTEITLANGEIRKRPLIETNGETGEIVWDKGRDFATVRKVLSMPQVNIVKKTEVQTGGFSKESILPKRNSDKLIARKKDWDPKKYGGFDSPTVAYSVLVVAKVEKGKSKKLKSVKELLGITIMERSSFEKNPIDFLEAKGYKEVKKDLIIKLPKYSLFELENGRKRMLASAGELQKGNELALPSKYVNFLYLASHYEKLKGSPEDNEQKQLFVEQHKHYLDEIIEQISEFSKRVILADANLDKVLSAYNKHRDKPIREQAENIIHLFTLTNLGAPAAFKYFDTTIDRKRYTSTKEVLDATLIHQSITGLYETRIDLSQLGGDGGGGGGSEAAAKGGGGSGGTLNIEDEYRLHETSKGPDVPLGSTWLSDFPQAWAETGGMGLAVRQAPLIIPLKATSTPVSIKQYPMSQEARLGIKPHIQRLLDQGILVPCQSPWNTPLLPVKKPGTNDYRPVQDLREVNKRVEDIHPTVPNPYNLLSGLPPSHQWYTVLDLKDAFFCLRLHPTSQSLFAFEWRDPEMGISGQLTWTRLPQGFKNSPTLFNEALHRDLADFRIQHPDLILLQYVDDLLLAATSELDCQQGTRALLQTLGDLGYRASAKKAQICQKQVKYLGYLLKEGQRWLTEARKETVMGQPTPKTPRQLREFLGKAGFCRLFIPGFAEMAAPLYPLTKPGTLFEWGPDQQKAYQEIKQALLTAPALGLPDLTKPFELFVDEKQGYAKGVLTQKLGPWRRPVAYLSKKLDPVAAGWPPCLRMVAAIAVLTKDAGKLTMGQPLVILAPHAVEALVKQPPDRWLSNARMTHYQALLLDTDRVQFGPIVALNPATLLPLPEEGLQHDCLDILAEAHGTRPDLTDQPLPDADHTWYTDGSSFLQEGQRKAGAAVTTETEVVWAKALPAGTSAQRAELIALTQALKMAEGKKLNVYTDSRYAFATAHIHGEIYRRRGWLTSEGKEIKNKDEILALLKALFLPKRLSIIHCPGHQKGNRAEARGNRMADQAAREVATRETPETSTLLAGKRTADGSEFEKRTADGSEFESPKKKAKVE

SEQ ID NO: 2529 - protein, 2131 aa, synthetic construct
MPAAKRVKLDGGDKKYSIGLDIGTNSVGWAVITDEYKVPSKKFKVLGNTDRHSIKKNLIGALLFDSGETAEATRLKRTARRRYTRRKNRICYLQEIFSNEMAKVDDSFFHRLEESFLVEEDKKHERHPIFGNIVDEVAYHEKYPTIYHLRKKLVDSTDKADLRLIYLALAHMIKFRGHFLIEGDLNPDNSDVDKLFIQLVQTYNQLFEENPINASGVDAKAILSARLSKSRRLENLIAQLPGEKKNGLFGNLIALSLGLTPNFKSNFDLAEDAKLQLSKDTYDDDLDNLLAQIGDQYADLFLAAKNLSDAILLSDILRVNTEITKAPLSASMIKRYDEHHQDLTLLKALVRQQLPEKYKEIFFDQSKNGYAGYIDGGASQEEFYKFIKPILEKMDGTEELLVKLNREDLLRKQRTFDNGSIPHQIHLGELHAILRRQEDFYPFLKDNREKIEKILTFRIPYYVGPLARGNSRFAWMTRKSEETITPWNFEEVVDKGASAQSFIERMTNFDKNLPNEKVLPKHSLLYEYFTVYNELTKVKYVTEGMRKPAFLSGEQKKAIVDLLFKTNRKVTVKQLKEDYFKKIECFDSVEISGVEDRFNASLGTYHDLLKIIKDKDFLDNEENEDILEDIVLTLTLFEDREMIEERLKTYAHLFDDKVMKQLKRRRYTGWGRLSRKLINGIRDKQSGKTILDFLKSDGFANRNFMQLIHDDSLTFKEDIQKAQVSGQGDSLHEHIANLAGSPAIKKGILQTVKVVDELVKVMGRHKPENIVIEMARENQTTQKGQKNSRERMKRIEEGIKELGSQILKEHPVENTQLQNEKLYLYYLQNGRDMYVDQELDINRLSDYDVDHIVPQSFLKDDSIDNKVLTRSDKARGKSDNVPSEEVVKKMKNYWRQLLNAKLITQRKFDNLTKAERGGLSELDKAGFIKRQLVETRQITKHVAQILDSRMNTKYDENDKLIREVKVITLKSKLVSDFRKDFQFYKVREINNYHHAHDAYLNAVVGTALIKKYPKLESEFVYGDYKVYDVRKMIAKSEQEIGKATAKYFFYSNIMNFFKTEITLANGEIRKRPLIETNGETGEIVWDKGRDFATVRKVLSMPQVNIVKKTEVQTGGFSKESILPKRNSDKLIARKKDWDPKKYGGFDSPTVAYSVLVVAKVEKGKSKKLKSVKELLGITIMERSSFEKNPIDFLEAKGYKEVKKDLIIKLPKYSLFELENGRKRMLASAGELQKGNELALPSKYVNFLYLASHYEKLKGSPEDNEQKQLFVEQHKHYLDEIIEQISEFSKRVILADANLDKVLSAYNKHRDKPIREQAENIIHLFTLTNLGAPAAFKYFDTTIDRKRYTSTKEVLDATLIHQSITGLYETRIDLSQLGGDGGAEAAAKEAAAKEAAAKEAAAKALEAEAAAKEAAAKEAAAKEAAAKAGGTLNIEDEYRLHETSKGPDVPLGSTWLSDFPQAWAETGGMGLAVRQAPLIIPLKATSTPVSIKQYPMSQEARLGIKPHIQRLLDQGILVPCQSPWNTPLLPVKKPGTNDYRPVQDLREVNKRVEDIHPTVPNPYNLLSGLPPSHQWYTVLDLKDAFFCLRLHPTSQSLFAFEWRDPEMGISGQLTWTRLPQGFKNSPTLFNEALHRDLADFRIQHPDLILLQYVDDLLLAATSELDCQQGTRALLQTLGDLGYRASAKKAQICQKQVKYLGYLLKEGQRWLTEARKETVMGQPTPKTPRQLREFLGKAGFCRLFIPGFAEMAAPLYPLTKPGTLFEWGPDQQKAYQEIKQALLTAPALGLPDLTKPFELFVDEKQGYAKGVLTQKLGPWRRPVAYLSKKLDPVAAGWPPCLRMVAAIAVLTKDAGKLTMGQPLVILAPHAVEALVKQPPDRWLSNARMTHYQALLLDTDRVQFGPIVALNPATLLPLPEEGLQHDCLDILAEAHGTRPDLTDQPLPDADHTWYTDGSSFLQEGQRKAGAAVTTETEVVWAKALPAGTSAQRAELIALTQALKMAEGKKLNVYTDSRYAFATAHIHGEIYRRRGWLTSEGKEIKNKDEILALLKALFLPKRLSIIHCPGHQKGNRAEARGNRMADQAAREVATRETPETSTLLAGKRTADGSEFEKRTADGSEFESPKKKAKVE

SEQ ID NO: 2530 - protein, 2096 aa, synthetic construct
MPAAKRVKLDGGDKKYSIGLDIGTNSVGWAVITDEYKVPSKKFKVLGNTDRHSIKKNLIGALLFDSGETAEATRLKRTARRRYTRRKNRICYLQEIFSNEMAKVDDSFFHRLEESFLVEEDKKHERHPIFGNIVDEVAYHEKYPTIYHLRKKLVDSTDKADLRLIYLALAHMIKFRGHFLIEGDLNPDNSDVDKLFIQLVQTYNQLFEENPINASGVDAKAILSARLSKSRRLENLIAQLPGEKKNGLFGNLIALSLGLTPNFKSNFDLAEDAKLQLSKDTYDDDLDNLLAQIGDQYADLFLAAKNLSDAILLSDILRVNTEITKAPLSASMIKRYDEHHQDLTLLKALVRQQLPEKYKEIFFDQSKNGYAGYIDGGASQEEFYKFIKPILEKMDGTEELLVKLNREDLLRKQRTFDNGSIPHQIHLGELHAILRRQEDFYPFLKDNREKIEKILTFRIPYYVGPLARGNSRFAWMTRKSEETITPWNFEEVVDKGASAQSFIERMTNFDKNLPNEKVLPKHSLLYEYFTVYNELTKVKYVTEGMRKPAFLSGEQKKAIVDLLFKTNRKVTVKQLKEDYFKKIECFDSVEISGVEDRFNASLGTYHDLLKIIKDKDFLDNEENEDILEDIVLTLTLFEDREMIEERLKTYAHLFDDKVMKQLKRRRYTGWGRLSRKLINGIRDKQSGKTILDFLKSDGFANRNFMQLIHDDSLTFKEDIQKAQVSGQGDSLHEHIANLAGSPAIKKGILQTVKVVDELVKVMGRHKPENIVIEMARENQTTQKGQKNSRERMKRIEEGIKELGSQILKEHPVENTQLQNEKLYLYYLQNGRDMYVDQELDINRLSDYDVDHIVPQSFLKDDSIDNKVLTRSDKARGKSDNVPSEEVVKKMKNYWRQLLNAKLITQRKFDNLTKAERGGLSELDKAGFIKRQLVETRQITKHVAQILDSRMNTKYDENDKLIREVKVITLKSKLVSDFRKDFQFYKVREINNYHHAHDAYLNAVVGTALIKKYPKLESEFVYGDYKVYDVRKMIAKSEQEIGKATAKYFFYSNIMNFFKTEITLANGEIRKRPLIETNGETGEIVWDKGRDFATVRKVLSMPQVNIVKKTEVQTGGFSKESILPKRNSDKLIARKKDWDPKKYGGFDSPTVAYSVLVVAKVEKGKSKKLKSVKELLGITIMERSSFEKNPIDFLEAKGYKEVKKDLIIKLPKYSLFELENGRKRMLASAGELQKGNELALPSKYVNFLYLASHYEKLKGSPEDNEQKQLFVEQHKHYLDEIIEQISEFSKRVILADANLDKVLSAYNKHRDKPIREQAENIIHLFTLTNLGAPAAFKYFDTTIDRKRYTSTKEVLDATLIHQSITGLYETRIDLSQLGGDGGGGSEAAAKPAPGGTLNIEDEYRLHETSKGPDVPLGSTWLSDFPQAWAETGGMGLAVRQAPLIIPLKATSTPVSIKQYPMSQEARLGIKPHIQRLLDQGILVPCQSPWNTPLLPVKKPGTNDYRPVQDLREVNKRVEDIHPTVPNPYNLLSGLPPSHQWYTVLDLKDAFFCLRLHPTSQSLFAFEWRDPEMGISGQLTWTRLPQGFKNSPTLFNEALHRDLADFRIQHPDLILLQYVDDLLLAATSELDCQQGTRALLQTLGDLGYRASAKKAQICQKQVKYLGYLLKEGQRWLTEARKETVMGQPTPKTPRQLREFLGKAGFCRLFIPGFAEMAAPLYPLTKPGTLFEWGPDQQKAYQEIKQALLTAPALGLPDLTKPFELFVDEKQGYAKGVLTQKLGPWRRPVAYLSKKLDPVAAGWPPCLRMVAAIAVLTKDAGKLTMGQPLVILAPHAVEALVKQPPDRWLSNARMTHYQALLLDTDRVQFGPIVALNPATLLPLPEEGLQHDCLDILAEAHGTRPDLTDQPLPDADHTWYTDGSSFLQEGQRKAGAAVTTETEVVWAKALPAGTSAQRAELIALTQALKMAEGKKLNVYTDSRYAFATAHIHGEIYRRRGWLTSEGKEIKNKDEILALLKALFLPKRLSIIHCPGHQKGNRAEARGNRMADQAAREVATRETPETSTLLAGKRTADGSEFEKRTADGSEFESPKKKAKVE

SEQ ID NO: 2531 - protein, 2094 aa, synthetic construct
MPAAKRVKLDGGDKKYSIGLDIGTNSVGWAVITDEYKVPSKKFKVLGNTDRHSIKKNLIGALLFDSGETAEATRLKRTARRRYTRRKNRICYLQEIFSNEMAKVDDSFFHRLEESFLVEEDKKHERHPIFGNIVDEVAYHEKYPTIYHLRKKLVDSTDKADLRLIYLALAHMIKFRGHFLIEGDLNPDNSDVDKLFIQLVQTYNQLFEENPINASGVDAKAILSARLSKSRRLENLIAQLPGEKKNGLFGNLIALSLGLTPNFKSNFDLAEDAKLQLSKDTYDDDLDNLLAQIGDQYADLFLAAKNLSDAILLSDILRVNTEITKAPLSASMIKRYDEHHQDLTLLKALVRQQLPEKYKEIFFDQSKNGYAGYIDGGASQEEFYKFIKPILEKMDGTEELLVKLNREDLLRKQRTFDNGSIPHQIHLGELHAILRRQEDFYPFLKDNREKIEKILTFRIPYYVGPLARGNSRFAWMTRKSEETITPWNFEEVVDKGASAQSFIERMTNFDKNLPNEKVLPKHSLLYEYFTVYNELTKVKYVTEGMRKPAFLSGEQKKAIVDLLFKTNRKVTVKQLKEDYFKKIECFDSVEISGVEDRFNASLGTYHDLLKIIKDKDFLDNEENEDILEDIVLTLTLFEDREMIEERLKTYAHLFDDKVMKQLKRRRYTGWGRLSRKLINGIRDKQSGKTILDFLKSDGFANRNFMQLIHDDSLTFKEDIQKAQVSGQGDSLHEHIANLAGSPAIKKGILQTVKVVDELVKVMGRHKPENIVIEMARENQTTQKGQKNSRERMKRIEEGIKELGSQILKEHPVENTQLQNEKLYLYYLQNGRDMYVDQELDINRLSDYDVDHIVPQSFLKDDSIDNKVLTRSDKARGKSDNVPSEEVVKKMKNYWRQLLNAKLITQRKFDNLTKAERGGLSELDKAGFIKRQLVETRQITKHVAQILDSRMNTKYDENDKLIREVKVITLKSKLVSDFRKDFQFYKVREINNYHHAHDAYLNAVVGTALIKKYPKLESEFVYGDYKVYDVRKMIAKSEQEIGKATAKYFFYSNIMNFFKTEITLANGEIRKRPLIETNGETGEIVWDKGRDFATVRKVLSMPQVNIVKKTEVQTGGFSKESILPKRNSDKLIARKKDWDPKKYGGFDSPTVAYSVLVVAKVEKGKSKKLKSVKELLGITIMERSSFEKNPIDFLEAKGYKEVKKDLIIKLPKYSLFELENGRKRMLASAGELQKGNELALPSKYVNFLYLASHYEKLKGSPEDNEQKQLFVEQHKHYLDEIIEQISEFSKRVILADANLDKVLSAYNKHRDKPIREQAENIIHLFTLTNLGAPAAFKYFDTTIDRKRYTSTKEVLDATLIHQSITGLYETRIDLSQLGGDGGPAPGSSGGGGGTLNIEDEYRLHETSKGPDVPLGSTWLSDFPQAWAETGGMGLAVRQAPLIIPLKATSTPVSIKQYPMSQEARLGIKPHIQRLLDQGILVPCQSPWNTPLLPVKKPGTNDYRPVQDLREVNKRVEDIHPTVPNPYNLLSGLPPSHQWYTVLDLKDAFFCLRLHPTSQSLFAFEWRDPEMGISGQLTWTRLPQGFKNSPTLFNEALHRDLADFRIQHPDLILLQYVDDLLLAATSELDCQQGTRALLQTLGDLGYRASAKKAQICQKQVKYLGYLLKEGQRWLTEARKETVMGQPTPKTPRQLREFLGKAGFCRLFIPGFAEMAAPLYPLTKPGTLFEWGPDQQKAYQEIKQALLTAPALGLPDLTKPFELFVDEKQGYAKGVLTQKLGPWRRPVAYLSKKLDPVAAGWPPCLRMVAAIAVLTKDAGKLTMGQPLVILAPHAVEALVKQPPDRWLSNARMTHYQALLLDTDRVQFGPIVALNPATLLPLPEEGLQHDCLDILAEAHGTRPDLTDQPLPDADHTWYTDGSSFLQEGQRKAGAAVTTETEVVWAKALPAGTSAQRAELIALTQALKMAEGKKLNVYTDSRYAFATAHIHGEIYRRRGWLTSEGKEIKNKDEILALLKALFLPKRLSIIHCPGHQKGNRAEARGNRMADQAAREVATRETPETSTLLAGKRTADGSEFEKRTADGSEFESPKKKAKVE

SEQ ID NO: 2532 - protein, 2100 aa, synthetic construct
MPAAKRVKLDGGDKKYSIGLDIGTNSVGWAVITDEYKVPSKKFKVLGNTDRHSIKKNLIGALLFDSGETAEATRLKRTARRRYTRRKNRICYLQEIFSNEMAKVDDSFFHRLEESFLVEEDKKHERHPIFGNIVDEVAYHEKYPTIYHLRKKLVDSTDKADLRLIYLALAHMIKFRGHFLIEGDLNPDNSDVDKLFIQLVQTYNQLFEENPINASGVDAKAILSARLSKSRRLENLIAQLPGEKKNGLFGNLIALSLGLTPNFKSNFDLAEDAKLQLSKDTYDDDLDNLLAQIGDQYADLFLAAKNLSDAILLSDILRVNTEITKAPLSASMIKRYDEHHQDLTLLKALVRQQLPEKYKEIFFDQSKNGYAGYIDGGASQEEFYKFIKPILEKMDGTEELLVKLNREDLLRKQRTFDNGSIPHQIHLGELHAILRRQEDFYPFLKDNREKIEKILTFRIPYYVGPLARGNSRFAWMTRKSEETITPWNFEEVVDKGASAQSFIERMTNFDKNLPNEKVLPKHSLLYEYFTVYNELTKVKYVTEGMRKPAFLSGEQKKAIVDLLFKTNRKVTVKQLKEDYFKKIECFDSVEISGVEDRFNASLGTYHDLLKIIKDKDFLDNEENEDILEDIVLTLTLFEDREMIEERLKTYAHLFDDKVMKQLKRRRYTGWGRLSRKLINGIRDKQSGKTILDFLKSDGFANRNFMQLIHDDSLTFKEDIQKAQVSGQGDSLHEHIANLAGSPAIKKGILQTVKVVDELVKVMGRHKPENIVIEMARENQTTQKGQKNSRERMKRIEEGIKELGSQILKEHPVENTQLQNEKLYLYYLQNGRDMYVDQELDINRLSDYDVDHIVPQSFLKDDSIDNKVLTRSDKARGKSDNVPSEEVVKKMKNYWRQLLNAKLITQRKFDNLTKAERGGLSELDKAGFIKRQLVETRQITKHVAQILDSRMNTKYDENDKLIREVKVITLKSKLVSDFRKDFQFYKVREINNYHHAHDAYLNAVVGTALIKKYPKLESEFVYGDYKVYDVRKMIAKSEQEIGKATAKYFFYSNIMNFFKTEITLANGEIRKRPLIETNGETGEIVWDKGRDFATVRKVLSMPQVNIVKKTEVQTGGFSKESILPKRNSDKLIARKKDWDPKKYGGFDSPTVAYSVLVVAKVEKGKSKKLKSVKELLGITIMERSSFEKNPIDFLEAKGYKEVKKDLIIKLPKYSLFELENGRKRMLASAGELQKGNELALPSKYVNFLYLASHYEKLKGSPEDNEQKQLFVEQHKHYLDEIIEQISEFSKRVILADANLDKVLSAYNKHRDKPIREQAENIIHLFTLTNLGAPAAFKYFDTTIDRKRYTSTKEVLDATLIHQSITGLYETRIDLSQLGGDGGGSSGSSGSSGSSGSSGGTLNIEDEYRLHETSKGPDVPLGSTWLSDFPQAWAETGGMGLAVRQAPLIIPLKATSTPVSIKQYPMSQEARLGIKPHIQRLLDQGILVPCQSPWNTPLLPVKKPGTNDYRPVQDLREVNKRVEDIHPTVPNPYNLLSGLPPSHQWYTVLDLKDAFFCLRLHPTSQSLFAFEWRDPEMGISGQLTWTRLPQGFKNSPTLFNEALHRDLADFRIQHPDLILLQYVDDLLLAATSELDCQQGTRALLQTLGDLGYRASAKKAQICQKQVKYLGYLLKEGQRWLTEARKETVMGQPTPKTPRQLREFLGKAGFCRLFIPGFAEMAAPLYPLTKPGTLFEWGPDQQKAYQEIKQALLTAPALGLPDLTKPFELFVDEKQGYAKGVLTQKLGPWRRPVAYLSKKLDPVAAGWPPCLRMVAAIAVLTKDAGKLTMGQPLVILAPHAVEALVKQPPDRWLSNARMTHYQALLLDTDRVQFGPIVALNPATLLPLPEEGLQHDCLDILAEAHGTRPDLTDQPLPDADHTWYTDGSSFLQEGQRKAGAAVTTETEVVWAKALPAGTSAQRAELIALTQALKMAEGKKLNVYTDSRYAFATAHIHGEIYRRRGWLTSEGKEIKNKDEILALLKALFLPKRLSIIHCPGHQKGNRAEARGNRMADQAAREVATRETPETSTLLAGKRTADGSEFEKRTADGSEFESPKKKAKVE

SEQ ID NO: 2533 - protein, 2094 aa, synthetic construct
MPAAKRVKLDGGDKKYSIGLDIGTNSVGWAVITDEYKVPSKKFKVLGNTDRHSIKKNLIGALLFDSGETAEATRLKRTARRRYTRRKNRICYLQEIFSNEMAKVDDSFFHRLEESFLVEEDKKHERHPIFGNIVDEVAYHEKYPTIYHLRKKLVDSTDKADLRLIYLALAHMIKFRGHFLIEGDLNPDNSDVDKLFIQLVQTYNQLFEENPINASGVDAKAILSARLSKSRRLENLIAQLPGEKKNGLFGNLIALSLGLTPNFKSNFDLAEDAKLQLSKDTYDDDLDNLLAQIGDQYADLFLAAKNLSDAILLSDILRVNTEITKAPLSASMIKRYDEHHQDLTLLKALVRQQLPEKYKEIFFDQSKNGYAGYIDGGASQEEFYKFIKPILEKMDGTEELLVKLNREDLLRKQRTFDNGSIPHQIHLGELHAILRRQEDFYPFLKDNREKIEKILTFRIPYYVGPLARGNSRFAWMTRKSEETITPWNFEEVVDKGASAQSFIERMTNFDKNLPNEKVLPKHSLLYEYFTVYNELTKVKYVTEGMRKPAFLSGEQKKAIVDLLFKTNRKVTVKQLKEDYFKKIECFDSVEISGVEDRFNASLGTYHDLLKIIKDKDFLDNEENEDILEDIVLTLTLFEDREMIEERLKTYAHLFDDKVMKQLKRRRYTGWGRLSRKLINGIRDKQSGKTILDFLKSDGFANRNFMQLIHDDSLTFKEDIQKAQVSGQGDSLHEHIANLAGSPAIKKGILQTVKVVDELVKVMGRHKPENIVIEMARENQTTQKGQKNSRERMKRIEEGIKELGSQILKEHPVENTQLQNEKLYLYYLQNGRDMYVDQELDINRLSDYDVDHIVPQSFLKDDSIDNKVLTRSDKARGKSDNVPSEEVVKKMKNYWRQLLNAKLITQRKFDNLTKAERGGLSELDKAGFIKRQLVETRQITKHVAQILDSRMNTKYDENDKLIREVKVITLKSKLVSDFRKDFQFYKVREINNYHHAHDAYLNAVVGTALIKKYPKLESEFVYGDYKVYDVRKMIAKSEQEIGKATAKYFFYSNIMNFFKTEITLANGEIRKRPLIETNGETGEIVWDKGRDFATVRKVLSMPQVNIVKKTEVQTGGFSKESILPKRNSDKLIARKKDWDPKKYGGFDSPTVAYSVLVVAKVEKGKSKKLKSVKELLGITIMERSSFEKNPIDFLEAKGYKEVKKDLIIKLPKYSLFELENGRKRMLASAGELQKGNELALPSKYVNFLYLASHYEKLKGSPEDNEQKQLFVEQHKHYLDEIIEQISEFSKRVILADANLDKVLSAYNKHRDKPIREQAENIIHLFTLTNLGAPAAFKYFDTTIDRKRYTSTKEVLDATLIHQSITGLYETRIDLSQLGGDGGPAPGGSGSSGGTLNIEDEYRLHETSKGPDVPLGSTWLSDFPQAWAETGGMGLAVRQAPLIIPLKATSTPVSIKQYPMSQEARLGIKPHIQRLLDQGILVPCQSPWNTPLLPVKKPGTNDYRPVQDLREVNKRVEDIHPTVPNPYNLLSGLPPSHQWYTVLDLKDAFFCLRLHPTSQSLFAFEWRDPEMGISGQLTWTRLPQGFKNSPTLFNEALHRDLADFRIQHPDLILLQYVDDLLLAATSELDCQQGTRALLQTLGDLGYRASAKKAQICQKQVKYLGYLLKEGQRWLTEARKETVMGQPTPKTPRQLREFLGKAGFCRLFIPGFAEMAAPLYPLTKPGTLFEWGPDQQKAYQEIKQALLTAPALGLPDLTKPFELFVDEKQGYAKGVLTQKLGPWRRPVAYLSKKLDPVAAGWPPCLRMVAAIAVLTKDAGKLTMGQPLVILAPHAVEALVKQPPDRWLSNARMTHYQALLLDTDRVQFGPIVALNPATLLPLPEEGLQHDCLDILAEAHGTRPDLTDQPLPDADHTWYTDGSSFLQEGQRKAGAAVTTETEVVWAKALPAGTSAQRAELIALTQALKMAEGKKLNVYTDSRYAFATAHIHGEIYRRRGWLTSEGKEIKNKDEILALLKALFLPKRLSIIHCPGHQKGNRAEARGNRMADQAAREVATRETPETSTLLAGKRTADGSEFEKRTADGSEFESPKKKAKVE

SEQ ID NO: 2534 - protein, 2098 aa, synthetic construct
MPAAKRVKLDGGDKKYSIGLDIGTNSVGWAVITDEYKVPSKKFKVLGNTDRHSIKKNLIGALLFDSGETAEATRLKRTARRRYTRRKNRICYLQEIFSNEMAKVDDSFFHRLEESFLVEEDKKHERHPIFGNIVDEVAYHEKYPTIYHLRKKLVDSTDKADLRLIYLALAHMIKFRGHFLIEGDLNPDNSDVDKLFIQLVQTYNQLFEENPINASGVDAKAILSARLSKSRRLENLIAQLPGEKKNGLFGNLIALSLGLTPNFKSNFDLAEDAKLQLSKDTYDDDLDNLLAQIGDQYADLFLAAKNLSDAILLSDILRVNTEITKAPLSASMIKRYDEHHQDLTLLKALVRQQLPEKYKEIFFDQSKNGYAGYIDGGASQEEFYKFIKPILEKMDGTEELLVKLNREDLLRKQRTFDNGSIPHQIHLGELHAILRRQEDFYPFLKDNREKIEKILTFRIPYYVGPLARGNSRFAWMTRKSEETITPWNFEEVVDKGASAQSFIERMTNFDKNLPNEKVLPKHSLLYEYFTVYNELTKVKYVTEGMRKPAFLSGEQKKAIVDLLFKTNRKVTVKQLKEDYFKKIECFDSVEISGVEDRFNASLGTYHDLLKIIKDKDFLDNEENEDILEDIVLTLTLFEDREMIEERLKTYAHLFDDKVMKQLKRRRYTGWGRLSRKLINGIRDKQSGKTILDFLKSDGFANRNFMQLIHDDSLTFKEDIQKAQVSGQGDSLHEHIANLAGSPAIKKGILQTVKVVDELVKVMGRHKPENIVIEMARENQTTQKGQKNSRERMKRIEEGIKELGSQILKEHPVENTQLQNEKLYLYYLQNGRDMYVDQELDINRLSDYDVDHIVPQSFLKDDSIDNKVLTRSDKARGKSDNVPSEEVVKKMKNYWRQLLNAKLITQRKFDNLTKAERGGLSELDKAGFIKRQLVETRQITKHVAQILDSRMNTKYDENDKLIREVKVITLKSKLVSDFRKDFQFYKVREINNYHHAHDAYLNAVVGTALIKKYPKLESEFVYGDYKVYDVRKMIAKSEQEIGKATAKYFFYSNIMNFFKTEITLANGEIRKRPLIETNGETGEIVWDKGRDFATVRKVLSMPQVNIVKKTEVQTGGFSKESILPKRNSDKLIARKKDWDPKKYGGFDSPTVAYSVLVVAKVEKGKSKKLKSVKELLGITIMERSSFEKNPIDFLEAKGYKEVKKDLIIKLPKYSLFELENGRKRMLASAGELQKGNELALPSKYVNFLYLASHYEKLKGSPEDNEQKQLFVEQHKHYLDEIIEQISEFSKRVILADANLDKVLSAYNKHRDKPIREQAENIIHLFTLTNLGAPAAFKYFDTTIDRKRYTSTKEVLDATLIHQSITGLYETRIDLSQLGGDGGPAPAPAPAPAPAPGGTLNIEDEYRLHETSKGPDVPLGSTWLSDFPQAWAETGGMGLAVRQAPLIIPLKATSTPVSIKQYPMSQEARLGIKPHIQRLLDQGILVPCQSPWNTPLLPVKKPGTNDYRPVQDLREVNKRVEDIHPTVPNPYNLLSGLPPSHQWYTVLDLKDAFFCLRLHPTSQSLFAFEWRDPEMGISGQLTWTRLPQGFKNSPTLFNEALHRDLADFRIQHPDLILLQYVDDLLLAATSELDCQQGTRALLQTLGDLGYRASAKKAQICQKQVKYLGYLLKEGQRWLTEARKETVMGQPTPKTPRQLREFLGKAGFCRLFIPGFAEMAAPLYPLTKPGTLFEWGPDQQKAYQEIKQALLTAPALGLPDLTKPFELFVDEKQGYAKGVLTQKLGPWRRPVAYLSKKLDPVAAGWPPCLRMVAAIAVLTKDAGKLTMGQPLVILAPHAVEALVKQPPDRWLSNARMTHYQALLLDTDRVQFGPIVALNPATLLPLPEEGLQHDCLDILAEAHGTRPDLTDQPLPDADHTWYTDGSSFLQEGQRKAGAAVTTETEVVWAKALPAGTSAQRAELIALTQALKMAEGKKLNVYTDSRYAFATAHIHGEIYRRRGWLTSEGKEIKNKDEILALLKALFLPKRLSIIHCPGHQKGNRAEARGNRMADQAAREVATRETPETSTLLAGKRTADGSEFEKRTADGSEFESPKKKAKVE

SEQ ID NO: 2535 - protein, 2096 aa, synthetic construct
MPAAKRVKLDGGDKKYSIGLDIGTNSVGWAVITDEYKVPSKKFKVLGNTDRHSIKKNLIGALLFDSGETAEATRLKRTARRRYTRRKNRICYLQEIFSNEMAKVDDSFFHRLEESFLVEEDKKHERHPIFGNIVDEVAYHEKYPTIYHLRKKLVDSTDKADLRLIYLALAHMIKFRGHFLIEGDLNPDNSDVDKLFIQLVQTYNQLFEENPINASGVDAKAILSARLSKSRRLENLIAQLPGEKKNGLFGNLIALSLGLTPNFKSNFDLAEDAKLQLSKDTYDDDLDNLLAQIGDQYADLFLAAKNLSDAILLSDILRVNTEITKAPLSASMIKRYDEHHQDLTLLKALVRQQLPEKYKEIFFDQSKNGYAGYIDGGASQEEFYKFIKPILEKMDGTEELLVKLNREDLLRKQRTFDNGSIPHQIHLGELHAILRRQEDFYPFLKDNREKIEKILTFRIPYYVGPLARGNSRFAWMTRKSEETITPWNFEEVVDKGASAQSFIERMTNFDKNLPNEKVLPKHSLLYEYFTVYNELTKVKYVTEGMRKPAFLSGEQKKAIVDLLFKTNRKVTVKQLKEDYFKKIECFDSVEISGVEDRFNASLGTYHDLLKIIKDKDFLDNEENEDILEDIVLTLTLFEDREMIEERLKTYAHLFDDKVMKQLKRRRYTGWGRLSRKLINGIRDKQSGKTILDFLKSDGFANRNFMQLIHDDSLTFKEDIQKAQVSGQGDSLHEHIANLAGSPAIKKGILQTVKVVDELVKVMGRHKPENIVIEMARENQTTQKGQKNSRERMKRIEEGIKELGSQILKEHPVENTQLQNEKLYLYYLQNGRDMYVDQELDINRLSDYDVDHIVPQSFLKDDSIDNKVLTRSDKARGKSDNVPSEEVVKKMKNYWRQLLNAKLITQRKFDNLTKAERGGLSELDKAGFIKRQLVETRQITKHVAQILDSRMNTKYDENDKLIREVKVITLKSKLVSDFRKDFQFYKVREINNYHHAHDAYLNAVVGTALIKKYPKLESEFVYGDYKVYDVRKMIAKSEQEIGKATAKYFFYSNIMNFFKTEITLANGEIRKRPLIETNGETGEIVWDKGRDFATVRKVLSMPQVNIVKKTEVQTGGFSKESILPKRNSDKLIARKKDWDPKKYGGFDSPTVAYSVLVVAKVEKGKSKKLKSVKELLGITIMERSSFEKNPIDFLEAKGYKEVKKDLIIKLPKYSLFELENGRKRMLASAGELQKGNELALPSKYVNFLYLASHYEKLKGSPEDNEQKQLFVEQHKHYLDEIIEQISEFSKRVILADANLDKVLSAYNKHRDKPIREQAENIIHLFTLTNLGAPAAFKYFDTTIDRKRYTSTKEVLDATLIHQSITGLYETRIDLSQLGGDGGGSSEAAAKPAPGGTLNIEDEYRLHETSKGPDVPLGSTWLSDFPQAWAETGGMGLAVRQAPLIIPLKATSTPVSIKQYPMSQEARLGIKPHIQRLLDQGILVPCQSPWNTPLLPVKKPGTNDYRPVQDLREVNKRVEDIHPTVPNPYNLLSGLPPSHQWYTVLDLKDAFFCLRLHPTSQSLFAFEWRDPEMGISGQLTWTRLPQGFKNSPTLFNEALHRDLADFRIQHPDLILLQYVDDLLLAATSELDCQQGTRALLQTLGDLGYRASAKKAQICQKQVKYLGYLLKEGQRWLTEARKETVMGQPTPKTPRQLREFLGKAGFCRLFIPGFAEMAAPLYPLTKPGTLFEWGPDQQKAYQEIKQALLTAPALGLPDLTKPFELFVDEKQGYAKGVLTQKLGPWRRPVAYLSKKLDPVAAGWPPCLRMVAAIAVLTKDAGKLTMGQPLVILAPHAVEALVKQPPDRWLSNARMTHYQALLLDTDRVQFGPIVALNPATLLPLPEEGLQHDCLDILAEAHGTRPDLTDQPLPDADHTWYTDGSSFLQEGQRKAGAAVTTETEVVWAKALPAGTSAQRAELIALTQALKMAEGKKLNVYTDSRYAFATAHIHGEIYRRRGWLTSEGKEIKNKDEILALLKALFLPKRLSIIHCPGHQKGNRAEARGNRMADQAAREVATRETPETSTLLAGKRTADGSEFEKRTADGSEFESPKKKAKVE

SEQ ID NO: 2536 - protein, 2110 aa, synthetic construct
MPAAKRVKLDGGDKKYSIGLDIGTNSVGWAVITDEYKVPSKKFKVLGNTDRHSIKKNLIGALLFDSGETAEATRLKRTARRRYTRRKNRICYLQEIFSNEMAKVDDSFFHRLEESFLVEEDKKHERHPIFGNIVDEVAYHEKYPTIYHLRKKLVDSTDKADLRLIYLALAHMIKFRGHFLIEGDLNPDNSDVDKLFIQLVQTYNQLFEENPINASGVDAKAILSARLSKSRRLENLIAQLPGEKKNGLFGNLIALSLGLTPNFKSNFDLAEDAKLQLSKDTYDDDLDNLLAQIGDQYADLFLAAKNLSDAILLSDILRVNTEITKAPLSASMIKRYDEHHQDLTLLKALVRQQLPEKYKEIFFDQSKNGYAGYIDGGASQEEFYKFIKPILEKMDGTEELLVKLNREDLLRKQRTFDNGSIPHQIHLGELHAILRRQEDFYPFLKDNREKIEKILTFRIPYYVGPLARGNSRFAWMTRKSEETITPWNFEEVVDKGASAQSFIERMTNFDKNLPNEKVLPKHSLLYEYFTVYNELTKVKYVTEGMRKPAFLSGEQKKAIVDLLFKTNRKVTVKQLKEDYFKKIECFDSVEISGVEDRFNASLGTYHDLLKIIKDKDFLDNEENEDILEDIVLTLTLFEDREMIEERLKTYAHLFDDKVMKQLKRRRYTGWGRLSRKLINGIRDKQSGKTILDFLKSDGFANRNFMQLIHDDSLTFKEDIQKAQVSGQGDSLHEHIANLAGSPAIKKGILQTVKVVDELVKVMGRHKPENIVIEMARENQTTQKGQKNSRERMKRIEEGIKELGSQILKEHPVENTQLQNEKLYLYYLQNGRDMYVDQELDINRLSDYDVDHIVPQSFLKDDSIDNKVLTRSDKARGKSDNVPSEEVVKKMKNYWRQLLNAKLITQRKFDNLTKAERGGLSELDKAGFIKRQLVETRQITKHVAQILDSRMNTKYDENDKLIREVKVITLKSKLVSDFRKDFQFYKVREINNYHHAHDAYLNAVVGTALIKKYPKLESEFVYGDYKVYDVRKMIAKSEQEIGKATAKYFFYSNIMNFFKTEITLANGEIRKRPLIETNGETGEIVWDKGRDFATVRKVLSMPQVNIVKKTEVQTGGFSKESILPKRNSDKLIARKKDWDPKKYGGFDSPTVAYSVLVVAKVEKGKSKKLKSVKELLGITIMERSSFEKNPIDFLEAKGYKEVKKDLIIKLPKYSLFELENGRKRMLASAGELQKGNELALPSKYVNFLYLASHYEKLKGSPEDNEQKQLFVEQHKHYLDEIIEQISEFSKRVILADANLDKVLSAYNKHRDKPIREQAENIIHLFTLTNLGAPAAFKYFDTTIDRKRYTSTKEVLDATLIHQSITGLYETRIDLSQLGGDGGEAAAKEAAAKEAAAKEAAAKEAAAKGGTLNIEDEYRLHETSKGPDVPLGSTWLSDFPQAWAETGGMGLAVRQAPLIIPLKATSTPVSIKQYPMSQEARLGIKPHIQRLLDQGILVPCQSPWNTPLLPVKKPGTNDYRPVQDLREVNKRVEDIHPTVPNPYNLLSGLPPSHQWYTVLDLKDAFFCLRLHPTSQSLFAFEWRDPEMGISGQLTWTRLPQGFKNSPTLFNEALHRDLADFRIQHPDLILLQYVDDLLLAATSELDCQQGTRALLQTLGDLGYRASAKKAQICQKQVKYLGYLLKEGQRWLTEARKETVMGQPTPKTPRQLREFLGKAGFCRLFIPGFAEMAAPLYPLTKPGTLFEWGPDQQKAYQEIKQALLTAPALGLPDLTKPFELFVDEKQGYAKGVLTQKLGPWRRPVAYLSKKLDPVAAGWPPCLRMVAAIAVLTKDAGKLTMGQPLVILAPHAVEALVKQPPDRWLSNARMTHYQALLLDTDRVQFGPIVALNPATLLPLPEEGLQHDCLDILAEAHGTRPDLTDQPLPDADHTWYTDGSSFLQEGQRKAGAAVTTETEVVWAKALPAGTSAQRAELIALTQALKMAEGKKLNVYTDSRYAFATAHIHGEIYRRRGWLTSEGKEIKNKDEILALLKALFLPKRLSIIHCPGHQKGNRAEARGNRMADQAAREVATRETPETSTLLAGKRTADGSEFEKRTADGSEFESPKKKAKVE

SEQ ID NO: 2537 - protein, 2097 aa, synthetic construct
MPAAKRVKLDGGDKKYSIGLDIGTNSVGWAVITDEYKVPSKKFKVLGNTDRHSIKKNLIGALLFDSGETAEATRLKRTARRRYTRRKNRICYLQEIFSNEMAKVDDSFFHRLEESFLVEEDKKHERHPIFGNIVDEVAYHEKYPTIYHLRKKLVDSTDKADLRLIYLALAHMIKFRGHFLIEGDLNPDNSDVDKLFIQLVQTYNQLFEENPINASGVDAKAILSARLSKSRRLENLIAQLPGEKKNGLFGNLIALSLGLTPNFKSNFDLAEDAKLQLSKDTYDDDLDNLLAQIGDQYADLFLAAKNLSDAILLSDILRVNTEITKAPLSASMIKRYDEHHQDLTLLKALVRQQLPEKYKEIFFDQSKNGYAGYIDGGASQEEFYKFIKPILEKMDGTEELLVKLNREDLLRKQRTFDNGSIPHQIHLGELHAILRRQEDFYPFLKDNREKIEKILTFRIPYYVGPLARGNSRFAWMTRKSEETITPWNFEEVVDKGASAQSFIERMTNFDKNLPNEKVLPKHSLLYEYFTVYNELTKVKYVTEGMRKPAFLSGEQKKAIVDLLFKTNRKVTVKQLKEDYFKKIECFDSVEISGVEDRFNASLGTYHDLLKIIKDKDFLDNEENEDILEDIVLTLTLFEDREMIEERLKTYAHLFDDKVMKQLKRRRYTGWGRLSRKLINGIRDKQSGKTILDFLKSDGFANRNFMQLIHDDSLTFKEDIQKAQVSGQGDSLHEHIANLAGSPAIKKGILQTVKVVDELVKVMGRHKPENIVIEMARENQTTQKGQKNSRERMKRIEEGIKELGSQILKEHPVENTQLQNEKLYLYYLQNGRDMYVDQELDINRLSDYDVDHIVPQSFLKDDSIDNKVLTRSDKARGKSDNVPSEEVVKKMKNYWRQLLNAKLITQRKFDNLTKAERGGLSELDKAGFIKRQLVETRQITKHVAQILDSRMNTKYDENDKLIREVKVITLKSKLVSDFRKDFQFYKVREINNYHHAHDAYLNAVVGTALIKKYPKLESEFVYGDYKVYDVRKMIAKSEQEIGKATAKYFFYSNIMNFFKTEITLANGEIRKRPLIETNGETGEIVWDKGRDFATVRKVLSMPQVNIVKKTEVQTGGFSKESILPKRNSDKLIARKKDWDPKKYGGFDSPTVAYSVLVVAKVEKGKSKKLKSVKELLGITIMERSSFEKNPIDFLEAKGYKEVKKDLIIKLPKYSLFELENGRKRMLASAGELQKGNELALPSKYVNFLYLASHYEKLKGSPEDNEQKQLFVEQHKHYLDEIIEQISEFSKRVILADANLDKVLSAYNKHRDKPIREQAENIIHLFTLTNLGAPAAFKYFDTTIDRKRYTSTKEVLDATLIHQSITGLYETRIDLSQLGGDGGGSSGSSGSSGSSGGTLNIEDEYRLHETSKGPDVPLGSTWLSDFPQAWAETGGMGLAVRQAPLIIPLKATSTPVSIKQYPMSQEARLGIKPHIQRLLDQGILVPCQSPWNTPLLPVKKPGTNDYRPVQDLREVNKRVEDIHPTVPNPYNLLSGLPPSHQWYTVLDLKDAFFCLRLHPTSQSLFAFEWRDPEMGISGQLTWTRLPQGFKNSPTLFNEALHRDLADFRIQHPDLILLQYVDDLLLAATSELDCQQGTRALLQTLGDLGYRASAKKAQICQKQVKYLGYLLKEGQRWLTEARKETVMGQPTPKTPRQLREFLGKAGFCRLFIPGFAEMAAPLYPLTKPGTLFEWGPDQQKAYQEIKQALLTAPALGLPDLTKPFELFVDEKQGYAKGVLTQKLGPWRRPVAYLSKKLDPVAAGWPPCLRMVAAIAVLTKDAGKLTMGQPLVILAPHAVEALVKQPPDRWLSNARMTHYQALLLDTDRVQFGPIVALNPATLLPLPEEGLQHDCLDILAEAHGTRPDLTDQPLPDADHTWYTDGSSFLQEGQRKAGAAVTTETEVVWAKALPAGTSAQRAELIALTQALKMAEGKKLNVYTDSRYAFATAHIHGEIYRRRGWLTSEGKEIKNKDEILALLKALFLPKRLSIIHCPGHQKGNRAEARGNRMADQAAREVATRETPETSTLLAGKRTADGSEFEKRTADGSEFESPKKKAKVE

SEQ ID NO: 2538 - protein, 2096 aa, synthetic construct
MPAAKRVKLDGGDKKYSIGLDIGTNSVGWAVITDEYKVPSKKFKVLGNTDRHSIKKNLIGALLFDSGETAEATRLKRTARRRYTRRKNRICYLQEIFSNEMAKVDDSFFHRLEESFLVEEDKKHERHPIFGNIVDEVAYHEKYPTIYHLRKKLVDSTDKADLRLIYLALAHMIKFRGHFLIEGDLNPDNSDVDKLFIQLVQTYNQLFEENPINASGVDAKAILSARLSKSRRLENLIAQLPGEKKNGLFGNLIALSLGLTPNFKSNFDLAEDAKLQLSKDTYDDDLDNLLAQIGDQYADLFLAAKNLSDAILLSDILRVNTEITKAPLSASMIKRYDEHHQDLTLLKALVRQQLPEKYKEIFFDQSKNGYAGYIDGGASQEEFYKFIKPILEKMDGTEELLVKLNREDLLRKQRTFDNGSIPHQIHLGELHAILRRQEDFYPFLKDNREKIEKILTFRIPYYVGPLARGNSRFAWMTRKSEETITPWNFEEVVDKGASAQSFIERMTNFDKNLPNEKVLPKHSLLYEYFTVYNELTKVKYVTEGMRKPAFLSGEQKKAIVDLLFKTNRKVTVKQLKEDYFKKIECFDSVEISGVEDRFNASLGTYHDLLKIIKDKDFLDNEENEDILEDIVLTLTLFEDREMIEERLKTYAHLFDDKVMKQLKRRRYTGWGRLSRKLINGIRDKQSGKTILDFLKSDGFANRNFMQLIHDDSLTFKEDIQKAQVSGQGDSLHEHIANLAGSPAIKKGILQTVKVVDELVKVMGRHKPENIVIEMARENQTTQKGQKNSRERMKRIEEGIKELGSQILKEHPVENTQLQNEKLYLYYLQNGRDMYVDQELDINRLSDYDVDHIVPQSFLKDDSIDNKVLTRSDKARGKSDNVPSEEVVKKMKNYWRQLLNAKLITQRKFDNLTKAERGGLSELDKAGFIKRQLVETRQITKHVAQILDSRMNTKYDENDKLIREVKVITLKSKLVSDFRKDFQFYKVREINNYHHAHDAYLNAVVGTALIKKYPKLESEFVYGDYKVYDVRKMIAKSEQEIGKATAKYFFYSNIMNFFKTEITLANGEIRKRPLIETNGETGEIVWDKGRDFATVRKVLSMPQVNIVKKTEVQTGGFSKESILPKRNSDKLIARKKDWDPKKYGGFDSPTVAYSVLVVAKVEKGKSKKLKSVKELLGITIMERSSFEKNPIDFLEAKGYKEVKKDLIIKLPKYSLFELENGRKRMLASAGELQKGNELALPSKYVNFLYLASHYEKLKGSPEDNEQKQLFVEQHKHYLDEIIEQISEFSKRVILADANLDKVLSAYNKHRDKPIREQAENIIHLFTLTNLGAPAAFKYFDTTIDRKRYTSTKEVLDATLIHQSITGLYETRIDLSQLGGDGGGGSGSSEAAAKGGTLNIEDEYRLHETSKGPDVPLGSTWLSDFPQAWAETGGMGLAVRQAPLIIPLKATSTPVSIKQYPMSQEARLGIKPHIQRLLDQGILVPCQSPWNTPLLPVKKPGTNDYRPVQDLREVNKRVEDIHPTVPNPYNLLSGLPPSHQWYTVLDLKDAFFCLRLHPTSQSLFAFEWRDPEMGISGQLTWTRLPQGFKNSPTLFNEALHRDLADFRIQHPDLILLQYVDDLLLAATSELDCQQGTRALLQTLGDLGYRASAKKAQICQKQVKYLGYLLKEGQRWLTEARKETVMGQPTPKTPRQLREFLGKAGFCRLFIPGFAEMAAPLYPLTKPGTLFEWGPDQQKAYQEIKQALLTAPALGLPDLTKPFELFVDEKQGYAKGVLTQKLGPWRRPVAYLSKKLDPVAAGWPPCLRMVAAIAVLTKDAGKLTMGQPLVILAPHAVEALVKQPPDRWLSNARMTHYQALLLDTDRVQFGPIVALNPATLLPLPEEGLQHDCLDILAEAHGTRPDLTDQPLPDADHTWYTDGSSFLQEGQRKAGAAVTTETEVVWAKALPAGTSAQRAELIALTQALKMAEGKKLNVYTDSRYAFATAHIHGEIYRRRGWLTSEGKEIKNKDEILALLKALFLPKRLSIIHCPGHQKGNRAEARGNRMADQAAREVATRETPETSTLLAGKRTADGSEFEKRTADGSEFESPKKKAKVE

SEQ ID NO: 2539 - protein, 2090 aa, synthetic construct
MPAAKRVKLDGGDKKYSIGLDIGTNSVGWAVITDEYKVPSKKFKVLGNTDRHSIKKNLIGALLFDSGETAEATRLKRTARRRYTRRKNRICYLQEIFSNEMAKVDDSFFHRLEESFLVEEDKKHERHPIFGNIVDEVAYHEKYPTIYHLRKKLVDSTDKADLRLIYLALAHMIKFRGHFLIEGDLNPDNSDVDKLFIQLVQTYNQLFEENPINASGVDAKAILSARLSKSRRLENLIAQLPGEKKNGLFGNLIALSLGLTPNFKSNFDLAEDAKLQLSKDTYDDDLDNLLAQIGDQYADLFLAAKNLSDAILLSDILRVNTEITKAPLSASMIKRYDEHHQDLTLLKALVRQQLPEKYKEIFFDQSKNGYAGYIDGGASQEEFYKFIKPILEKMDGTEELLVKLNREDLLRKQRTFDNGSIPHQIHLGELHAILRRQEDFYPFLKDNREKIEKILTFRIPYYVGPLARGNSRFAWMTRKSEETITPWNFEEVVDKGASAQSFIERMTNFDKNLPNEKVLPKHSLLYEYFTVYNELTKVKYVTEGMRKPAFLSGEQKKAIVDLLFKTNRKVTVKQLKEDYFKKIECFDSVEISGVEDRFNASLGTYHDLLKIIKDKDFLDNEENEDILEDIVLTLTLFEDREMIEERLKTYAHLFDDKVMKQLKRRRYTGWGRLSRKLINGIRDKQSGKTILDFLKSDGFANRNFMQLIHDDSLTFKEDIQKAQVSGQGDSLHEHIANLAGSPAIKKGILQTVKVVDELVKVMGRHKPENIVIEMARENQTTQKGQKNSRERMKRIEEGIKELGSQILKEHPVENTQLQNEKLYLYYLQNGRDMYVDQELDINRLSDYDVDHIVPQSFLKDDSIDNKVLTRSDKARGKSDNVPSEEVVKKMKNYWRQLLNAKLITQRKFDNLTKAERGGLSELDKAGFIKRQLVETRQITKHVAQILDSRMNTKYDENDKLIREVKVITLKSKLVSDFRKDFQFYKVREINNYHHAHDAYLNAVVGTALIKKYPKLESEFVYGDYKVYDVRKMIAKSEQEIGKATAKYFFYSNIMNFFKTEITLANGEIRKRPLIETNGETGEIVWDKGRDFATVRKVLSMPQVNIVKKTEVQTGGFSKESILPKRNSDKLIARKKDWDPKKYGGFDSPTVAYSVLVVAKVEKGKSKKLKSVKELLGITIMERSSFEKNPIDFLEAKGYKEVKKDLIIKLPKYSLFELENGRKRMLASAGELQKGNELALPSKYVNFLYLASHYEKLKGSPEDNEQKQLFVEQHKHYLDEIIEQISEFSKRVILADANLDKVLSAYNKHRDKPIREQAENIIHLFTLTNLGAPAAFKYFDTTIDRKRYTSTKEVLDATLIHQSITGLYETRIDLSQLGGDGGEAAAKGGTLNIEDEYRLHETSKGPDVPLGSTWLSDFPQAWAETGGMGLAVRQAPLIIPLKATSTPVSIKQYPMSQEARLGIKPHIQRLLDQGILVPCQSPWNTPLLPVKKPGTNDYRPVQDLREVNKRVEDIHPTVPNPYNLLSGLPPSHQWYTVLDLKDAFFCLRLHPTSQSLFAFEWRDPEMGISGQLTWTRLPQGFKNSPTLFNEALHRDLADFRIQHPDLILLQYVDDLLLAATSELDCQQGTRALLQTLGDLGYRASAKKAQICQKQVKYLGYLLKEGQRWLTEARKETVMGQPTPKTPRQLREFLGKAGFCRLFIPGFAEMAAPLYPLTKPGTLFEWGPDQQKAYQEIKQALLTAPALGLPDLTKPFELFVDEKQGYAKGVLTQKLGPWRRPVAYLSKKLDPVAAGWPPCLRMVAAIAVLTKDAGKLTMGQPLVILAPHAVEALVKQPPDRWLSNARMTHYQALLLDTDRVQFGPIVALNPATLLPLPEEGLQHDCLDILAEAHGTRPDLTDQPLPDADHTWYTDGSSFLQEGQRKAGAAVTTETEVVWAKALPAGTSAQRAELIALTQALKMAEGKKLNVYTDSRYAFATAHIHGEIYRRRGWLTSEGKEIKNKDEILALLKALFLPKRLSIIHCPGHQKGNRAEARGNRMADQAAREVATRETPETSTLLAGKRTADGSEFEKRTADGSEFESPKKKAKVE

SEQ ID NO: 2540 - protein, 2091 aa, synthetic construct
MPAAKRVKLDGGDKKYSIGLDIGTNSVGWAVITDEYKVPSKKFKVLGNTDRHSIKKNLIGALLFDSGETAEATRLKRTARRRYTRRKNRICYLQEIFSNEMAKVDDSFFHRLEESFLVEEDKKHERHPIFGNIVDEVAYHEKYPTIYHLRKKLVDSTDKADLRLIYLALAHMIKFRGHFLIEGDLNPDNSDVDKLFIQLVQTYNQLFEENPINASGVDAKAILSARLSKSRRLENLIAQLPGEKKNGLFGNLIALSLGLTPNFKSNFDLAEDAKLQLSKDTYDDDLDNLLAQIGDQYADLFLAAKNLSDAILLSDILRVNTEITKAPLSASMIKRYDEHHQDLTLLKALVRQQLPEKYKEIFFDQSKNGYAGYIDGGASQEEFYKFIKPILEKMDGTEELLVKLNREDLLRKQRTFDNGSIPHQIHLGELHAILRRQEDFYPFLKDNREKIEKILTFRIPYYVGPLARGNSRFAWMTRKSEETITPWNFEEVVDKGASAQSFIERMTNFDKNLPNEKVLPKHSLLYEYFTVYNELTKVKYVTEGMRKPAFLSGEQKKAIVDLLFKTNRKVTVKQLKEDYFKKIECFDSVEISGVEDRFNASLGTYHDLLKIIKDKDFLDNEENEDILEDIVLTLTLFEDREMIEERLKTYAHLFDDKVMKQLKRRRYTGWGRLSRKLINGIRDKQSGKTILDFLKSDGFANRNFMQLIHDDSLTFKEDIQKAQVSGQGDSLHEHIANLAGSPAIKKGILQTVKVVDELVKVMGRHKPENIVIEMARENQTTQKGQKNSRERMKRIEEGIKELGSQILKEHPVENTQLQNEKLYLYYLQNGRDMYVDQELDINRLSDYDVDHIVPQSFLKDDSIDNKVLTRSDKARGKSDNVPSEEVVKKMKNYWRQLLNAKLITQRKFDNLTKAERGGLSELDKAGFIKRQLVETRQITKHVAQILDSRMNTKYDENDKLIREVKVITLKSKLVSDFRKDFQFYKVREINNYHHAHDAYLNAVVGTALIKKYPKLESEFVYGDYKVYDVRKMIAKSEQEIGKATAKYFFYSNIMNFFKTEITLANGEIRKRPLIETNGETGEIVWDKGRDFATVRKVLSMPQVNIVKKTEVQTGGFSKESILPKRNSDKLIARKKDWDPKKYGGFDSPTVAYSVLVVAKVEKGKSKKLKSVKELLGITIMERSSFEKNPIDFLEAKGYKEVKKDLIIKLPKYSLFELENGRKRMLASAGELQKGNELALPSKYVNFLYLASHYEKLKGSPEDNEQKQLFVEQHKHYLDEIIEQISEFSKRVILADANLDKVLSAYNKHRDKPIREQAENIIHLFTLTNLGAPAAFKYFDTTIDRKRYTSTKEVLDATLIHQSITGLYETRIDLSQLGGDGGPAPGGGGGTLNIEDEYRLHETSKGPDVPLGSTWLSDFPQAWAETGGMGLAVRQAPLIIPLKATSTPVSIKQYPMSQEARLGIKPHIQRLLDQGILVPCQSPWNTPLLPVKKPGTNDYRPVQDLREVNKRVEDIHPTVPNPYNLLSGLPPSHQWYTVLDLKDAFFCLRLHPTSQSLFAFEWRDPEMGISGQLTWTRLPQGFKNSPTLFNEALHRDLADFRIQHPDLILLQYVDDLLLAATSELDCQQGTRALLQTLGDLGYRASAKKAQICQKQVKYLGYLLKEGQRWLTEARKETVMGQPTPKTPRQLREFLGKAGFCRLFIPGFAEMAAPLYPLTKPGTLFEWGPDQQKAYQEIKQALLTAPALGLPDLTKPFELFVDEKQGYAKGVLTQKLGPWRRPVAYLSKKLDPVAAGWPPCLRMVAAIAVLTKDAGKLTMGQPLVILAPHAVEALVKQPPDRWLSNARMTHYQALLLDTDRVQFGPIVALNPATLLPLPEEGLQHDCLDILAEAHGTRPDLTDQPLPDADHTWYTDGSSFLQEGQRKAGAAVTTETEVVWAKALPAGTSAQRAELIALTQALKMAEGKKLNVYTDSRYAFATAHIHGEIYRRRGWLTSEGKEIKNKDEILALLKALFLPKRLSIIHCPGHQKGNRAEARGNRMADQAAREVATRETPETSTLLAGKRTADGSEFEKRTADGSEFESPKKKAKVE

SEQ ID NO: 2541 - protein, 2115 aa, synthetic construct
MPAAKRVKLDGGDKKYSIGLDIGTNSVGWAVITDEYKVPSKKFKVLGNTDRHSIKKNLIGALLFDSGETAEATRLKRTARRRYTRRKNRICYLQEIFSNEMAKVDDSFFHRLEESFLVEEDKKHERHPIFGNIVDEVAYHEKYPTIYHLRKKLVDSTDKADLRLIYLALAHMIKFRGHFLIEGDLNPDNSDVDKLFIQLVQTYNQLFEENPINASGVDAKAILSARLSKSRRLENLIAQLPGEKKNGLFGNLIALSLGLTPNFKSNFDLAEDAKLQLSKDTYDDDLDNLLAQIGDQYADLFLAAKNLSDAILLSDILRVNTEITKAPLSASMIKRYDEHHQDLTLLKALVRQQLPEKYKEIFFDQSKNGYAGYIDGGASQEEFYKFIKPILEKMDGTEELLVKLNREDLLRKQRTFDNGSIPHQIHLGELHAILRRQEDFYPFLKDNREKIEKILTFRIPYYVGPLARGNSRFAWMTRKSEETITPWNFEEVVDKGASAQSFIERMTNFDKNLPNEKVLPKHSLLYEYFTVYNELTKVKYVTEGMRKPAFLSGEQKKAIVDLLFKTNRKVTVKQLKEDYFKKIECFDSVEISGVEDRFNASLGTYHDLLKIIKDKDFLDNEENEDILEDIVLTLTLFEDREMIEERLKTYAHLFDDKVMKQLKRRRYTGWGRLSRKLINGIRDKQSGKTILDFLKSDGFANRNFMQLIHDDSLTFKEDIQKAQVSGQGDSLHEHIANLAGSPAIKKGILQTVKVVDELVKVMGRHKPENIVIEMARENQTTQKGQKNSRERMKRIEEGIKELGSQILKEHPVENTQLQNEKLYLYYLQNGRDMYVDQELDINRLSDYDVDHIVPQSFLKDDSIDNKVLTRSDKARGKSDNVPSEEVVKKMKNYWRQLLNAKLITQRKFDNLTKAERGGLSELDKAGFIKRQLVETRQITKHVAQILDSRMNTKYDENDKLIREVKVITLKSKLVSDFRKDFQFYKVREINNYHHAHDAYLNAVVGTALIKKYPKLESEFVYGDYKVYDVRKMIAKSEQEIGKATAKYFFYSNIMNFFKTEITLANGEIRKRPLIETNGETGEIVWDKGRDFATVRKVLSMPQVNIVKKTEVQTGGFSKESILPKRNSDKLIARKKDWDPKKYGGFDSPTVAYSVLVVAKVEKGKSKKLKSVKELLGITIMERSSFEKNPIDFLEAKGYKEVKKDLIIKLPKYSLFELENGRKRMLASAGELQKGNELALPSKYVNFLYLASHYEKLKGSPEDNEQKQLFVEQHKHYLDEIIEQISEFSKRVILADANLDKVLSAYNKHRDKPIREQAENIIHLFTLTNLGAPAAFKYFDTTIDRKRYTSTKEVLDATLIHQSITGLYETRIDLSQLGGDGGEAAAKEAAAKEAAAKEAAAKEAAAKEAAAKGGTLNIEDEYRLHETSKGPDVPLGSTWLSDFPQAWAETGGMGLAVRQAPLIIPLKATSTPVSIKQYPMSQEARLGIKPHIQRLLDQGILVPCQSPWNTPLLPVKKPGTNDYRPVQDLREVNKRVEDIHPTVPNPYNLLSGLPPSHQWYTVLDLKDAFFCLRLHPTSQSLFAFEWRDPEMGISGQLTWTRLPQGFKNSPTLFNEALHRDLADFRIQHPDLILLQYVDDLLLAATSELDCQQGTRALLQTLGDLGYRASAKKAQICQKQVKYLGYLLKEGQRWLTEARKETVMGQPTPKTPRQLREFLGKAGFCRLFIPGFAEMAAPLYPLTKPGTLFEWGPDQQKAYQEIKQALLTAPALGLPDLTKPFELFVDEKQGYAKGVLTQKLGPWRRPVAYLSKKLDPVAAGWPPCLRMVAAIAVLTKDAGKLTMGQPLVILAPHAVEALVKQPPDRWLSNARMTHYQALLLDTDRVQFGPIVALNPATLLPLPEEGLQHDCLDILAEAHGTRPDLTDQPLPDADHTWYTDGSSFLQEGQRKAGAAVTTETEVVWAKALPAGTSAQRAELIALTQALKMAEGKKLNVYTDSRYAFATAHIHGEIYRRRGWLTSEGKEIKNKDEILALLKALFLPKRLSIIHCPGHQKGNRAEARGNRMADQAAREVATRETPETSTLLAGKRTADGSEFEKRTADGSEFESPKKKAKVE

SEQ ID NO: 2542 - protein, 2096 aa, synthetic construct
MPAAKRVKLDGGDKKYSIGLDIGTNSVGWAVITDEYKVPSKKFKVLGNTDRHSIKKNLIGALLFDSGETAEATRLKRTARRRYTRRKNRICYLQEIFSNEMAKVDDSFFHRLEESFLVEEDKKHERHPIFGNIVDEVAYHEKYPTIYHLRKKLVDSTDKADLRLIYLALAHMIKFRGHFLIEGDLNPDNSDVDKLFIQLVQTYNQLFEENPINASGVDAKAILSARLSKSRRLENLIAQLPGEKKNGLFGNLIALSLGLTPNFKSNFDLAEDAKLQLSKDTYDDDLDNLLAQIGDQYADLFLAAKNLSDAILLSDILRVNTEITKAPLSASMIKRYDEHHQDLTLLKALVRQQLPEKYKEIFFDQSKNGYAGYIDGGASQEEFYKFIKPILEKMDGTEELLVKLNREDLLRKQRTFDNGSIPHQIHLGELHAILRRQEDFYPFLKDNREKIEKILTFRIPYYVGPLARGNSRFAWMTRKSEETITPWNFEEVVDKGASAQSFIERMTNFDKNLPNEKVLPKHSLLYEYFTVYNELTKVKYVTEGMRKPAFLSGEQKKAIVDLLFKTNRKVTVKQLKEDYFKKIECFDSVEISGVEDRFNASLGTYHDLLKIIKDKDFLDNEENEDILEDIVLTLTLFEDREMIEERLKTYAHLFDDKVMKQLKRRRYTGWGRLSRKLINGIRDKQSGKTILDFLKSDGFANRNFMQLIHDDSLTFKEDIQKAQVSGQGDSLHEHIANLAGSPAIKKGILQTVKVVDELVKVMGRHKPENIVIEMARENQTTQKGQKNSRERMKRIEEGIKELGSQILKEHPVENTQLQNEKLYLYYLQNGRDMYVDQELDINRLSDYDVDHIVPQSFLKDDSIDNKVLTRSDKARGKSDNVPSEEVVKKMKNYWRQLLNAKLITQRKFDNLTKAERGGLSELDKAGFIKRQLVETRQITKHVAQILDSRMNTKYDENDKLIREVKVITLKSKLVSDFRKDFQFYKVREINNYHHAHDAYLNAVVGTALIKKYPKLESEFVYGDYKVYDVRKMIAKSEQEIGKATAKYFFYSNIMNFFKTEITLANGEIRKRPLIETNGETGEIVWDKGRDFATVRKVLSMPQVNIVKKTEVQTGGFSKESILPKRNSDKLIARKKDWDPKKYGGFDSPTVAYSVLVVAKVEKGKSKKLKSVKELLGITIMERSSFEKNPIDFLEAKGYKEVKKDLIIKLPKYSLFELENGRKRMLASAGELQKGNELALPSKYVNFLYLASHYEKLKGSPEDNEQKQLFVEQHKHYLDEIIEQISEFSKRVILADANLDKVLSAYNKHRDKPIREQAENIIHLFTLTNLGAPAAFKYFDTTIDRKRYTSTKEVLDATLIHQSITGLYETRIDLSQLGGDGGPAPGSSEAAAKGGTLNIEDEYRLHETSKGPDVPLGSTWLSDFPQAWAETGGMGLAVRQAPLIIPLKATSTPVSIKQYPMSQEARLGIKPHIQRLLDQGILVPCQSPWNTPLLPVKKPGTNDYRPVQDLREVNKRVEDIHPTVPNPYNLLSGLPPSHQWYTVLDLKDAFFCLRLHPTSQSLFAFEWRDPEMGISGQLTWTRLPQGFKNSPTLFNEALHRDLADFRIQHPDLILLQYVDDLLLAATSELDCQQGTRALLQTLGDLGYRASAKKAQICQKQVKYLGYLLKEGQRWLTEARKETVMGQPTPKTPRQLREFLGKAGFCRLFIPGFAEMAAPLYPLTKPGTLFEWGPDQQKAYQEIKQALLTAPALGLPDLTKPFELFVDEKQGYAKGVLTQKLGPWRRPVAYLSKKLDPVAAGWPPCLRMVAAIAVLTKDAGKLTMGQPLVILAPHAVEALVKQPPDRWLSNARMTHYQALLLDTDRVQFGPIVALNPATLLPLPEEGLQHDCLDILAEAHGTRPDLTDQPLPDADHTWYTDGSSFLQEGQRKAGAAVTTETEVVWAKALPAGTSAQRAELIALTQALKMAEGKKLNVYTDSRYAFATAHIHGEIYRRRGWLTSEGKEIKNKDEILALLKALFLPKRLSIIHCPGHQKGNRAEARGNRMADQAAREVATRETPETSTLLAGKRTADGSEFEKRTADGSEFESPKKKAKVE

SEQ ID NO: 2543 - protein, 2094 aa, synthetic construct
MPAAKRVKLDGGDKKYSIGLDIGTNSVGWAVITDEYKVPSKKFKVLGNTDRHSIKKNLIGALLFDSGETAEATRLKRTARRRYTRRKNRICYLQEIFSNEMAKVDDSFFHRLEESFLVEEDKKHERHPIFGNIVDEVAYHEKYPTIYHLRKKLVDSTDKADLRLIYLALAHMIKFRGHFLIEGDLNPDNSDVDKLFIQLVQTYNQLFEENPINASGVDAKAILSARLSKSRRLENLIAQLPGEKKNGLFGNLIALSLGLTPNFKSNFDLAEDAKLQLSKDTYDDDLDNLLAQIGDQYADLFLAAKNLSDAILLSDILRVNTEITKAPLSASMIKRYDEHHQDLTLLKALVRQQLPEKYKEIFFDQSKNGYAGYIDGGASQEEFYKFIKPILEKMDGTEELLVKLNREDLLRKQRTFDNGSIPHQIHLGELHAILRRQEDFYPFLKDNREKIEKILTFRIPYYVGPLARGNSRFAWMTRKSEETITPWNFEEVVDKGASAQSFIERMTNFDKNLPNEKVLPKHSLLYEYFTVYNELTKVKYVTEGMRKPAFLSGEQKKAIVDLLFKTNRKVTVKQLKEDYFKKIECFDSVEISGVEDRFNASLGTYHDLLKIIKDKDFLDNEENEDILEDIVLTLTLFEDREMIEERLKTYAHLFDDKVMKQLKRRRYTGWGRLSRKLINGIRDKQSGKTILDFLKSDGFANRNFMQLIHDDSLTFKEDIQKAQVSGQGDSLHEHIANLAGSPAIKKGILQTVKVVDELVKVMGRHKPENIVIEMARENQTTQKGQKNSRERMKRIEEGIKELGSQILKEHPVENTQLQNEKLYLYYLQNGRDMYVDQELDINRLSDYDVDHIVPQSFLKDDSIDNKVLTRSDKARGKSDNVPSEEVVKKMKNYWRQLLNAKLITQRKFDNLTKAERGGLSELDKAGFIKRQLVETRQITKHVAQILDSRMNTKYDENDKLIREVKVITLKSKLVSDFRKDFQFYKVREINNYHHAHDAYLNAVVGTALIKKYPKLESEFVYGDYKVYDVRKMIAKSEQEIGKATAKYFFYSNIMNFFKTEITLANGEIRKRPLIETNGETGEIVWDKGRDFATVRKVLSMPQVNIVKKTEVQTGGFSKESILPKRNSDKLIARKKDWDPKKYGGFDSPTVAYSVLVVAKVEKGKSKKLKSVKELLGITIMERSSFEKNPIDFLEAKGYKEVKKDLIIKLPKYSLFELENGRKRMLASAGELQKGNELALPSKYVNFLYLASHYEKLKGSPEDNEQKQLFVEQHKHYLDEIIEQISEFSKRVILADANLDKVLSAYNKHRDKPIREQAENIIHLFTLTNLGAPAAFKYFDTTIDRKRYTSTKEVLDATLIHQSITGLYETRIDLSQLGGDGGGGGPAPGGSGGTLNIEDEYRLHETSKGPDVPLGSTWLSDFPQAWAETGGMGLAVRQAPLIIPLKATSTPVSIKQYPMSQEARLGIKPHIQRLLDQGILVPCQSPWNTPLLPVKKPGTNDYRPVQDLREVNKRVEDIHPTVPNPYNLLSGLPPSHQWYTVLDLKDAFFCLRLHPTSQSLFAFEWRDPEMGISGQLTWTRLPQGFKNSPTLFNEALHRDLADFRIQHPDLILLQYVDDLLLAATSELDCQQGTRALLQTLGDLGYRASAKKAQICQKQVKYLGYLLKEGQRWLTEARKETVMGQPTPKTPRQLREFLGKAGFCRLFIPGFAEMAAPLYPLTKPGTLFEWGPDQQKAYQEIKQALLTAPALGLPDLTKPFELFVDEKQGYAKGVLTQKLGPWRRPVAYLSKKLDPVAAGWPPCLRMVAAIAVLTKDAGKLTMGQPLVILAPHAVEALVKQPPDRWLSNARMTHYQALLLDTDRVQFGPIVALNPATLLPLPEEGLQHDCLDILAEAHGTRPDLTDQPLPDADHTWYTDGSSFLQEGQRKAGAAVTTETEVVWAKALPAGTSAQRAELIALTQALKMAEGKKLNVYTDSRYAFATAHIHGEIYRRRGWLTSEGKEIKNKDEILALLKALFLPKRLSIIHCPGHQKGNRAEARGNRMADQAAREVATRETPETSTLLAGKRTADGSEFEKRTADGSEFESPKKKAKVE

SEQ ID NO: 2544 - protein, 2097 aa, synthetic construct
MPAAKRVKLDGGDKKYSIGLDIGTNSVGWAVITDEYKVPSKKFKVLGNTDRHSIKKNLIGALLFDSGETAEATRLKRTARRRYTRRKNRICYLQEIFSNEMAKVDDSFFHRLEESFLVEEDKKHERHPIFGNIVDEVAYHEKYPTIYHLRKKLVDSTDKADLRLIYLALAHMIKFRGHFLIEGDLNPDNSDVDKLFIQLVQTYNQLFEENPINASGVDAKAILSARLSKSRRLENLIAQLPGEKKNGLFGNLIALSLGLTPNFKSNFDLAEDAKLQLSKDTYDDDLDNLLAQIGDQYADLFLAAKNLSDAILLSDILRVNTEITKAPLSASMIKRYDEHHQDLTLLKALVRQQLPEKYKEIFFDQSKNGYAGYIDGGASQEEFYKFIKPILEKMDGTEELLVKLNREDLLRKQRTFDNGSIPHQIHLGELHAILRRQEDFYPFLKDNREKIEKILTFRIPYYVGPLARGNSRFAWMTRKSEETITPWNFEEVVDKGASAQSFIERMTNFDKNLPNEKVLPKHSLLYEYFTVYNELTKVKYVTEGMRKPAFLSGEQKKAIVDLLFKTNRKVTVKQLKEDYFKKIECFDSVEISGVEDRFNASLGTYHDLLKIIKDKDFLDNEENEDILEDIVLTLTLFEDREMIEERLKTYAHLFDDKVMKQLKRRRYTGWGRLSRKLINGIRDKQSGKTILDFLKSDGFANRNFMQLIHDDSLTFKEDIQKAQVSGQGDSLHEHIANLAGSPAIKKGILQTVKVVDELVKVMGRHKPENIVIEMARENQTTQKGQKNSRERMKRIEEGIKELGSQILKEHPVENTQLQNEKLYLYYLQNGRDMYVDQELDINRLSDYDVDHIVPQSFLKDDSIDNKVLTRSDKARGKSDNVPSEEVVKKMKNYWRQLLNAKLITQRKFDNLTKAERGGLSELDKAGFIKRQLVETRQITKHVAQILDSRMNTKYDENDKLIREVKVITLKSKLVSDFRKDFQFYKVREINNYHHAHDAYLNAVVGTALIKKYPKLESEFVYGDYKVYDVRKMIAKSEQEIGKATAKYFFYSNIMNFFKTEITLANGEIRKRPLIETNGETGEIVWDKGRDFATVRKVLSMPQVNIVKKTEVQTGGFSKESILPKRNSDKLIARKKDWDPKKYGGFDSPTVAYSVLVVAKVEKGKSKKLKSVKELLGITIMERSSFEKNPIDFLEAKGYKEVKKDLIIKLPKYSLFELENGRKRMLASAGELQKGNELALPSKYVNFLYLASHYEKLKGSPEDNEQKQLFVEQHKHYLDEIIEQISEFSKRVILADANLDKVLSAYNKHRDKPIREQAENIIHLFTLTNLGAPAAFKYFDTTIDRKRYTSTKEVLDATLIHQSITGLYETRIDLSQLGGDGGGGSGGSGGSGGSGGTLNIEDEYRLHETSKGPDVPLGSTWLSDFPQAWAETGGMGLAVRQAPLIIPLKATSTPVSIKQYPMSQEARLGIKPHIQRLLDQGILVPCQSPWNTPLLPVKKPGTNDYRPVQDLREVNKRVEDIHPTVPNPYNLLSGLPPSHQWYTVLDLKDAFFCLRLHPTSQSLFAFEWRDPEMGISGQLTWTRLPQGFKNSPTLFNEALHRDLADFRIQHPDLILLQYVDDLLLAATSELDCQQGTRALLQTLGDLGYRASAKKAQICQKQVKYLGYLLKEGQRWLTEARKETVMGQPTPKTPRQLREFLGKAGFCRLFIPGFAEMAAPLYPLTKPGTLFEWGPDQQKAYQEIKQALLTAPALGLPDLTKPFELFVDEKQGYAKGVLTQKLGPWRRPVAYLSKKLDPVAAGWPPCLRMVAAIAVLTKDAGKLTMGQPLVILAPHAVEALVKQPPDRWLSNARMTHYQALLLDTDRVQFGPIVALNPATLLPLPEEGLQHDCLDILAEAHGTRPDLTDQPLPDADHTWYTDGSSFLQEGQRKAGAAVTTETEVVWAKALPAGTSAQRAELIALTQALKMAEGKKLNVYTDSRYAFATAHIHGEIYRRRGWLTSEGKEIKNKDEILALLKALFLPKRLSIIHCPGHQKGNRAEARGNRMADQAAREVATRETPETSTLLAGKRTADGSEFEKRTADGSEFESPKKKAKVE

SEQ ID NO: 2545 - protein, 2094 aa, synthetic construct
MPAAKRVKLDGGDKKYSIGLDIGTNSVGWAVITDEYKVPSKKFKVLGNTDRHSIKKNLIGALLFDSGETAEATRLKRTARRRYTRRKNRICYLQEIFSNEMAKVDDSFFHRLEESFLVEEDKKHERHPIFGNIVDEVAYHEKYPTIYHLRKKLVDSTDKADLRLIYLALAHMIKFRGHFLIEGDLNPDNSDVDKLFIQLVQTYNQLFEENPINASGVDAKAILSARLSKSRRLENLIAQLPGEKKNGLFGNLIALSLGLTPNFKSNFDLAEDAKLQLSKDTYDDDLDNLLAQIGDQYADLFLAAKNLSDAILLSDILRVNTEITKAPLSASMIKRYDEHHQDLTLLKALVRQQLPEKYKEIFFDQSKNGYAGYIDGGASQEEFYKFIKPILEKMDGTEELLVKLNREDLLRKQRTFDNGSIPHQIHLGELHAILRRQEDFYPFLKDNREKIEKILTFRIPYYVGPLARGNSRFAWMTRKSEETITPWNFEEVVDKGASAQSFIERMTNFDKNLPNEKVLPKHSLLYEYFTVYNELTKVKYVTEGMRKPAFLSGEQKKAIVDLLFKTNRKVTVKQLKEDYFKKIECFDSVEISGVEDRFNASLGTYHDLLKIIKDKDFLDNEENEDILEDIVLTLTLFEDREMIEERLKTYAHLFDDKVMKQLKRRRYTGWGRLSRKLINGIRDKQSGKTILDFLKSDGFANRNFMQLIHDDSLTFKEDIQKAQVSGQGDSLHEHIANLAGSPAIKKGILQTVKVVDELVKVMGRHKPENIVIEMARENQTTQKGQKNSRERMKRIEEGIKELGSQILKEHPVENTQLQNEKLYLYYLQNGRDMYVDQELDINRLSDYDVDHIVPQSFLKDDSIDNKVLTRSDKARGKSDNVPSEEVVKKMKNYWRQLLNAKLITQRKFDNLTKAERGGLSELDKAGFIKRQLVETRQITKHVAQILDSRMNTKYDENDKLIREVKVITLKSKLVSDFRKDFQFYKVREINNYHHAHDAYLNAVVGTALIKKYPKLESEFVYGDYKVYDVRKMIAKSEQEIGKATAKYFFYSNIMNFFKTEITLANGEIRKRPLIETNGETGEIVWDKGRDFATVRKVLSMPQVNIVKKTEVQTGGFSKESILPKRNSDKLIARKKDWDPKKYGGFDSPTVAYSVLVVAKVEKGKSKKLKSVKELLGITIMERSSFEKNPIDFLEAKGYKEVKKDLIIKLPKYSLFELENGRKRMLASAGELQKGNELALPSKYVNFLYLASHYEKLKGSPEDNEQKQLFVEQHKHYLDEIIEQISEFSKRVILADANLDKVLSAYNKHRDKPIREQAENIIHLFTLTNLGAPAAFKYFDTTIDRKRYTSTKEVLDATLIHQSITGLYETRIDLSQLGGDGGGGSGSSGGGGGTLNIEDEYRLHETSKGPDVPLGSTWLSDFPQAWAETGGMGLAVRQAPLIIPLKATSTPVSIKQYPMSQEARLGIKPHIQRLLDQGILVPCQSPWNTPLLPVKKPGTNDYRPVQDLREVNKRVEDIHPTVPNPYNLLSGLPPSHQWYTVLDLKDAFFCLRLHPTSQSLFAFEWRDPEMGISGQLTWTRLPQGFKNSPTLFNEALHRDLADFRIQHPDLILLQYVDDLLLAATSELDCQQGTRALLQTLGDLGYRASAKKAQICQKQVKYLGYLLKEGQRWLTEARKETVMGQPTPKTPRQLREFLGKAGFCRLFIPGFAEMAAPLYPLTKPGTLFEWGPDQQKAYQEIKQALLTAPALGLPDLTKPFELFVDEKQGYAKGVLTQKLGPWRRPVAYLSKKLDPVAAGWPPCLRMVAAIAVLTKDAGKLTMGQPLVILAPHAVEALVKQPPDRWLSNARMTHYQALLLDTDRVQFGPIVALNPATLLPLPEEGLQHDCLDILAEAHGTRPDLTDQPLPDADHTWYTDGSSFLQEGQRKAGAAVTTETEVVWAKALPAGTSAQRAELIALTQALKMAEGKKLNVYTDSRYAFATAHIHGEIYRRRGWLTSEGKEIKNKDEILALLKALFLPKRLSIIHCPGHQKGNRAEARGNRMADQAAREVATRETPETSTLLAGKRTADGSEFEKRTADGSEFESPKKKAKVE

SEQ ID NO: 2546 - protein, 2091 aa, synthetic construct
MPAAKRVKLDGGDKKYSIGLDIGTNSVGWAVITDEYKVPSKKFKVLGNTDRHSIKKNLIGALLFDSGETAEATRLKRTARRRYTRRKNRICYLQEIFSNEMAKVDDSFFHRLEESFLVEEDKKHERHPIFGNIVDEVAYHEKYPTIYHLRKKLVDSTDKADLRLIYLALAHMIKFRGHFLIEGDLNPDNSDVDKLFIQLVQTYNQLFEENPINASGVDAKAILSARLSKSRRLENLIAQLPGEKKNGLFGNLIALSLGLTPNFKSNFDLAEDAKLQLSKDTYDDDLDNLLAQIGDQYADLFLAAKNLSDAILLSDILRVNTEITKAPLSASMIKRYDEHHQDLTLLKALVRQQLPEKYKEIFFDQSKNGYAGYIDGGASQEEFYKFIKPILEKMDGTEELLVKLNREDLLRKQRTFDNGSIPHQIHLGELHAILRRQEDFYPFLKDNREKIEKILTFRIPYYVGPLARGNSRFAWMTRKSEETITPWNFEEVVDKGASAQSFIERMTNFDKNLPNEKVLPKHSLLYEYFTVYNELTKVKYVTEGMRKPAFLSGEQKKAIVDLLFKTNRKVTVKQLKEDYFKKIECFDSVEISGVEDRFNASLGTYHDLLKIIKDKDFLDNEENEDILEDIVLTLTLFEDREMIEERLKTYAHLFDDKVMKQLKRRRYTGWGRLSRKLINGIRDKQSGKTILDFLKSDGFANRNFMQLIHDDSLTFKEDIQKAQVSGQGDSLHEHIANLAGSPAIKKGILQTVKVVDELVKVMGRHKPENIVIEMARENQTTQKGQKNSRERMKRIEEGIKELGSQILKEHPVENTQLQNEKLYLYYLQNGRDMYVDQELDINRLSDYDVDHIVPQSFLKDDSIDNKVLTRSDKARGKSDNVPSEEVVKKMKNYWRQLLNAKLITQRKFDNLTKAERGGLSELDKAGFIKRQLVETRQITKHVAQILDSRMNTKYDENDKLIREVKVITLKSKLVSDFRKDFQFYKVREINNYHHAHDAYLNAVVGTALIKKYPKLESEFVYGDYKVYDVRKMIAKSEQEIGKATAKYFFYSNIMNFFKTEITLANGEIRKRPLIETNGETGEIVWDKGRDFATVRKVLSMPQVNIVKKTEVQTGGFSKESILPKRNSDKLIARKKDWDPKKYGGFDSPTVAYSVLVVAKVEKGKSKKLKSVKELLGITIMERSSFEKNPIDFLEAKGYKEVKKDLIIKLPKYSLFELENGRKRMLASAGELQKGNELALPSKYVNFLYLASHYEKLKGSPEDNEQKQLFVEQHKHYLDEIIEQISEFSKRVILADANLDKVLSAYNKHRDKPIREQAENIIHLFTLTNLGAPAAFKYFDTTIDRKRYTSTKEVLDATLIHQSITGLYETRIDLSQLGGDGGPAPGGSGGTLNIEDEYRLHETSKGPDVPLGSTWLSDFPQAWAETGGMGLAVRQAPLIIPLKATSTPVSIKQYPMSQEARLGIKPHIQRLLDQGILVPCQSPWNTPLLPVKKPGTNDYRPVQDLREVNKRVEDIHPTVPNPYNLLSGLPPSHQWYTVLDLKDAFFCLRLHPTSQSLFAFEWRDPEMGISGQLTWTRLPQGFKNSPTLFNEALHRDLADFRIQHPDLILLQYVDDLLLAATSELDCQQGTRALLQTLGDLGYRASAKKAQICQKQVKYLGYLLKEGQRWLTEARKETVMGQPTPKTPRQLREFLGKAGFCRLFIPGFAEMAAPLYPLTKPGTLFEWGPDQQKAYQEIKQALLTAPALGLPDLTKPFELFVDEKQGYAKGVLTQKLGPWRRPVAYLSKKLDPVAAGWPPCLRMVAAIAVLTKDAGKLTMGQPLVILAPHAVEALVKQPPDRWLSNARMTHYQALLLDTDRVQFGPIVALNPATLLPLPEEGLQHDCLDILAEAHGTRPDLTDQPLPDADHTWYTDGSSFLQEGQRKAGAAVTTETEVVWAKALPAGTSAQRAELIALTQALKMAEGKKLNVYTDSRYAFATAHIHGEIYRRRGWLTSEGKEIKNKDEILALLKALFLPKRLSIIHCPGHQKGNRAEARGNRMADQAAREVATRETPETSTLLAGKRTADGSEFEKRTADGSEFESPKKKAKVE

SEQ ID NO: 2547 - protein, 2091 aa, synthetic construct
MPAAKRVKLDGGDKKYSIGLDIGTNSVGWAVITDEYKVPSKKFKVLGNTDRHSIKKNLIGALLFDSGETAEATRLKRTARRRYTRRKNRICYLQEIFSNEMAKVDDSFFHRLEESFLVEEDKKHERHPIFGNIVDEVAYHEKYPTIYHLRKKLVDSTDKADLRLIYLALAHMIKFRGHFLIEGDLNPDNSDVDKLFIQLVQTYNQLFEENPINASGVDAKAILSARLSKSRRLENLIAQLPGEKKNGLFGNLIALSLGLTPNFKSNFDLAEDAKLQLSKDTYDDDLDNLLAQIGDQYADLFLAAKNLSDAILLSDILRVNTEITKAPLSASMIKRYDEHHQDLTLLKALVRQQLPEKYKEIFFDQSKNGYAGYIDGGASQEEFYKFIKPILEKMDGTEELLVKLNREDLLRKQRTFDNGSIPHQIHLGELHAILRRQEDFYPFLKDNREKIEKILTFRIPYYVGPLARGNSRFAWMTRKSEETITPWNFEEVVDKGASAQSFIERMTNFDKNLPNEKVLPKHSLLYEYFTVYNELTKVKYVTEGMRKPAFLSGEQKKAIVDLLFKTNRKVTVKQLKEDYFKKIECFDSVEISGVEDRFNASLGTYHDLLKIIKDKDFLDNEENEDILEDIVLTLTLFEDREMIEERLKTYAHLFDDKVMKQLKRRRYTGWGRLSRKLINGIRDKQSGKTILDFLKSDGFANRNFMQLIHDDSLTFKEDIQKAQVSGQGDSLHEHIANLAGSPAIKKGILQTVKVVDELVKVMGRHKPENIVIEMARENQTTQKGQKNSRERMKRIEEGIKELGSQILKEHPVENTQLQNEKLYLYYLQNGRDMYVDQELDINRLSDYDVDHIVPQSFLKDDSIDNKVLTRSDKARGKSDNVPSEEVVKKMKNYWRQLLNAKLITQRKFDNLTKAERGGLSELDKAGFIKRQLVETRQITKHVAQILDSRMNTKYDENDKLIREVKVITLKSKLVSDFRKDFQFYKVREINNYHHAHDAYLNAVVGTALIKKYPKLESEFVYGDYKVYDVRKMIAKSEQEIGKATAKYFFYSNIMNFFKTEITLANGEIRKRPLIETNGETGEIVWDKGRDFATVRKVLSMPQVNIVKKTEVQTGGFSKESILPKRNSDKLIARKKDWDPKKYGGFDSPTVAYSVLVVAKVEKGKSKKLKSVKELLGITIMERSSFEKNPIDFLEAKGYKEVKKDLIIKLPKYSLFELENGRKRMLASAGELQKGNELALPSKYVNFLYLASHYEKLKGSPEDNEQKQLFVEQHKHYLDEIIEQISEFSKRVILADANLDKVLSAYNKHRDKPIREQAENIIHLFTLTNLGAPAAFKYFDTTIDRKRYTSTKEVLDATLIHQSITGLYETRIDLSQLGGDGGGGGPAPGGTLNIEDEYRLHETSKGPDVPLGSTWLSDFPQAWAETGGMGLAVRQAPLIIPLKATSTPVSIKQYPMSQEARLGIKPHIQRLLDQGILVPCQSPWNTPLLPVKKPGTNDYRPVQDLREVNKRVEDIHPTVPNPYNLLSGLPPSHQWYTVLDLKDAFFCLRLHPTSQSLFAFEWRDPEMGISGQLTWTRLPQGFKNSPTLFNEALHRDLADFRIQHPDLILLQYVDDLLLAATSELDCQQGTRALLQTLGDLGYRASAKKAQICQKQVKYLGYLLKEGQRWLTEARKETVMGQPTPKTPRQLREFLGKAGFCRLFIPGFAEMAAPLYPLTKPGTLFEWGPDQQKAYQEIKQALLTAPALGLPDLTKPFELFVDEKQGYAKGVLTQKLGPWRRPVAYLSKKLDPVAAGWPPCLRMVAAIAVLTKDAGKLTMGQPLVILAPHAVEALVKQPPDRWLSNARMTHYQALLLDTDRVQFGPIVALNPATLLPLPEEGLQHDCLDILAEAHGTRPDLTDQPLPDADHTWYTDGSSFLQEGQRKAGAAVTTETEVVWAKALPAGTSAQRAELIALTQALKMAEGKKLNVYTDSRYAFATAHIHGEIYRRRGWLTSEGKEIKNKDEILALLKALFLPKRLSIIHCPGHQKGNRAEARGNRMADQAAREVATRETPETSTLLAGKRTADGSEFEKRTADGSEFESPKKKAKVE

SEQ ID NO: 2548 - protein, 2096 aa, synthetic construct
MPAAKRVKLDGGDKKYSIGLDIGTNSVGWAVITDEYKVPSKKFKVLGNTDRHSIKKNLIGALLFDSGETAEATRLKRTARRRYTRRKNRICYLQEIFSNEMAKVDDSFFHRLEESFLVEEDKKHERHPIFGNIVDEVAYHEKYPTIYHLRKKLVDSTDKADLRLIYLALAHMIKFRGHFLIEGDLNPDNSDVDKLFIQLVQTYNQLFEENPINASGVDAKAILSARLSKSRRLENLIAQLPGEKKNGLFGNLIALSLGLTPNFKSNFDLAEDAKLQLSKDTYDDDLDNLLAQIGDQYADLFLAAKNLSDAILLSDILRVNTEITKAPLSASMIKRYDEHHQDLTLLKALVRQQLPEKYKEIFFDQSKNGYAGYIDGGASQEEFYKFIKPILEKMDGTEELLVKLNREDLLRKQRTFDNGSIPHQIHLGELHAILRRQEDFYPFLKDNREKIEKILTFRIPYYVGPLARGNSRFAWMTRKSEETITPWNFEEVVDKGASAQSFIERMTNFDKNLPNEKVLPKHSLLYEYFTVYNELTKVKYVTEGMRKPAFLSGEQKKAIVDLLFKTNRKVTVKQLKEDYFKKIECFDSVEISGVEDRFNASLGTYHDLLKIIKDKDFLDNEENEDILEDIVLTLTLFEDREMIEERLKTYAHLFDDKVMKQLKRRRYTGWGRLSRKLINGIRDKQSGKTILDFLKSDGFANRNFMQLIHDDSLTFKEDIQKAQVSGQGDSLHEHIANLAGSPAIKKGILQTVKVVDELVKVMGRHKPENIVIEMARENQTTQKGQKNSRERMKRIEEGIKELGSQILKEHPVENTQLQNEKLYLYYLQNGRDMYVDQELDINRLSDYDVDHIVPQSFLKDDSIDNKVLTRSDKARGKSDNVPSEEVVKKMKNYWRQLLNAKLITQRKFDNLTKAERGGLSELDKAGFIKRQLVETRQITKHVAQILDSRMNTKYDENDKLIREVKVITLKSKLVSDFRKDFQFYKVREINNYHHAHDAYLNAVVGTALIKKYPKLESEFVYGDYKVYDVRKMIAKSEQEIGKATAKYFFYSNIMNFFKTEITLANGEIRKRPLIETNGETGEIVWDKGRDFATVRKVLSMPQVNIVKKTEVQTGGFSKESILPKRNSDKLIARKKDWDPKKYGGFDSPTVAYSVLVVAKVEKGKSKKLKSVKELLGITIMERSSFEKNPIDFLEAKGYKEVKKDLIIKLPKYSLFELENGRKRMLASAGELQKGNELALPSKYVNFLYLASHYEKLKGSPEDNEQKQLFVEQHKHYLDEIIEQISEFSKRVILADANLDKVLSAYNKHRDKPIREQAENIIHLFTLTNLGAPAAFKYFDTTIDRKRYTSTKEVLDATLIHQSITGLYETRIDLSQLGGDGGEAAAKGGSGSSGGTLNIEDEYRLHETSKGPDVPLGSTWLSDFPQAWAETGGMGLAVRQAPLIIPLKATSTPVSIKQYPMSQEARLGIKPHIQRLLDQGILVPCQSPWNTPLLPVKKPGTNDYRPVQDLREVNKRVEDIHPTVPNPYNLLSGLPPSHQWYTVLDLKDAFFCLRLHPTSQSLFAFEWRDPEMGISGQLTWTRLPQGFKNSPTLFNEALHRDLADFRIQHPDLILLQYVDDLLLAATSELDCQQGTRALLQTLGDLGYRASAKKAQICQKQVKYLGYLLKEGQRWLTEARKETVMGQPTPKTPRQLREFLGKAGFCRLFIPGFAEMAAPLYPLTKPGTLFEWGPDQQKAYQEIKQALLTAPALGLPDLTKPFELFVDEKQGYAKGVLTQKLGPWRRPVAYLSKKLDPVAAGWPPCLRMVAAIAVLTKDAGKLTMGQPLVILAPHAVEALVKQPPDRWLSNARMTHYQALLLDTDRVQFGPIVALNPATLLPLPEEGLQHDCLDILAEAHGTRPDLTDQPLPDADHTWYTDGSSFLQEGQRKAGAAVTTETEVVWAKALPAGTSAQRAELIALTQALKMAEGKKLNVYTDSRYAFATAHIHGEIYRRRGWLTSEGKEIKNKDEILALLKALFLPKRLSIIHCPGHQKGNRAEARGNRMADQAAREVATRETPETSTLLAGKRTADGSEFEKRTADGSEFESPKKKAKVE

SEQ ID NO: 2549 - protein, 2093 aa, synthetic construct
MPAAKRVKLDGGDKKYSIGLDIGTNSVGWAVITDEYKVPSKKFKVLGNTDRHSIKKNLIGALLFDSGETAEATRLKRTARRRYTRRKNRICYLQEIFSNEMAKVDDSFFHRLEESFLVEEDKKHERHPIFGNIVDEVAYHEKYPTIYHLRKKLVDSTDKADLRLIYLALAHMIKFRGHFLIEGDLNPDNSDVDKLFIQLVQTYNQLFEENPINASGVDAKAILSARLSKSRRLENLIAQLPGEKKNGLFGNLIALSLGLTPNFKSNFDLAEDAKLQLSKDTYDDDLDNLLAQIGDQYADLFLAAKNLSDAILLSDILRVNTEITKAPLSASMIKRYDEHHQDLTLLKALVRQQLPEKYKEIFFDQSKNGYAGYIDGGASQEEFYKFIKPILEKMDGTEELLVKLNREDLLRKQRTFDNGSIPHQIHLGELHAILRRQEDFYPFLKDNREKIEKILTFRIPYYVGPLARGNSRFAWMTRKSEETITPWNFEEVVDKGASAQSFIERMTNFDKNLPNEKVLPKHSLLYEYFTVYNELTKVKYVTEGMRKPAFLSGEQKKAIVDLLFKTNRKVTVKQLKEDYFKKIECFDSVEISGVEDRFNASLGTYHDLLKIIKDKDFLDNEENEDILEDIVLTLTLFEDREMIEERLKTYAHLFDDKVMKQLKRRRYTGWGRLSRKLINGIRDKQSGKTILDFLKSDGFANRNFMQLIHDDSLTFKEDIQKAQVSGQGDSLHEHIANLAGSPAIKKGILQTVKVVDELVKVMGRHKPENIVIEMARENQTTQKGQKNSRERMKRIEEGIKELGSQILKEHPVENTQLQNEKLYLYYLQNGRDMYVDQELDINRLSDYDVDHIVPQSFLKDDSIDNKVLTRSDKARGKSDNVPSEEVVKKMKNYWRQLLNAKLITQRKFDNLTKAERGGLSELDKAGFIKRQLVETRQITKHVAQILDSRMNTKYDENDKLIREVKVITLKSKLVSDFRKDFQFYKVREINNYHHAHDAYLNAVVGTALIKKYPKLESEFVYGDYKVYDVRKMIAKSEQEIGKATAKYFFYSNIMNFFKTEITLANGEIRKRPLIETNGETGEIVWDKGRDFATVRKVLSMPQVNIVKKTEVQTGGFSKESILPKRNSDKLIARKKDWDPKKYGGFDSPTVAYSVLVVAKVEKGKSKKLKSVKELLGITIMERSSFEKNPIDFLEAKGYKEVKKDLIIKLPKYSLFELENGRKRMLASAGELQKGNELALPSKYVNFLYLASHYEKLKGSPEDNEQKQLFVEQHKHYLDEIIEQISEFSKRVILADANLDKVLSAYNKHRDKPIREQAENIIHLFTLTNLGAPAAFKYFDTTIDRKRYTSTKEVLDATLIHQSITGLYETRIDLSQLGGDGGGGGGGGGGGGTLNIEDEYRLHETSKGPDVPLGSTWLSDFPQAWAETGGMGLAVRQAPLIIPLKATSTPVSIKQYPMSQEARLGIKPHIQRLLDQGILVPCQSPWNTPLLPVKKPGTNDYRPVQDLREVNKRVEDIHPTVPNPYNLLSGLPPSHQWYTVLDLKDAFFCLRLHPTSQSLFAFEWRDPEMGISGQLTWTRLPQGFKNSPTLFNEALHRDLADFRIQHPDLILLQYVDDLLLAATSELDCQQGTRALLQTLGDLGYRASAKKAQICQKQVKYLGYLLKEGQRWLTEARKETVMGQPTPKTPRQLREFLGKAGFCRLFIPGFAEMAAPLYPLTKPGTLFEWGPDQQKAYQEIKQALLTAPALGLPDLTKPFELFVDEKQGYAKGVLTQKLGPWRRPVAYLSKKLDPVAAGWPPCLRMVAAIAVLTKDAGKLTMGQPLVILAPHAVEALVKQPPDRWLSNARMTHYQALLLDTDRVQFGPIVALNPATLLPLPEEGLQHDCLDILAEAHGTRPDLTDQPLPDADHTWYTDGSSFLQEGQRKAGAAVTTETEVVWAKALPAGTSAQRAELIALTQALKMAEGKKLNVYTDSRYAFATAHIHGEIYRRRGWLTSEGKEIKNKDEILALLKALFLPKRLSIIHCPGHQKGNRAEARGNRMADQAAREVATRETPETSTLLAGKRTADGSEFEKRTADGSEFESPKKKAKVE

SEQ ID NO: 2550 - protein, 2096 aa, synthetic construct
MPAAKRVKLDGGDKKYSIGLDIGTNSVGWAVITDEYKVPSKKFKVLGNTDRHSIKKNLIGALLFDSGETAEATRLKRTARRRYTRRKNRICYLQEIFSNEMAKVDDSFFHRLEESFLVEEDKKHERHPIFGNIVDEVAYHEKYPTIYHLRKKLVDSTDKADLRLIYLALAHMIKFRGHFLIEGDLNPDNSDVDKLFIQLVQTYNQLFEENPINASGVDAKAILSARLSKSRRLENLIAQLPGEKKNGLFGNLIALSLGLTPNFKSNFDLAEDAKLQLSKDTYDDDLDNLLAQIGDQYADLFLAAKNLSDAILLSDILRVNTEITKAPLSASMIKRYDEHHQDLTLLKALVRQQLPEKYKEIFFDQSKNGYAGYIDGGASQEEFYKFIKPILEKMDGTEELLVKLNREDLLRKQRTFDNGSIPHQIHLGELHAILRRQEDFYPFLKDNREKIEKILTFRIPYYVGPLARGNSRFAWMTRKSEETITPWNFEEVVDKGASAQSFIERMTNFDKNLPNEKVLPKHSLLYEYFTVYNELTKVKYVTEGMRKPAFLSGEQKKAIVDLLFKTNRKVTVKQLKEDYFKKIECFDSVEISGVEDRFNASLGTYHDLLKIIKDKDFLDNEENEDILEDIVLTLTLFEDREMIEERLKTYAHLFDDKVMKQLKRRRYTGWGRLSRKLINGIRDKQSGKTILDFLKSDGFANRNFMQLIHDDSLTFKEDIQKAQVSGQGDSLHEHIANLAGSPAIKKGILQTVKVVDELVKVMGRHKPENIVIEMARENQTTQKGQKNSRERMKRIEEGIKELGSQILKEHPVENTQLQNEKLYLYYLQNGRDMYVDQELDINRLSDYDVDHIVPQSFLKDDSIDNKVLTRSDKARGKSDNVPSEEVVKKMKNYWRQLLNAKLITQRKFDNLTKAERGGLSELDKAGFIKRQLVETRQITKHVAQILDSRMNTKYDENDKLIREVKVITLKSKLVSDFRKDFQFYKVREINNYHHAHDAYLNAVVGTALIKKYPKLESEFVYGDYKVYDVRKMIAKSEQEIGKATAKYFFYSNIMNFFKTEITLANGEIRKRPLIETNGETGEIVWDKGRDFATVRKVLSMPQVNIVKKTEVQTGGFSKESILPKRNSDKLIARKKDWDPKKYGGFDSPTVAYSVLVVAKVEKGKSKKLKSVKELLGITIMERSSFEKNPIDFLEAKGYKEVKKDLIIKLPKYSLFELENGRKRMLASAGELQKGNELALPSKYVNFLYLASHYEKLKGSPEDNEQKQLFVEQHKHYLDEIIEQISEFSKRVILADANLDKVLSAYNKHRDKPIREQAENIIHLFTLTNLGAPAAFKYFDTTIDRKRYTSTKEVLDATLIHQSITGLYETRIDLSQLGGDGGGSSEAAAKGGGGGTLNIEDEYRLHETSKGPDVPLGSTWLSDFPQAWAETGGMGLAVRQAPLIIPLKATSTPVSIKQYPMSQEARLGIKPHIQRLLDQGILVPCQSPWNTPLLPVKKPGTNDYRPVQDLREVNKRVEDIHPTVPNPYNLLSGLPPSHQWYTVLDLKDAFFCLRLHPTSQSLFAFEWRDPEMGISGQLTWTRLPQGFKNSPTLFNEALHRDLADFRIQHPDLILLQYVDDLLLAATSELDCQQGTRALLQTLGDLGYRASAKKAQICQKQVKYLGYLLKEGQRWLTEARKETVMGQPTPKTPRQLREFLGKAGFCRLFIPGFAEMAAPLYPLTKPGTLFEWGPDQQKAYQEIKQALLTAPALGLPDLTKPFELFVDEKQGYAKGVLTQKLGPWRRPVAYLSKKLDPVAAGWPPCLRMVAAIAVLTKDAGKLTMGQPLVILAPHAVEALVKQPPDRWLSNARMTHYQALLLDTDRVQFGPIVALNPATLLPLPEEGLQHDCLDILAEAHGTRPDLTDQPLPDADHTWYTDGSSFLQEGQRKAGAAVTTETEVVWAKALPAGTSAQRAELIALTQALKMAEGKKLNVYTDSRYAFATAHIHGEIYRRRGWLTSEGKEIKNKDEILALLKALFLPKRLSIIHCPGHQKGNRAEARGNRMADQAAREVATRETPETSTLLAGKRTADGSEFEKRTADGSEFESPKKKAKVE

SEQ ID NO: 2551 - protein, 2096 aa, synthetic construct
MPAAKRVKLDGGDKKYSIGLDIGTNSVGWAVITDEYKVPSKKFKVLGNTDRHSIKKNLIGALLFDSGETAEATRLKRTARRRYTRRKNRICYLQEIFSNEMAKVDDSFFHRLEESFLVEEDKKHERHPIFGNIVDEVAYHEKYPTIYHLRKKLVDSTDKADLRLIYLALAHMIKFRGHFLIEGDLNPDNSDVDKLFIQLVQTYNQLFEENPINASGVDAKAILSARLSKSRRLENLIAQLPGEKKNGLFGNLIALSLGLTPNFKSNFDLAEDAKLQLSKDTYDDDLDNLLAQIGDQYADLFLAAKNLSDAILLSDILRVNTEITKAPLSASMIKRYDEHHQDLTLLKALVRQQLPEKYKEIFFDQSKNGYAGYIDGGASQEEFYKFIKPILEKMDGTEELLVKLNREDLLRKQRTFDNGSIPHQIHLGELHAILRRQEDFYPFLKDNREKIEKILTFRIPYYVGPLARGNSRFAWMTRKSEETITPWNFEEVVDKGASAQSFIERMTNFDKNLPNEKVLPKHSLLYEYFTVYNELTKVKYVTEGMRKPAFLSGEQKKAIVDLLFKTNRKVTVKQLKEDYFKKIECFDSVEISGVEDRFNASLGTYHDLLKIIKDKDFLDNEENEDILEDIVLTLTLFEDREMIEERLKTYAHLFDDKVMKQLKRRRYTGWGRLSRKLINGIRDKQSGKTILDFLKSDGFANRNFMQLIHDDSLTFKEDIQKAQVSGQGDSLHEHIANLAGSPAIKKGILQTVKVVDELVKVMGRHKPENIVIEMARENQTTQKGQKNSRERMKRIEEGIKELGSQILKEHPVENTQLQNEKLYLYYLQNGRDMYVDQELDINRLSDYDVDHIVPQSFLKDDSIDNKVLTRSDKARGKSDNVPSEEVVKKMKNYWRQLLNAKLITQRKFDNLTKAERGGLSELDKAGFIKRQLVETRQITKHVAQILDSRMNTKYDENDKLIREVKVITLKSKLVSDFRKDFQFYKVREINNYHHAHDAYLNAVVGTALIKKYPKLESEFVYGDYKVYDVRKMIAKSEQEIGKATAKYFFYSNIMNFFKTEITLANGEIRKRPLIETNGETGEIVWDKGRDFATVRKVLSMPQVNIVKKTEVQTGGFSKESILPKRNSDKLIARKKDWDPKKYGGFDSPTVAYSVLVVAKVEKGKSKKLKSVKELLGITIMERSSFEKNPIDFLEAKGYKEVKKDLIIKLPKYSLFELENGRKRMLASAGELQKGNELALPSKYVNFLYLASHYEKLKGSPEDNEQKQLFVEQHKHYLDEIIEQISEFSKRVILADANLDKVLSAYNKHRDKPIREQAENIIHLFTLTNLGAPAAFKYFDTTIDRKRYTSTKEVLDATLIHQSITGLYETRIDLSQLGGDGGEAAAKGGSGGGGGTLNIEDEYRLHETSKGPDVPLGSTWLSDFPQAWAETGGMGLAVRQAPLIIPLKATSTPVSIKQYPMSQEARLGIKPHIQRLLDQGILVPCQSPWNTPLLPVKKPGTNDYRPVQDLREVNKRVEDIHPTVPNPYNLLSGLPPSHQWYTVLDLKDAFFCLRLHPTSQSLFAFEWRDPEMGISGQLTWTRLPQGFKNSPTLFNEALHRDLADFRIQHPDLILLQYVDDLLLAATSELDCQQGTRALLQTLGDLGYRASAKKAQICQKQVKYLGYLLKEGQRWLTEARKETVMGQPTPKTPRQLREFLGKAGFCRLFIPGFAEMAAPLYPLTKPGTLFEWGPDQQKAYQEIKQALLTAPALGLPDLTKPFELFVDEKQGYAKGVLTQKLGPWRRPVAYLSKKLDPVAAGWPPCLRMVAAIAVLTKDAGKLTMGQPLVILAPHAVEALVKQPPDRWLSNARMTHYQALLLDTDRVQFGPIVALNPATLLPLPEEGLQHDCLDILAEAHGTRPDLTDQPLPDADHTWYTDGSSFLQEGQRKAGAAVTTETEVVWAKALPAGTSAQRAELIALTQALKMAEGKKLNVYTDSRYAFATAHIHGEIYRRRGWLTSEGKEIKNKDEILALLKALFLPKRLSIIHCPGHQKGNRAEARGNRMADQAAREVATRETPETSTLLAGKRTADGSEFEKRTADGSEFESPKKKAKVE

SEQ ID NO: 2552 - protein, 2094 aa, synthetic construct
MPAAKRVKLDGGDKKYSIGLDIGTNSVGWAVITDEYKVPSKKFKVLGNTDRHSIKKNLIGALLFDSGETAEATRLKRTARRRYTRRKNRICYLQEIFSNEMAKVDDSFFHRLEESFLVEEDKKHERHPIFGNIVDEVAYHEKYPTIYHLRKKLVDSTDKADLRLIYLALAHMIKFRGHFLIEGDLNPDNSDVDKLFIQLVQTYNQLFEENPINASGVDAKAILSARLSKSRRLENLIAQLPGEKKNGLFGNLIALSLGLTPNFKSNFDLAEDAKLQLSKDTYDDDLDNLLAQIGDQYADLFLAAKNLSDAILLSDILRVNTEITKAPLSASMIKRYDEHHQDLTLLKALVRQQLPEKYKEIFFDQSKNGYAGYIDGGASQEEFYKFIKPILEKMDGTEELLVKLNREDLLRKQRTFDNGSIPHQIHLGELHAILRRQEDFYPFLKDNREKIEKILTFRIPYYVGPLARGNSRFAWMTRKSEETITPWNFEEVVDKGASAQSFIERMTNFDKNLPNEKVLPKHSLLYEYFTVYNELTKVKYVTEGMRKPAFLSGEQKKAIVDLLFKTNRKVTVKQLKEDYFKKIECFDSVEISGVEDRFNASLGTYHDLLKIIKDKDFLDNEENEDILEDIVLTLTLFEDREMIEERLKTYAHLFDDKVMKQLKRRRYTGWGRLSRKLINGIRDKQSGKTILDFLKSDGFANRNFMQLIHDDSLTFKEDIQKAQVSGQGDSLHEHIANLAGSPAIKKGILQTVKVVDELVKVMGRHKPENIVIEMARENQTTQKGQKNSRERMKRIEEGIKELGSQILKEHPVENTQLQNEKLYLYYLQNGRDMYVDQELDINRLSDYDVDHIVPQSFLKDDSIDNKVLTRSDKARGKSDNVPSEEVVKKMKNYWRQLLNAKLITQRKFDNLTKAERGGLSELDKAGFIKRQLVETRQITKHVAQILDSRMNTKYDENDKLIREVKVITLKSKLVSDFRKDFQFYKVREINNYHHAHDAYLNAVVGTALIKKYPKLESEFVYGDYKVYDVRKMIAKSEQEIGKATAKYFFYSNIMNFFKTEITLANGEIRKRPLIETNGETGEIVWDKGRDFATVRKVLSMPQVNIVKKTEVQTGGFSKESILPKRNSDKLIARKKDWDPKKYGGFDSPTVAYSVLVVAKVEKGKSKKLKSVKELLGITIMERSSFEKNPIDFLEAKGYKEVKKDLIIKLPKYSLFELENGRKRMLASAGELQKGNELALPSKYVNFLYLASHYEKLKGSPEDNEQKQLFVEQHKHYLDEIIEQISEFSKRVILADANLDKVLSAYNKHRDKPIREQAENIIHLFTLTNLGAPAAFKYFDTTIDRKRYTSTKEVLDATLIHQSITGLYETRIDLSQLGGDGGGSSPAPGGSGGTLNIEDEYRLHETSKGPDVPLGSTWLSDFPQAWAETGGMGLAVRQAPLIIPLKATSTPVSIKQYPMSQEARLGIKPHIQRLLDQGILVPCQSPWNTPLLPVKKPGTNDYRPVQDLREVNKRVEDIHPTVPNPYNLLSGLPPSHQWYTVLDLKDAFFCLRLHPTSQSLFAFEWRDPEMGISGQLTWTRLPQGFKNSPTLFNEALHRDLADFRIQHPDLILLQYVDDLLLAATSELDCQQGTRALLQTLGDLGYRASAKKAQICQKQVKYLGYLLKEGQRWLTEARKETVMGQPTPKTPRQLREFLGKAGFCRLFIPGFAEMAAPLYPLTKPGTLFEWGPDQQKAYQEIKQALLTAPALGLPDLTKPFELFVDEKQGYAKGVLTQKLGPWRRPVAYLSKKLDPVAAGWPPCLRMVAAIAVLTKDAGKLTMGQPLVILAPHAVEALVKQPPDRWLSNARMTHYQALLLDTDRVQFGPIVALNPATLLPLPEEGLQHDCLDILAEAHGTRPDLTDQPLPDADHTWYTDGSSFLQEGQRKAGAAVTTETEVVWAKALPAGTSAQRAELIALTQALKMAEGKKLNVYTDSRYAFATAHIHGEIYRRRGWLTSEGKEIKNKDEILALLKALFLPKRLSIIHCPGHQKGNRAEARGNRMADQAAREVATRETPETSTLLAGKRTADGSEFEKRTADGSEFESPKKKAKVE

SEQ ID NO: 2553 - protein, 2096 aa, synthetic construct
MPAAKRVKLDGGDKKYSIGLDIGTNSVGWAVITDEYKVPSKKFKVLGNTDRHSIKKNLIGALLFDSGETAEATRLKRTARRRYTRRKNRICYLQEIFSNEMAKVDDSFFHRLEESFLVEEDKKHERHPIFGNIVDEVAYHEKYPTIYHLRKKLVDSTDKADLRLIYLALAHMIKFRGHFLIEGDLNPDNSDVDKLFIQLVQTYNQLFEENPINASGVDAKAILSARLSKSRRLENLIAQLPGEKKNGLFGNLIALSLGLTPNFKSNFDLAEDAKLQLSKDTYDDDLDNLLAQIGDQYADLFLAAKNLSDAILLSDILRVNTEITKAPLSASMIKRYDEHHQDLTLLKALVRQQLPEKYKEIFFDQSKNGYAGYIDGGASQEEFYKFIKPILEKMDGTEELLVKLNREDLLRKQRTFDNGSIPHQIHLGELHAILRRQEDFYPFLKDNREKIEKILTFRIPYYVGPLARGNSRFAWMTRKSEETITPWNFEEVVDKGASAQSFIERMTNFDKNLPNEKVLPKHSLLYEYFTVYNELTKVKYVTEGMRKPAFLSGEQKKAIVDLLFKTNRKVTVKQLKEDYFKKIECFDSVEISGVEDRFNASLGTYHDLLKIIKDKDFLDNEENEDILEDIVLTLTLFEDREMIEERLKTYAHLFDDKVMKQLKRRRYTGWGRLSRKLINGIRDKQSGKTILDFLKSDGFANRNFMQLIHDDSLTFKEDIQKAQVSGQGDSLHEHIANLAGSPAIKKGILQTVKVVDELVKVMGRHKPENIVIEMARENQTTQKGQKNSRERMKRIEEGIKELGSQILKEHPVENTQLQNEKLYLYYLQNGRDMYVDQELDINRLSDYDVDHIVPQSFLKDDSIDNKVLTRSDKARGKSDNVPSEEVVKKMKNYWRQLLNAKLITQRKFDNLTKAERGGLSELDKAGFIKRQLVETRQITKHVAQILDSRMNTKYDENDKLIREVKVITLKSKLVSDFRKDFQFYKVREINNYHHAHDAYLNAVVGTALIKKYPKLESEFVYGDYKVYDVRKMIAKSEQEIGKATAKYFFYSNIMNFFKTEITLANGEIRKRPLIETNGETGEIVWDKGRDFATVRKVLSMPQVNIVKKTEVQTGGFSKESILPKRNSDKLIARKKDWDPKKYGGFDSPTVAYSVLVVAKVEKGKSKKLKSVKELLGITIMERSSFEKNPIDFLEAKGYKEVKKDLIIKLPKYSLFELENGRKRMLASAGELQKGNELALPSKYVNFLYLASHYEKLKGSPEDNEQKQLFVEQHKHYLDEIIEQISEFSKRVILADANLDKVLSAYNKHRDKPIREQAENIIHLFTLTNLGAPAAFKYFDTTIDRKRYTSTKEVLDATLIHQSITGLYETRIDLSQLGGDGGGSSEAAAKGGSGGTLNIEDEYRLHETSKGPDVPLGSTWLSDFPQAWAETGGMGLAVRQAPLIIPLKATSTPVSIKQYPMSQEARLGIKPHIQRLLDQGILVPCQSPWNTPLLPVKKPGTNDYRPVQDLREVNKRVEDIHPTVPNPYNLLSGLPPSHQWYTVLDLKDAFFCLRLHPTSQSLFAFEWRDPEMGISGQLTWTRLPQGFKNSPTLFNEALHRDLADFRIQHPDLILLQYVDDLLLAATSELDCQQGTRALLQTLGDLGYRASAKKAQICQKQVKYLGYLLKEGQRWLTEARKETVMGQPTPKTPRQLREFLGKAGFCRLFIPGFAEMAAPLYPLTKPGTLFEWGPDQQKAYQEIKQALLTAPALGLPDLTKPFELFVDEKQGYAKGVLTQKLGPWRRPVAYLSKKLDPVAAGWPPCLRMVAAIAVLTKDAGKLTMGQPLVILAPHAVEALVKQPPDRWLSNARMTHYQALLLDTDRVQFGPIVALNPATLLPLPEEGLQHDCLDILAEAHGTRPDLTDQPLPDADHTWYTDGSSFLQEGQRKAGAAVTTETEVVWAKALPAGTSAQRAELIALTQALKMAEGKKLNVYTDSRYAFATAHIHGEIYRRRGWLTSEGKEIKNKDEILALLKALFLPKRLSIIHCPGHQKGNRAEARGNRMADQAAREVATRETPETSTLLAGKRTADGSEFEKRTADGSEFESPKKKAKVE

SEQ ID NO: 2554 - protein, 2094 aa, synthetic construct
MPAAKRVKLDGGDKKYSIGLDIGTNSVGWAVITDEYKVPSKKFKVLGNTDRHSIKKNLIGALLFDSGETAEATRLKRTARRRYTRRKNRICYLQEIFSNEMAKVDDSFFHRLEESFLVEEDKKHERHPIFGNIVDEVAYHEKYPTIYHLRKKLVDSTDKADLRLIYLALAHMIKFRGHFLIEGDLNPDNSDVDKLFIQLVQTYNQLFEENPINASGVDAKAILSARLSKSRRLENLIAQLPGEKKNGLFGNLIALSLGLTPNFKSNFDLAEDAKLQLSKDTYDDDLDNLLAQIGDQYADLFLAAKNLSDAILLSDILRVNTEITKAPLSASMIKRYDEHHQDLTLLKALVRQQLPEKYKEIFFDQSKNGYAGYIDGGASQEEFYKFIKPILEKMDGTEELLVKLNREDLLRKQRTFDNGSIPHQIHLGELHAILRRQEDFYPFLKDNREKIEKILTFRIPYYVGPLARGNSRFAWMTRKSEETITPWNFEEVVDKGASAQSFIERMTNFDKNLPNEKVLPKHSLLYEYFTVYNELTKVKYVTEGMRKPAFLSGEQKKAIVDLLFKTNRKVTVKQLKEDYFKKIECFDSVEISGVEDRFNASLGTYHDLLKIIKDKDFLDNEENEDILEDIVLTLTLFEDREMIEERLKTYAHLFDDKVMKQLKRRRYTGWGRLSRKLINGIRDKQSGKTILDFLKSDGFANRNFMQLIHDDSLTFKEDIQKAQVSGQGDSLHEHIANLAGSPAIKKGILQTVKVVDELVKVMGRHKPENIVIEMARENQTTQKGQKNSRERMKRIEEGIKELGSQILKEHPVENTQLQNEKLYLYYLQNGRDMYVDQELDINRLSDYDVDHIVPQSFLKDDSIDNKVLTRSDKARGKSDNVPSEEVVKKMKNYWRQLLNAKLITQRKFDNLTKAERGGLSELDKAGFIKRQLVETRQITKHVAQILDSRMNTKYDENDKLIREVKVITLKSKLVSDFRKDFQFYKVREINNYHHAHDAYLNAVVGTALIKKYPKLESEFVYGDYKVYDVRKMIAKSEQEIGKATAKYFFYSNIMNFFKTEITLANGEIRKRPLIETNGETGEIVWDKGRDFATVRKVLSMPQVNIVKKTEVQTGGFSKESILPKRNSDKLIARKKDWDPKKYGGFDSPTVAYSVLVVAKVEKGKSKKLKSVKELLGITIMERSSFEKNPIDFLEAKGYKEVKKDLIIKLPKYSLFELENGRKRMLASAGELQKGNELALPSKYVNFLYLASHYEKLKGSPEDNEQKQLFVEQHKHYLDEIIEQISEFSKRVILADANLDKVLSAYNKHRDKPIREQAENIIHLFTLTNLGAPAAFKYFDTTIDRKRYTSTKEVLDATLIHQSITGLYETRIDLSQLGGDGGGSSGGGPAPGGTLNIEDEYRLHETSKGPDVPLGSTWLSDFPQAWAETGGMGLAVRQAPLIIPLKATSTPVSIKQYPMSQEARLGIKPHIQRLLDQGILVPCQSPWNTPLLPVKKPGTNDYRPVQDLREVNKRVEDIHPTVPNPYNLLSGLPPSHQWYTVLDLKDAFFCLRLHPTSQSLFAFEWRDPEMGISGQLTWTRLPQGFKNSPTLFNEALHRDLADFRIQHPDLILLQYVDDLLLAATSELDCQQGTRALLQTLGDLGYRASAKKAQICQKQVKYLGYLLKEGQRWLTEARKETVMGQPTPKTPRQLREFLGKAGFCRLFIPGFAEMAAPLYPLTKPGTLFEWGPDQQKAYQEIKQALLTAPALGLPDLTKPFELFVDEKQGYAKGVLTQKLGPWRRPVAYLSKKLDPVAAGWPPCLRMVAAIAVLTKDAGKLTMGQPLVILAPHAVEALVKQPPDRWLSNARMTHYQALLLDTDRVQFGPIVALNPATLLPLPEEGLQHDCLDILAEAHGTRPDLTDQPLPDADHTWYTDGSSFLQEGQRKAGAAVTTETEVVWAKALPAGTSAQRAELIALTQALKMAEGKKLNVYTDSRYAFATAHIHGEIYRRRGWLTSEGKEIKNKDEILALLKALFLPKRLSIIHCPGHQKGNRAEARGNRMADQAAREVATRETPETSTLLAGKRTADGSEFEKRTADGSEFESPKKKAKVE

SEQ ID NO: 2555 - protein, 2100 aa, synthetic construct
MPAAKRVKLDGGDKKYSIGLDIGTNSVGWAVITDEYKVPSKKFKVLGNTDRHSIKKNLIGALLFDSGETAEATRLKRTARRRYTRRKNRICYLQEIFSNEMAKVDDSFFHRLEESFLVEEDKKHERHPIFGNIVDEVAYHEKYPTIYHLRKKLVDSTDKADLRLIYLALAHMIKFRGHFLIEGDLNPDNSDVDKLFIQLVQTYNQLFEENPINASGVDAKAILSARLSKSRRLENLIAQLPGEKKNGLFGNLIALSLGLTPNFKSNFDLAEDAKLQLSKDTYDDDLDNLLAQIGDQYADLFLAAKNLSDAILLSDILRVNTEITKAPLSASMIKRYDEHHQDLTLLKALVRQQLPEKYKEIFFDQSKNGYAGYIDGGASQEEFYKFIKPILEKMDGTEELLVKLNREDLLRKQRTFDNGSIPHQIHLGELHAILRRQEDFYPFLKDNREKIEKILTFRIPYYVGPLARGNSRFAWMTRKSEETITPWNFEEVVDKGASAQSFIERMTNFDKNLPNEKVLPKHSLLYEYFTVYNELTKVKYVTEGMRKPAFLSGEQKKAIVDLLFKTNRKVTVKQLKEDYFKKIECFDSVEISGVEDRFNASLGTYHDLLKIIKDKDFLDNEENEDILEDIVLTLTLFEDREMIEERLKTYAHLFDDKVMKQLKRRRYTGWGRLSRKLINGIRDKQSGKTILDFLKSDGFANRNFMQLIHDDSLTFKEDIQKAQVSGQGDSLHEHIANLAGSPAIKKGILQTVKVVDELVKVMGRHKPENIVIEMARENQTTQKGQKNSRERMKRIEEGIKELGSQILKEHPVENTQLQNEKLYLYYLQNGRDMYVDQELDINRLSDYDVDHIVPQSFLKDDSIDNKVLTRSDKARGKSDNVPSEEVVKKMKNYWRQLLNAKLITQRKFDNLTKAERGGLSELDKAGFIKRQLVETRQITKHVAQILDSRMNTKYDENDKLIREVKVITLKSKLVSDFRKDFQFYKVREINNYHHAHDAYLNAVVGTALIKKYPKLESEFVYGDYKVYDVRKMIAKSEQEIGKATAKYFFYSNIMNFFKTEITLANGEIRKRPLIETNGETGEIVWDKGRDFATVRKVLSMPQVNIVKKTEVQTGGFSKESILPKRNSDKLIARKKDWDPKKYGGFDSPTVAYSVLVVAKVEKGKSKKLKSVKELLGITIMERSSFEKNPIDFLEAKGYKEVKKDLIIKLPKYSLFELENGRKRMLASAGELQKGNELALPSKYVNFLYLASHYEKLKGSPEDNEQKQLFVEQHKHYLDEIIEQISEFSKRVILADANLDKVLSAYNKHRDKPIREQAENIIHLFTLTNLGAPAAFKYFDTTIDRKRYTSTKEVLDATLIHQSITGLYETRIDLSQLGGDGGGGSGGSGGSGGSGGSGGTLNIEDEYRLHETSKGPDVPLGSTWLSDFPQAWAETGGMGLAVRQAPLIIPLKATSTPVSIKQYPMSQEARLGIKPHIQRLLDQGILVPCQSPWNTPLLPVKKPGTNDYRPVQDLREVNKRVEDIHPTVPNPYNLLSGLPPSHQWYTVLDLKDAFFCLRLHPTSQSLFAFEWRDPEMGISGQLTWTRLPQGFKNSPTLFNEALHRDLADFRIQHPDLILLQYVDDLLLAATSELDCQQGTRALLQTLGDLGYRASAKKAQICQKQVKYLGYLLKEGQRWLTEARKETVMGQPTPKTPRQLREFLGKAGFCRLFIPGFAEMAAPLYPLTKPGTLFEWGPDQQKAYQEIKQALLTAPALGLPDLTKPFELFVDEKQGYAKGVLTQKLGPWRRPVAYLSKKLDPVAAGWPPCLRMVAAIAVLTKDAGKLTMGQPLVILAPHAVEALVKQPPDRWLSNARMTHYQALLLDTDRVQFGPIVALNPATLLPLPEEGLQHDCLDILAEAHGTRPDLTDQPLPDADHTWYTDGSSFLQEGQRKAGAAVTTETEVVWAKALPAGTSAQRAELIALTQALKMAEGKKLNVYTDSRYAFATAHIHGEIYRRRGWLTSEGKEIKNKDEILALLKALFLPKRLSIIHCPGHQKGNRAEARGNRMADQAAREVATRETPETSTLLAGKRTADGSEFEKRTADGSEFESPKKKAKVE

SEQ ID NO: 2556 - protein, 2096 aa, synthetic construct
MPAAKRVKLDGGDKKYSIGLDIGTNSVGWAVITDEYKVPSKKFKVLGNTDRHSIKKNLIGALLFDSGETAEATRLKRTARRRYTRRKNRICYLQEIFSNEMAKVDDSFFHRLEESFLVEEDKKHERHPIFGNIVDEVAYHEKYPTIYHLRKKLVDSTDKADLRLIYLALAHMIKFRGHFLIEGDLNPDNSDVDKLFIQLVQTYNQLFEENPINASGVDAKAILSARLSKSRRLENLIAQLPGEKKNGLFGNLIALSLGLTPNFKSNFDLAEDAKLQLSKDTYDDDLDNLLAQIGDQYADLFLAAKNLSDAILLSDILRVNTEITKAPLSASMIKRYDEHHQDLTLLKALVRQQLPEKYKEIFFDQSKNGYAGYIDGGASQEEFYKFIKPILEKMDGTEELLVKLNREDLLRKQRTFDNGSIPHQIHLGELHAILRRQEDFYPFLKDNREKIEKILTFRIPYYVGPLARGNSRFAWMTRKSEETITPWNFEEVVDKGASAQSFIERMTNFDKNLPNEKVLPKHSLLYEYFTVYNELTKVKYVTEGMRKPAFLSGEQKKAIVDLLFKTNRKVTVKQLKEDYFKKIECFDSVEISGVEDRFNASLGTYHDLLKIIKDKDFLDNEENEDILEDIVLTLTLFEDREMIEERLKTYAHLFDDKVMKQLKRRRYTGWGRLSRKLINGIRDKQSGKTILDFLKSDGFANRNFMQLIHDDSLTFKEDIQKAQVSGQGDSLHEHIANLAGSPAIKKGILQTVKVVDELVKVMGRHKPENIVIEMARENQTTQKGQKNSRERMKRIEEGIKELGSQILKEHPVENTQLQNEKLYLYYLQNGRDMYVDQELDINRLSDYDVDHIVPQSFLKDDSIDNKVLTRSDKARGKSDNVPSEEVVKKMKNYWRQLLNAKLITQRKFDNLTKAERGGLSELDKAGFIKRQLVETRQITKHVAQILDSRMNTKYDENDKLIREVKVITLKSKLVSDFRKDFQFYKVREINNYHHAHDAYLNAVVGTALIKKYPKLESEFVYGDYKVYDVRKMIAKSEQEIGKATAKYFFYSNIMNFFKTEITLANGEIRKRPLIETNGETGEIVWDKGRDFATVRKVLSMPQVNIVKKTEVQTGGFSKESILPKRNSDKLIARKKDWDPKKYGGFDSPTVAYSVLVVAKVEKGKSKKLKSVKELLGITIMERSSFEKNPIDFLEAKGYKEVKKDLIIKLPKYSLFELENGRKRMLASAGELQKGNELALPSKYVNFLYLASHYEKLKGSPEDNEQKQLFVEQHKHYLDEIIEQISEFSKRVILADANLDKVLSAYNKHRDKPIREQAENIIHLFTLTNLGAPAAFKYFDTTIDRKRYTSTKEVLDATLIHQSITGLYETRIDLSQLGGDGGEAAAKGGGPAPGGTLNIEDEYRLHETSKGPDVPLGSTWLSDFPQAWAETGGMGLAVRQAPLIIPLKATSTPVSIKQYPMSQEARLGIKPHIQRLLDQGILVPCQSPWNTPLLPVKKPGTNDYRPVQDLREVNKRVEDIHPTVPNPYNLLSGLPPSHQWYTVLDLKDAFFCLRLHPTSQSLFAFEWRDPEMGISGQLTWTRLPQGFKNSPTLFNEALHRDLADFRIQHPDLILLQYVDDLLLAATSELDCQQGTRALLQTLGDLGYRASAKKAQICQKQVKYLGYLLKEGQRWLTEARKETVMGQPTPKTPRQLREFLGKAGFCRLFIPGFAEMAAPLYPLTKPGTLFEWGPDQQKAYQEIKQALLTAPALGLPDLTKPFELFVDEKQGYAKGVLTQKLGPWRRPVAYLSKKLDPVAAGWPPCLRMVAAIAVLTKDAGKLTMGQPLVILAPHAVEALVKQPPDRWLSNARMTHYQALLLDTDRVQFGPIVALNPATLLPLPEEGLQHDCLDILAEAHGTRPDLTDQPLPDADHTWYTDGSSFLQEGQRKAGAAVTTETEVVWAKALPAGTSAQRAELIALTQALKMAEGKKLNVYTDSRYAFATAHIHGEIYRRRGWLTSEGKEIKNKDEILALLKALFLPKRLSIIHCPGHQKGNRAEARGNRMADQAAREVATRETPETSTLLAGKRTADGSEFEKRTADGSEFESPKKKAKVE

SEQ ID NO: 2557 - protein, 2094 aa, synthetic construct
MPAAKRVKLDGGDKKYSIGLDIGTNSVGWAVITDEYKVPSKKFKVLGNTDRHSIKKNLIGALLFDSGETAEATRLKRTARRRYTRRKNRICYLQEIFSNEMAKVDDSFFHRLEESFLVEEDKKHERHPIFGNIVDEVAYHEKYPTIYHLRKKLVDSTDKADLRLIYLALAHMIKFRGHFLIEGDLNPDNSDVDKLFIQLVQTYNQLFEENPINASGVDAKAILSARLSKSRRLENLIAQLPGEKKNGLFGNLIALSLGLTPNFKSNFDLAEDAKLQLSKDTYDDDLDNLLAQIGDQYADLFLAAKNLSDAILLSDILRVNTEITKAPLSASMIKRYDEHHQDLTLLKALVRQQLPEKYKEIFFDQSKNGYAGYIDGGASQEEFYKFIKPILEKMDGTEELLVKLNREDLLRKQRTFDNGSIPHQIHLGELHAILRRQEDFYPFLKDNREKIEKILTFRIPYYVGPLARGNSRFAWMTRKSEETITPWNFEEVVDKGASAQSFIERMTNFDKNLPNEKVLPKHSLLYEYFTVYNELTKVKYVTEGMRKPAFLSGEQKKAIVDLLFKTNRKVTVKQLKEDYFKKIECFDSVEISGVEDRFNASLGTYHDLLKIIKDKDFLDNEENEDILEDIVLTLTLFEDREMIEERLKTYAHLFDDKVMKQLKRRRYTGWGRLSRKLINGIRDKQSGKTILDFLKSDGFANRNFMQLIHDDSLTFKEDIQKAQVSGQGDSLHEHIANLAGSPAIKKGILQTVKVVDELVKVMGRHKPENIVIEMARENQTTQKGQKNSRERMKRIEEGIKELGSQILKEHPVENTQLQNEKLYLYYLQNGRDMYVDQELDINRLSDYDVDHIVPQSFLKDDSIDNKVLTRSDKARGKSDNVPSEEVVKKMKNYWRQLLNAKLITQRKFDNLTKAERGGLSELDKAGFIKRQLVETRQITKHVAQILDSRMNTKYDENDKLIREVKVITLKSKLVSDFRKDFQFYKVREINNYHHAHDAYLNAVVGTALIKKYPKLESEFVYGDYKVYDVRKMIAKSEQEIGKATAKYFFYSNIMNFFKTEITLANGEIRKRPLIETNGETGEIVWDKGRDFATVRKVLSMPQVNIVKKTEVQTGGFSKESILPKRNSDKLIARKKDWDPKKYGGFDSPTVAYSVLVVAKVEKGKSKKLKSVKELLGITIMERSSFEKNPIDFLEAKGYKEVKKDLIIKLPKYSLFELENGRKRMLASAGELQKGNELALPSKYVNFLYLASHYEKLKGSPEDNEQKQLFVEQHKHYLDEIIEQISEFSKRVILADANLDKVLSAYNKHRDKPIREQAENIIHLFTLTNLGAPAAFKYFDTTIDRKRYTSTKEVLDATLIHQSITGLYETRIDLSQLGGDGGGSSGSSGSSGGTLNIEDEYRLHETSKGPDVPLGSTWLSDFPQAWAETGGMGLAVRQAPLIIPLKATSTPVSIKQYPMSQEARLGIKPHIQRLLDQGILVPCQSPWNTPLLPVKKPGTNDYRPVQDLREVNKRVEDIHPTVPNPYNLLSGLPPSHQWYTVLDLKDAFFCLRLHPTSQSLFAFEWRDPEMGISGQLTWTRLPQGFKNSPTLFNEALHRDLADFRIQHPDLILLQYVDDLLLAATSELDCQQGTRALLQTLGDLGYRASAKKAQICQKQVKYLGYLLKEGQRWLTEARKETVMGQPTPKTPRQLREFLGKAGFCRLFIPGFAEMAAPLYPLTKPGTLFEWGPDQQKAYQEIKQALLTAPALGLPDLTKPFELFVDEKQGYAKGVLTQKLGPWRRPVAYLSKKLDPVAAGWPPCLRMVAAIAVLTKDAGKLTMGQPLVILAPHAVEALVKQPPDRWLSNARMTHYQALLLDTDRVQFGPIVALNPATLLPLPEEGLQHDCLDILAEAHGTRPDLTDQPLPDADHTWYTDGSSFLQEGQRKAGAAVTTETEVVWAKALPAGTSAQRAELIALTQALKMAEGKKLNVYTDSRYAFATAHIHGEIYRRRGWLTSEGKEIKNKDEILALLKALFLPKRLSIIHCPGHQKGNRAEARGNRMADQAAREVATRETPETSTLLAGKRTADGSEFEKRTADGSEFESPKKKAKVE

SEQ ID NO: 2558 - protein, 2094 aa, synthetic construct
MPAAKRVKLDGGDKKYSIGLDIGTNSVGWAVITDEYKVPSKKFKVLGNTDRHSIKKNLIGALLFDSGETAEATRLKRTARRRYTRRKNRICYLQEIFSNEMAKVDDSFFHRLEESFLVEEDKKHERHPIFGNIVDEVAYHEKYPTIYHLRKKLVDSTDKADLRLIYLALAHMIKFRGHFLIEGDLNPDNSDVDKLFIQLVQTYNQLFEENPINASGVDAKAILSARLSKSRRLENLIAQLPGEKKNGLFGNLIALSLGLTPNFKSNFDLAEDAKLQLSKDTYDDDLDNLLAQIGDQYADLFLAAKNLSDAILLSDILRVNTEITKAPLSASMIKRYDEHHQDLTLLKALVRQQLPEKYKEIFFDQSKNGYAGYIDGGASQEEFYKFIKPILEKMDGTEELLVKLNREDLLRKQRTFDNGSIPHQIHLGELHAILRRQEDFYPFLKDNREKIEKILTFRIPYYVGPLARGNSRFAWMTRKSEETITPWNFEEVVDKGASAQSFIERMTNFDKNLPNEKVLPKHSLLYEYFTVYNELTKVKYVTEGMRKPAFLSGEQKKAIVDLLFKTNRKVTVKQLKEDYFKKIECFDSVEISGVEDRFNASLGTYHDLLKIIKDKDFLDNEENEDILEDIVLTLTLFEDREMIEERLKTYAHLFDDKVMKQLKRRRYTGWGRLSRKLINGIRDKQSGKTILDFLKSDGFANRNFMQLIHDDSLTFKEDIQKAQVSGQGDSLHEHIANLAGSPAIKKGILQTVKVVDELVKVMGRHKPENIVIEMARENQTTQKGQKNSRERMKRIEEGIKELGSQILKEHPVENTQLQNEKLYLYYLQNGRDMYVDQELDINRLSDYDVDHIVPQSFLKDDSIDNKVLTRSDKARGKSDNVPSEEVVKKMKNYWRQLLNAKLITQRKFDNLTKAERGGLSELDKAGFIKRQLVETRQITKHVAQILDSRMNTKYDENDKLIREVKVITLKSKLVSDFRKDFQFYKVREINNYHHAHDAYLNAVVGTALIKKYPKLESEFVYGDYKVYDVRKMIAKSEQEIGKATAKYFFYSNIMNFFKTEITLANGEIRKRPLIETNGETGEIVWDKGRDFATVRKVLSMPQVNIVKKTEVQTGGFSKESILPKRNSDKLIARKKDWDPKKYGGFDSPTVAYSVLVVAKVEKGKSKKLKSVKELLGITIMERSSFEKNPIDFLEAKGYKEVKKDLIIKLPKYSLFELENGRKRMLASAGELQKGNELALPSKYVNFLYLASHYEKLKGSPEDNEQKQLFVEQHKHYLDEIIEQISEFSKRVILADANLDKVLSAYNKHRDKPIREQAENIIHLFTLTNLGAPAAFKYFDTTIDRKRYTSTKEVLDATLIHQSITGLYETRIDLSQLGGDGGGGSGSSPAPGGTLNIEDEYRLHETSKGPDVPLGSTWLSDFPQAWAETGGMGLAVRQAPLIIPLKATSTPVSIKQYPMSQEARLGIKPHIQRLLDQGILVPCQSPWNTPLLPVKKPGTNDYRPVQDLREVNKRVEDIHPTVPNPYNLLSGLPPSHQWYTVLDLKDAFFCLRLHPTSQSLFAFEWRDPEMGISGQLTWTRLPQGFKNSPTLFNEALHRDLADFRIQHPDLILLQYVDDLLLAATSELDCQQGTRALLQTLGDLGYRASAKKAQICQKQVKYLGYLLKEGQRWLTEARKETVMGQPTPKTPRQLREFLGKAGFCRLFIPGFAEMAAPLYPLTKPGTLFEWGPDQQKAYQEIKQALLTAPALGLPDLTKPFELFVDEKQGYAKGVLTQKLGPWRRPVAYLSKKLDPVAAGWPPCLRMVAAIAVLTKDAGKLTMGQPLVILAPHAVEALVKQPPDRWLSNARMTHYQALLLDTDRVQFGPIVALNPATLLPLPEEGLQHDCLDILAEAHGTRPDLTDQPLPDADHTWYTDGSSFLQEGQRKAGAAVTTETEVVWAKALPAGTSAQRAELIALTQALKMAEGKKLNVYTDSRYAFATAHIHGEIYRRRGWLTSEGKEIKNKDEILALLKALFLPKRLSIIHCPGHQKGNRAEARGNRMADQAAREVATRETPETSTLLAGKRTADGSEFEKRTADGSEFESPKKKAKVE

SEQ ID NO: 2559 - protein, 2091 aa, synthetic construct
MPAAKRVKLDGGDKKYSIGLDIGTNSVGWAVITDEYKVPSKKFKVLGNTDRHSIKKNLIGALLFDSGETAEATRLKRTARRRYTRRKNRICYLQEIFSNEMAKVDDSFFHRLEESFLVEEDKKHERHPIFGNIVDEVAYHEKYPTIYHLRKKLVDSTDKADLRLIYLALAHMIKFRGHFLIEGDLNPDNSDVDKLFIQLVQTYNQLFEENPINASGVDAKAILSARLSKSRRLENLIAQLPGEKKNGLFGNLIALSLGLTPNFKSNFDLAEDAKLQLSKDTYDDDLDNLLAQIGDQYADLFLAAKNLSDAILLSDILRVNTEITKAPLSASMIKRYDEHHQDLTLLKALVRQQLPEKYKEIFFDQSKNGYAGYIDGGASQEEFYKFIKPILEKMDGTEELLVKLNREDLLRKQRTFDNGSIPHQIHLGELHAILRRQEDFYPFLKDNREKIEKILTFRIPYYVGPLARGNSRFAWMTRKSEETITPWNFEEVVDKGASAQSFIERMTNFDKNLPNEKVLPKHSLLYEYFTVYNELTKVKYVTEGMRKPAFLSGEQKKAIVDLLFKTNRKVTVKQLKEDYFKKIECFDSVEISGVEDRFNASLGTYHDLLKIIKDKDFLDNEENEDILEDIVLTLTLFEDREMIEERLKTYAHLFDDKVMKQLKRRRYTGWGRLSRKLINGIRDKQSGKTILDFLKSDGFANRNFMQLIHDDSLTFKEDIQKAQVSGQGDSLHEHIANLAGSPAIKKGILQTVKVVDELVKVMGRHKPENIVIEMARENQTTQKGQKNSRERMKRIEEGIKELGSQILKEHPVENTQLQNEKLYLYYLQNGRDMYVDQELDINRLSDYDVDHIVPQSFLKDDSIDNKVLTRSDKARGKSDNVPSEEVVKKMKNYWRQLLNAKLITQRKFDNLTKAERGGLSELDKAGFIKRQLVETRQITKHVAQILDSRMNTKYDENDKLIREVKVITLKSKLVSDFRKDFQFYKVREINNYHHAHDAYLNAVVGTALIKKYPKLESEFVYGDYKVYDVRKMIAKSEQEIGKATAKYFFYSNIMNFFKTEITLANGEIRKRPLIETNGETGEIVWDKGRDFATVRKVLSMPQVNIVKKTEVQTGGFSKESILPKRNSDKLIARKKDWDPKKYGGFDSPTVAYSVLVVAKVEKGKSKKLKSVKELLGITIMERSSFEKNPIDFLEAKGYKEVKKDLIIKLPKYSLFELENGRKRMLASAGELQKGNELALPSKYVNFLYLASHYEKLKGSPEDNEQKQLFVEQHKHYLDEIIEQISEFSKRVILADANLDKVLSAYNKHRDKPIREQAENIIHLFTLTNLGAPAAFKYFDTTIDRKRYTSTKEVLDATLIHQSITGLYETRIDLSQLGGDGGGGSGGGGGTLNIEDEYRLHETSKGPDVPLGSTWLSDFPQAWAETGGMGLAVRQAPLIIPLKATSTPVSIKQYPMSQEARLGIKPHIQRLLDQGILVPCQSPWNTPLLPVKKPGTNDYRPVQDLREVNKRVEDIHPTVPNPYNLLSGLPPSHQWYTVLDLKDAFFCLRLHPTSQSLFAFEWRDPEMGISGQLTWTRLPQGFKNSPTLFNEALHRDLADFRIQHPDLILLQYVDDLLLAATSELDCQQGTRALLQTLGDLGYRASAKKAQICQKQVKYLGYLLKEGQRWLTEARKETVMGQPTPKTPRQLREFLGKAGFCRLFIPGFAEMAAPLYPLTKPGTLFEWGPDQQKAYQEIKQALLTAPALGLPDLTKPFELFVDEKQGYAKGVLTQKLGPWRRPVAYLSKKLDPVAAGWPPCLRMVAAIAVLTKDAGKLTMGQPLVILAPHAVEALVKQPPDRWLSNARMTHYQALLLDTDRVQFGPIVALNPATLLPLPEEGLQHDCLDILAEAHGTRPDLTDQPLPDADHTWYTDGSSFLQEGQRKAGAAVTTETEVVWAKALPAGTSAQRAELIALTQALKMAEGKKLNVYTDSRYAFATAHIHGEIYRRRGWLTSEGKEIKNKDEILALLKALFLPKRLSIIHCPGHQKGNRAEARGNRMADQAAREVATRETPETSTLLAGKRTADGSEFEKRTADGSEFESPKKKAKVE

SEQ ID NO: 2560 - protein, 2092 aa, synthetic construct
MPAAKRVKLDGGDKKYSIGLDIGTNSVGWAVITDEYKVPSKKFKVLGNTDRHSIKKNLIGALLFDSGETAEATRLKRTARRRYTRRKNRICYLQEIFSNEMAKVDDSFFHRLEESFLVEEDKKHERHPIFGNIVDEVAYHEKYPTIYHLRKKLVDSTDKADLRLIYLALAHMIKFRGHFLIEGDLNPDNSDVDKLFIQLVQTYNQLFEENPINASGVDAKAILSARLSKSRRLENLIAQLPGEKKNGLFGNLIALSLGLTPNFKSNFDLAEDAKLQLSKDTYDDDLDNLLAQIGDQYADLFLAAKNLSDAILLSDILRVNTEITKAPLSASMIKRYDEHHQDLTLLKALVRQQLPEKYKEIFFDQSKNGYAGYIDGGASQEEFYKFIKPILEKMDGTEELLVKLNREDLLRKQRTFDNGSIPHQIHLGELHAILRRQEDFYPFLKDNREKIEKILTFRIPYYVGPLARGNSRFAWMTRKSEETITPWNFEEVVDKGASAQSFIERMTNFDKNLPNEKVLPKHSLLYEYFTVYNELTKVKYVTEGMRKPAFLSGEQKKAIVDLLFKTNRKVTVKQLKEDYFKKIECFDSVEISGVEDRFNASLGTYHDLLKIIKDKDFLDNEENEDILEDIVLTLTLFEDREMIEERLKTYAHLFDDKVMKQLKRRRYTGWGRLSRKLINGIRDKQSGKTILDFLKSDGFANRNFMQLIHDDSLTFKEDIQKAQVSGQGDSLHEHIANLAGSPAIKKGILQTVKVVDELVKVMGRHKPENIVIEMARENQTTQKGQKNSRERMKRIEEGIKELGSQILKEHPVENTQLQNEKLYLYYLQNGRDMYVDQELDINRLSDYDVDHIVPQSFLKDDSIDNKVLTRSDKARGKSDNVPSEEVVKKMKNYWRQLLNAKLITQRKFDNLTKAERGGLSELDKAGFIKRQLVETRQITKHVAQILDSRMNTKYDENDKLIREVKVITLKSKLVSDFRKDFQFYKVREINNYHHAHDAYLNAVVGTALIKKYPKLESEFVYGDYKVYDVRKMIAKSEQEIGKATAKYFFYSNIMNFFKTEITLANGEIRKRPLIETNGETGEIVWDKGRDFATVRKVLSMPQVNIVKKTEVQTGGFSKESILPKRNSDKLIARKKDWDPKKYGGFDSPTVAYSVLVVAKVEKGKSKKLKSVKELLGITIMERSSFEKNPIDFLEAKGYKEVKKDLIIKLPKYSLFELENGRKRMLASAGELQKGNELALPSKYVNFLYLASHYEKLKGSPEDNEQKQLFVEQHKHYLDEIIEQISEFSKRVILADANLDKVLSAYNKHRDKPIREQAENIIHLFTLTNLGAPAAFKYFDTTIDRKRYTSTKEVLDATLIHQSITGLYETRIDLSQLGGDGGGGGGGGGGGTLNIEDEYRLHETSKGPDVPLGSTWLSDFPQAWAETGGMGLAVRQAPLIIPLKATSTPVSIKQYPMSQEARLGIKPHIQRLLDQGILVPCQSPWNTPLLPVKKPGTNDYRPVQDLREVNKRVEDIHPTVPNPYNLLSGLPPSHQWYTVLDLKDAFFCLRLHPTSQSLFAFEWRDPEMGISGQLTWTRLPQGFKNSPTLFNEALHRDLADFRIQHPDLILLQYVDDLLLAATSELDCQQGTRALLQTLGDLGYRASAKKAQICQKQVKYLGYLLKEGQRWLTEARKETVMGQPTPKTPRQLREFLGKAGFCRLFIPGFAEMAAPLYPLTKPGTLFEWGPDQQKAYQEIKQALLTAPALGLPDLTKPFELFVDEKQGYAKGVLTQKLGPWRRPVAYLSKKLDPVAAGWPPCLRMVAAIAVLTKDAGKLTMGQPLVILAPHAVEALVKQPPDRWLSNARMTHYQALLLDTDRVQFGPIVALNPATLLPLPEEGLQHDCLDILAEAHGTRPDLTDQPLPDADHTWYTDGSSFLQEGQRKAGAAVTTETEVVWAKALPAGTSAQRAELIALTQALKMAEGKKLNVYTDSRYAFATAHIHGEIYRRRGWLTSEGKEIKNKDEILALLKALFLPKRLSIIHCPGHQKGNRAEARGNRMADQAAREVATRETPETSTLLAGKRTADGSEFEKRTADGSEFESPKKKAKVE

SEQ ID NO: 2561 - protein, 2100 aa, synthetic construct
MPAAKRVKLDGGDKKYSIGLDIGTNSVGWAVITDEYKVPSKKFKVLGNTDRHSIKKNLIGALLFDSGETAEATRLKRTARRRYTRRKNRICYLQEIFSNEMAKVDDSFFHRLEESFLVEEDKKHERHPIFGNIVDEVAYHEKYPTIYHLRKKLVDSTDKADLRLIYLALAHMIKFRGHFLIEGDLNPDNSDVDKLFIQLVQTYNQLFEENPINASGVDAKAILSARLSKSRRLENLIAQLPGEKKNGLFGNLIALSLGLTPNFKSNFDLAEDAKLQLSKDTYDDDLDNLLAQIGDQYADLFLAAKNLSDAILLSDILRVNTEITKAPLSASMIKRYDEHHQDLTLLKALVRQQLPEKYKEIFFDQSKNGYAGYIDGGASQEEFYKFIKPILEKMDGTEELLVKLNREDLLRKQRTFDNGSIPHQIHLGELHAILRRQEDFYPFLKDNREKIEKILTFRIPYYVGPLARGNSRFAWMTRKSEETITPWNFEEVVDKGASAQSFIERMTNFDKNLPNEKVLPKHSLLYEYFTVYNELTKVKYVTEGMRKPAFLSGEQKKAIVDLLFKTNRKVTVKQLKEDYFKKIECFDSVEISGVEDRFNASLGTYHDLLKIIKDKDFLDNEENEDILEDIVLTLTLFEDREMIEERLKTYAHLFDDKVMKQLKRRRYTGWGRLSRKLINGIRDKQSGKTILDFLKSDGFANRNFMQLIHDDSLTFKEDIQKAQVSGQGDSLHEHIANLAGSPAIKKGILQTVKVVDELVKVMGRHKPENIVIEMARENQTTQKGQKNSRERMKRIEEGIKELGSQILKEHPVENTQLQNEKLYLYYLQNGRDMYVDQELDINRLSDYDVDHIVPQSFLKDDSIDNKVLTRSDKARGKSDNVPSEEVVKKMKNYWRQLLNAKLITQRKFDNLTKAERGGLSELDKAGFIKRQLVETRQITKHVAQILDSRMNTKYDENDKLIREVKVITLKSKLVSDFRKDFQFYKVREINNYHHAHDAYLNAVVGTALIKKYPKLESEFVYGDYKVYDVRKMIAKSEQEIGKATAKYFFYSNIMNFFKTEITLANGEIRKRPLIETNGETGEIVWDKGRDFATVRKVLSMPQVNIVKKTEVQTGGFSKESILPKRNSDKLIARKKDWDPKKYGGFDSPTVAYSVLVVAKVEKGKSKKLKSVKELLGITIMERSSFEKNPIDFLEAKGYKEVKKDLIIKLPKYSLFELENGRKRMLASAGELQKGNELALPSKYVNFLYLASHYEKLKGSPEDNEQKQLFVEQHKHYLDEIIEQISEFSKRVILADANLDKVLSAYNKHRDKPIREQAENIIHLFTLTNLGAPAAFKYFDTTIDRKRYTSTKEVLDATLIHQSITGLYETRIDLSQLGGDGGEAAAKGGGGSEAAAKGGTLNIEDEYRLHETSKGPDVPLGSTWLSDFPQAWAETGGMGLAVRQAPLIIPLKATSTPVSIKQYPMSQEARLGIKPHIQRLLDQGILVPCQSPWNTPLLPVKKPGTNDYRPVQDLREVNKRVEDIHPTVPNPYNLLSGLPPSHQWYTVLDLKDAFFCLRLHPTSQSLFAFEWRDPEMGISGQLTWTRLPQGFKNSPTLFNEALHRDLADFRIQHPDLILLQYVDDLLLAATSELDCQQGTRALLQTLGDLGYRASAKKAQICQKQVKYLGYLLKEGQRWLTEARKETVMGQPTPKTPRQLREFLGKAGFCRLFIPGFAEMAAPLYPLTKPGTLFEWGPDQQKAYQEIKQALLTAPALGLPDLTKPFELFVDEKQGYAKGVLTQKLGPWRRPVAYLSKKLDPVAAGWPPCLRMVAAIAVLTKDAGKLTMGQPLVILAPHAVEALVKQPPDRWLSNARMTHYQALLLDTDRVQFGPIVALNPATLLPLPEEGLQHDCLDILAEAHGTRPDLTDQPLPDADHTWYTDGSSFLQEGQRKAGAAVTTETEVVWAKALPAGTSAQRAELIALTQALKMAEGKKLNVYTDSRYAFATAHIHGEIYRRRGWLTSEGKEIKNKDEILALLKALFLPKRLSIIHCPGHQKGNRAEARGNRMADQAAREVATRETPETSTLLAGKRTADGSEFEKRTADGSEFESPKKKAKVE

SEQ ID NO: 2562 - protein, 2091 aa, synthetic construct
MPAAKRVKLDGGDKKYSIGLDIGTNSVGWAVITDEYKVPSKKFKVLGNTDRHSIKKNLIGALLFDSGETAEATRLKRTARRRYTRRKNRICYLQEIFSNEMAKVDDSFFHRLEESFLVEEDKKHERHPIFGNIVDEVAYHEKYPTIYHLRKKLVDSTDKADLRLIYLALAHMIKFRGHFLIEGDLNPDNSDVDKLFIQLVQTYNQLFEENPINASGVDAKAILSARLSKSRRLENLIAQLPGEKKNGLFGNLIALSLGLTPNFKSNFDLAEDAKLQLSKDTYDDDLDNLLAQIGDQYADLFLAAKNLSDAILLSDILRVNTEITKAPLSASMIKRYDEHHQDLTLLKALVRQQLPEKYKEIFFDQSKNGYAGYIDGGASQEEFYKFIKPILEKMDGTEELLVKLNREDLLRKQRTFDNGSIPHQIHLGELHAILRRQEDFYPFLKDNREKIEKILTFRIPYYVGPLARGNSRFAWMTRKSEETITPWNFEEVVDKGASAQSFIERMTNFDKNLPNEKVLPKHSLLYEYFTVYNELTKVKYVTEGMRKPAFLSGEQKKAIVDLLFKTNRKVTVKQLKEDYFKKIECFDSVEISGVEDRFNASLGTYHDLLKIIKDKDFLDNEENEDILEDIVLTLTLFEDREMIEERLKTYAHLFDDKVMKQLKRRRYTGWGRLSRKLINGIRDKQSGKTILDFLKSDGFANRNFMQLIHDDSLTFKEDIQKAQVSGQGDSLHEHIANLAGSPAIKKGILQTVKVVDELVKVMGRHKPENIVIEMARENQTTQKGQKNSRERMKRIEEGIKELGSQILKEHPVENTQLQNEKLYLYYLQNGRDMYVDQELDINRLSDYDVDHIVPQSFLKDDSIDNKVLTRSDKARGKSDNVPSEEVVKKMKNYWRQLLNAKLITQRKFDNLTKAERGGLSELDKAGFIKRQLVETRQITKHVAQILDSRMNTKYDENDKLIREVKVITLKSKLVSDFRKDFQFYKVREINNYHHAHDAYLNAVVGTALIKKYPKLESEFVYGDYKVYDVRKMIAKSEQEIGKATAKYFFYSNIMNFFKTEITLANGEIRKRPLIETNGETGEIVWDKGRDFATVRKVLSMPQVNIVKKTEVQTGGFSKESILPKRNSDKLIARKKDWDPKKYGGFDSPTVAYSVLVVAKVEKGKSKKLKSVKELLGITIMERSSFEKNPIDFLEAKGYKEVKKDLIIKLPKYSLFELENGRKRMLASAGELQKGNELALPSKYVNFLYLASHYEKLKGSPEDNEQKQLFVEQHKHYLDEIIEQISEFSKRVILADANLDKVLSAYNKHRDKPIREQAENIIHLFTLTNLGAPAAFKYFDTTIDRKRYTSTKEVLDATLIHQSITGLYETRIDLSQLGGDGGGGGGGGGGTLNIEDEYRLHETSKGPDVPLGSTWLSDFPQAWAETGGMGLAVRQAPLIIPLKATSTPVSIKQYPMSQEARLGIKPHIQRLLDQGILVPCQSPWNTPLLPVKKPGTNDYRPVQDLREVNKRVEDIHPTVPNPYNLLSGLPPSHQWYTVLDLKDAFFCLRLHPTSQSLFAFEWRDPEMGISGQLTWTRLPQGFKNSPTLFNEALHRDLADFRIQHPDLILLQYVDDLLLAATSELDCQQGTRALLQTLGDLGYRASAKKAQICQKQVKYLGYLLKEGQRWLTEARKETVMGQPTPKTPRQLREFLGKAGFCRLFIPGFAEMAAPLYPLTKPGTLFEWGPDQQKAYQEIKQALLTAPALGLPDLTKPFELFVDEKQGYAKGVLTQKLGPWRRPVAYLSKKLDPVAAGWPPCLRMVAAIAVLTKDAGKLTMGQPLVILAPHAVEALVKQPPDRWLSNARMTHYQALLLDTDRVQFGPIVALNPATLLPLPEEGLQHDCLDILAEAHGTRPDLTDQPLPDADHTWYTDGSSFLQEGQRKAGAAVTTETEVVWAKALPAGTSAQRAELIALTQALKMAEGKKLNVYTDSRYAFATAHIHGEIYRRRGWLTSEGKEIKNKDEILALLKALFLPKRLSIIHCPGHQKGNRAEARGNRMADQAAREVATRETPETSTLLAGKRTADGSEFEKRTADGSEFESPKKKAKVE

SEQ ID NO: 2563 - protein, 2094 aa, synthetic construct
MPAAKRVKLDGGDKKYSIGLDIGTNSVGWAVITDEYKVPSKKFKVLGNTDRHSIKKNLIGALLFDSGETAEATRLKRTARRRYTRRKNRICYLQEIFSNEMAKVDDSFFHRLEESFLVEEDKKHERHPIFGNIVDEVAYHEKYPTIYHLRKKLVDSTDKADLRLIYLALAHMIKFRGHFLIEGDLNPDNSDVDKLFIQLVQTYNQLFEENPINASGVDAKAILSARLSKSRRLENLIAQLPGEKKNGLFGNLIALSLGLTPNFKSNFDLAEDAKLQLSKDTYDDDLDNLLAQIGDQYADLFLAAKNLSDAILLSDILRVNTEITKAPLSASMIKRYDEHHQDLTLLKALVRQQLPEKYKEIFFDQSKNGYAGYIDGGASQEEFYKFIKPILEKMDGTEELLVKLNREDLLRKQRTFDNGSIPHQIHLGELHAILRRQEDFYPFLKDNREKIEKILTFRIPYYVGPLARGNSRFAWMTRKSEETITPWNFEEVVDKGASAQSFIERMTNFDKNLPNEKVLPKHSLLYEYFTVYNELTKVKYVTEGMRKPAFLSGEQKKAIVDLLFKTNRKVTVKQLKEDYFKKIECFDSVEISGVEDRFNASLGTYHDLLKIIKDKDFLDNEENEDILEDIVLTLTLFEDREMIEERLKTYAHLFDDKVMKQLKRRRYTGWGRLSRKLINGIRDKQSGKTILDFLKSDGFANRNFMQLIHDDSLTFKEDIQKAQVSGQGDSLHEHIANLAGSPAIKKGILQTVKVVDELVKVMGRHKPENIVIEMARENQTTQKGQKNSRERMKRIEEGIKELGSQILKEHPVENTQLQNEKLYLYYLQNGRDMYVDQELDINRLSDYDVDHIVPQSFLKDDSIDNKVLTRSDKARGKSDNVPSEEVVKKMKNYWRQLLNAKLITQRKFDNLTKAERGGLSELDKAGFIKRQLVETRQITKHVAQILDSRMNTKYDENDKLIREVKVITLKSKLVSDFRKDFQFYKVREINNYHHAHDAYLNAVVGTALIKKYPKLESEFVYGDYKVYDVRKMIAKSEQEIGKATAKYFFYSNIMNFFKTEITLANGEIRKRPLIETNGETGEIVWDKGRDFATVRKVLSMPQVNIVKKTEVQTGGFSKESILPKRNSDKLIARKKDWDPKKYGGFDSPTVAYSVLVVAKVEKGKSKKLKSVKELLGITIMERSSFEKNPIDFLEAKGYKEVKKDLIIKLPKYSLFELENGRKRMLASAGELQKGNELALPSKYVNFLYLASHYEKLKGSPEDNEQKQLFVEQHKHYLDEIIEQISEFSKRVILADANLDKVLSAYNKHRDKPIREQAENIIHLFTLTNLGAPAAFKYFDTTIDRKRYTSTKEVLDATLIHQSITGLYETRIDLSQLGGDGGGGSPAPGSSGGTLNIEDEYRLHETSKGPDVPLGSTWLSDFPQAWAETGGMGLAVRQAPLIIPLKATSTPVSIKQYPMSQEARLGIKPHIQRLLDQGILVPCQSPWNTPLLPVKKPGTNDYRPVQDLREVNKRVEDIHPTVPNPYNLLSGLPPSHQWYTVLDLKDAFFCLRLHPTSQSLFAFEWRDPEMGISGQLTWTRLPQGFKNSPTLFNEALHRDLADFRIQHPDLILLQYVDDLLLAATSELDCQQGTRALLQTLGDLGYRASAKKAQICQKQVKYLGYLLKEGQRWLTEARKETVMGQPTPKTPRQLREFLGKAGFCRLFIPGFAEMAAPLYPLTKPGTLFEWGPDQQKAYQEIKQALLTAPALGLPDLTKPFELFVDEKQGYAKGVLTQKLGPWRRPVAYLSKKLDPVAAGWPPCLRMVAAIAVLTKDAGKLTMGQPLVILAPHAVEALVKQPPDRWLSNARMTHYQALLLDTDRVQFGPIVALNPATLLPLPEEGLQHDCLDILAEAHGTRPDLTDQPLPDADHTWYTDGSSFLQEGQRKAGAAVTTETEVVWAKALPAGTSAQRAELIALTQALKMAEGKKLNVYTDSRYAFATAHIHGEIYRRRGWLTSEGKEIKNKDEILALLKALFLPKRLSIIHCPGHQKGNRAEARGNRMADQAAREVATRETPETSTLLAGKRTADGSEFEKRTADGSEFESPKKKAKVE

SEQ ID NO: 2564 - protein, 2096 aa, synthetic construct
MPAAKRVKLDGGDKKYSIGLDIGTNSVGWAVITDEYKVPSKKFKVLGNTDRHSIKKNLIGALLFDSGETAEATRLKRTARRRYTRRKNRICYLQEIFSNEMAKVDDSFFHRLEESFLVEEDKKHERHPIFGNIVDEVAYHEKYPTIYHLRKKLVDSTDKADLRLIYLALAHMIKFRGHFLIEGDLNPDNSDVDKLFIQLVQTYNQLFEENPINASGVDAKAILSARLSKSRRLENLIAQLPGEKKNGLFGNLIALSLGLTPNFKSNFDLAEDAKLQLSKDTYDDDLDNLLAQIGDQYADLFLAAKNLSDAILLSDILRVNTEITKAPLSASMIKRYDEHHQDLTLLKALVRQQLPEKYKEIFFDQSKNGYAGYIDGGASQEEFYKFIKPILEKMDGTEELLVKLNREDLLRKQRTFDNGSIPHQIHLGELHAILRRQEDFYPFLKDNREKIEKILTFRIPYYVGPLARGNSRFAWMTRKSEETITPWNFEEVVDKGASAQSFIERMTNFDKNLPNEKVLPKHSLLYEYFTVYNELTKVKYVTEGMRKPAFLSGEQKKAIVDLLFKTNRKVTVKQLKEDYFKKIECFDSVEISGVEDRFNASLGTYHDLLKIIKDKDFLDNEENEDILEDIVLTLTLFEDREMIEERLKTYAHLFDDKVMKQLKRRRYTGWGRLSRKLINGIRDKQSGKTILDFLKSDGFANRNFMQLIHDDSLTFKEDIQKAQVSGQGDSLHEHIANLAGSPAIKKGILQTVKVVDELVKVMGRHKPENIVIEMARENQTTQKGQKNSRERMKRIEEGIKELGSQILKEHPVENTQLQNEKLYLYYLQNGRDMYVDQELDINRLSDYDVDHIVPQSFLKDDSIDNKVLTRSDKARGKSDNVPSEEVVKKMKNYWRQLLNAKLITQRKFDNLTKAERGGLSELDKAGFIKRQLVETRQITKHVAQILDSRMNTKYDENDKLIREVKVITLKSKLVSDFRKDFQFYKVREINNYHHAHDAYLNAVVGTALIKKYPKLESEFVYGDYKVYDVRKMIAKSEQEIGKATAKYFFYSNIMNFFKTEITLANGEIRKRPLIETNGETGEIVWDKGRDFATVRKVLSMPQVNIVKKTEVQTGGFSKESILPKRNSDKLIARKKDWDPKKYGGFDSPTVAYSVLVVAKVEKGKSKKLKSVKELLGITIMERSSFEKNPIDFLEAKGYKEVKKDLIIKLPKYSLFELENGRKRMLASAGELQKGNELALPSKYVNFLYLASHYEKLKGSPEDNEQKQLFVEQHKHYLDEIIEQISEFSKRVILADANLDKVLSAYNKHRDKPIREQAENIIHLFTLTNLGAPAAFKYFDTTIDRKRYTSTKEVLDATLIHQSITGLYETRIDLSQLGGDGGPAPGGSEAAAKGGTLNIEDEYRLHETSKGPDVPLGSTWLSDFPQAWAETGGMGLAVRQAPLIIPLKATSTPVSIKQYPMSQEARLGIKPHIQRLLDQGILVPCQSPWNTPLLPVKKPGTNDYRPVQDLREVNKRVEDIHPTVPNPYNLLSGLPPSHQWYTVLDLKDAFFCLRLHPTSQSLFAFEWRDPEMGISGQLTWTRLPQGFKNSPTLFNEALHRDLADFRIQHPDLILLQYVDDLLLAATSELDCQQGTRALLQTLGDLGYRASAKKAQICQKQVKYLGYLLKEGQRWLTEARKETVMGQPTPKTPRQLREFLGKAGFCRLFIPGFAEMAAPLYPLTKPGTLFEWGPDQQKAYQEIKQALLTAPALGLPDLTKPFELFVDEKQGYAKGVLTQKLGPWRRPVAYLSKKLDPVAAGWPPCLRMVAAIAVLTKDAGKLTMGQPLVILAPHAVEALVKQPPDRWLSNARMTHYQALLLDTDRVQFGPIVALNPATLLPLPEEGLQHDCLDILAEAHGTRPDLTDQPLPDADHTWYTDGSSFLQEGQRKAGAAVTTETEVVWAKALPAGTSAQRAELIALTQALKMAEGKKLNVYTDSRYAFATAHIHGEIYRRRGWLTSEGKEIKNKDEILALLKALFLPKRLSIIHCPGHQKGNRAEARGNRMADQAAREVATRETPETSTLLAGKRTADGSEFEKRTADGSEFESPKKKAKVE

SEQ ID NO: 2565 - protein, 2094 aa, synthetic construct
MPAAKRVKLDGGDKKYSIGLDIGTNSVGWAVITDEYKVPSKKFKVLGNTDRHSIKKNLIGALLFDSGETAEATRLKRTARRRYTRRKNRICYLQEIFSNEMAKVDDSFFHRLEESFLVEEDKKHERHPIFGNIVDEVAYHEKYPTIYHLRKKLVDSTDKADLRLIYLALAHMIKFRGHFLIEGDLNPDNSDVDKLFIQLVQTYNQLFEENPINASGVDAKAILSARLSKSRRLENLIAQLPGEKKNGLFGNLIALSLGLTPNFKSNFDLAEDAKLQLSKDTYDDDLDNLLAQIGDQYADLFLAAKNLSDAILLSDILRVNTEITKAPLSASMIKRYDEHHQDLTLLKALVRQQLPEKYKEIFFDQSKNGYAGYIDGGASQEEFYKFIKPILEKMDGTEELLVKLNREDLLRKQRTFDNGSIPHQIHLGELHAILRRQEDFYPFLKDNREKIEKILTFRIPYYVGPLARGNSRFAWMTRKSEETITPWNFEEVVDKGASAQSFIERMTNFDKNLPNEKVLPKHSLLYEYFTVYNELTKVKYVTEGMRKPAFLSGEQKKAIVDLLFKTNRKVTVKQLKEDYFKKIECFDSVEISGVEDRFNASLGTYHDLLKIIKDKDFLDNEENEDILEDIVLTLTLFEDREMIEERLKTYAHLFDDKVMKQLKRRRYTGWGRLSRKLINGIRDKQSGKTILDFLKSDGFANRNFMQLIHDDSLTFKEDIQKAQVSGQGDSLHEHIANLAGSPAIKKGILQTVKVVDELVKVMGRHKPENIVIEMARENQTTQKGQKNSRERMKRIEEGIKELGSQILKEHPVENTQLQNEKLYLYYLQNGRDMYVDQELDINRLSDYDVDHIVPQSFLKDDSIDNKVLTRSDKARGKSDNVPSEEVVKKMKNYWRQLLNAKLITQRKFDNLTKAERGGLSELDKAGFIKRQLVETRQITKHVAQILDSRMNTKYDENDKLIREVKVITLKSKLVSDFRKDFQFYKVREINNYHHAHDAYLNAVVGTALIKKYPKLESEFVYGDYKVYDVRKMIAKSEQEIGKATAKYFFYSNIMNFFKTEITLANGEIRKRPLIETNGETGEIVWDKGRDFATVRKVLSMPQVNIVKKTEVQTGGFSKESILPKRNSDKLIARKKDWDPKKYGGFDSPTVAYSVLVVAKVEKGKSKKLKSVKELLGITIMERSSFEKNPIDFLEAKGYKEVKKDLIIKLPKYSLFELENGRKRMLASAGELQKGNELALPSKYVNFLYLASHYEKLKGSPEDNEQKQLFVEQHKHYLDEIIEQISEFSKRVILADANLDKVLSAYNKHRDKPIREQAENIIHLFTLTNLGAPAAFKYFDTTIDRKRYTSTKEVLDATLIHQSITGLYETRIDLSQLGGDGGGSSGGGGGSGGTLNIEDEYRLHETSKGPDVPLGSTWLSDFPQAWAETGGMGLAVRQAPLIIPLKATSTPVSIKQYPMSQEARLGIKPHIQRLLDQGILVPCQSPWNTPLLPVKKPGTNDYRPVQDLREVNKRVEDIHPTVPNPYNLLSGLPPSHQWYTVLDLKDAFFCLRLHPTSQSLFAFEWRDPEMGISGQLTWTRLPQGFKNSPTLFNEALHRDLADFRIQHPDLILLQYVDDLLLAATSELDCQQGTRALLQTLGDLGYRASAKKAQICQKQVKYLGYLLKEGQRWLTEARKETVMGQPTPKTPRQLREFLGKAGFCRLFIPGFAEMAAPLYPLTKPGTLFEWGPDQQKAYQEIKQALLTAPALGLPDLTKPFELFVDEKQGYAKGVLTQKLGPWRRPVAYLSKKLDPVAAGWPPCLRMVAAIAVLTKDAGKLTMGQPLVILAPHAVEALVKQPPDRWLSNARMTHYQALLLDTDRVQFGPIVALNPATLLPLPEEGLQHDCLDILAEAHGTRPDLTDQPLPDADHTWYTDGSSFLQEGQRKAGAAVTTETEVVWAKALPAGTSAQRAELIALTQALKMAEGKKLNVYTDSRYAFATAHIHGEIYRRRGWLTSEGKEIKNKDEILALLKALFLPKRLSIIHCPGHQKGNRAEARGNRMADQAAREVATRETPETSTLLAGKRTADGSEFEKRTADGSEFESPKKKAKVE

SEQ ID NO: 2566 - protein, 2115 aa, synthetic construct
MPAAKRVKLDGGDKKYSIGLDIGTNSVGWAVITDEYKVPSKKFKVLGNTDRHSIKKNLIGALLFDSGETAEATRLKRTARRRYTRRKNRICYLQEIFSNEMAKVDDSFFHRLEESFLVEEDKKHERHPIFGNIVDEVAYHEKYPTIYHLRKKLVDSTDKADLRLIYLALAHMIKFRGHFLIEGDLNPDNSDVDKLFIQLVQTYNQLFEENPINASGVDAKAILSARLSKSRRLENLIAQLPGEKKNGLFGNLIALSLGLTPNFKSNFDLAEDAKLQLSKDTYDDDLDNLLAQIGDQYADLFLAAKNLSDAILLSDILRVNTEITKAPLSASMIKRYDEHHQDLTLLKALVRQQLPEKYKEIFFDQSKNGYAGYIDGGASQEEFYKFIKPILEKMDGTEELLVKLNREDLLRKQRTFDNGSIPHQIHLGELHAILRRQEDFYPFLKDNREKIEKILTFRIPYYVGPLARGNSRFAWMTRKSEETITPWNFEEVVDKGASAQSFIERMTNFDKNLPNEKVLPKHSLLYEYFTVYNELTKVKYVTEGMRKPAFLSGEQKKAIVDLLFKTNRKVTVKQLKEDYFKKIECFDSVEISGVEDRFNASLGTYHDLLKIIKDKDFLDNEENEDILEDIVLTLTLFEDREMIEERLKTYAHLFDDKVMKQLKRRRYTGWGRLSRKLINGIRDKQSGKTILDFLKSDGFANRNFMQLIHDDSLTFKEDIQKAQVSGQGDSLHEHIANLAGSPAIKKGILQTVKVVDELVKVMGRHKPENIVIEMARENQTTQKGQKNSRERMKRIEEGIKELGSQILKEHPVENTQLQNEKLYLYYLQNGRDMYVDQELDINRLSDYDVDHIVPQSFLKDDSIDNKVLTRSDKARGKSDNVPSEEVVKKMKNYWRQLLNAKLITQRKFDNLTKAERGGLSELDKAGFIKRQLVETRQITKHVAQILDSRMNTKYDENDKLIREVKVITLKSKLVSDFRKDFQFYKVREINNYHHAHDAYLNAVVGTALIKKYPKLESEFVYGDYKVYDVRKMIAKSEQEIGKATAKYFFYSNIMNFFKTEITLANGEIRKRPLIETNGETGEIVWDKGRDFATVRKVLSMPQVNIVKKTEVQTGGFSKESILPKRNSDKLIARKKDWDPKKYGGFDSPTVAYSVLVVAKVEKGKSKKLKSVKELLGITIMERSSFEKNPIDFLEAKGYKEVKKDLIIKLPKYSLFELENGRKRMLASAGELQKGNELALPSKYVNFLYLASHYEKLKGSPEDNEQKQLFVEQHKHYLDEIIEQISEFSKRVILADANLDKVLSAYNKHRDKPIREQAENIIHLFTLTNLGAPAAFKYFDTTIDRKRYTSTKEVLDATLIHQSITGLYETRIDLSQLGGDGGGGGGSGGGGSGGGGSGGGGSGGGGSGGGGSGGTLNIEDEYRLHETSKGPDVPLGSTWLSDFPQAWAETGGMGLAVRQAPLIIPLKATSTPVSIKQYPMSQEARLGIKPHIQRLLDQGILVPCQSPWNTPLLPVKKPGTNDYRPVQDLREVNKRVEDIHPTVPNPYNLLSGLPPSHQWYTVLDLKDAFFCLRLHPTSQSLFAFEWRDPEMGISGQLTWTRLPQGFKNSPTLFNEALHRDLADFRIQHPDLILLQYVDDLLLAATSELDCQQGTRALLQTLGDLGYRASAKKAQICQKQVKYLGYLLKEGQRWLTEARKETVMGQPTPKTPRQLREFLGKAGFCRLFIPGFAEMAAPLYPLTKPGTLFEWGPDQQKAYQEIKQALLTAPALGLPDLTKPFELFVDEKQGYAKGVLTQKLGPWRRPVAYLSKKLDPVAAGWPPCLRMVAAIAVLTKDAGKLTMGQPLVILAPHAVEALVKQPPDRWLSNARMTHYQALLLDTDRVQFGPIVALNPATLLPLPEEGLQHDCLDILAEAHGTRPDLTDQPLPDADHTWYTDGSSFLQEGQRKAGAAVTTETEVVWAKALPAGTSAQRAELIALTQALKMAEGKKLNVYTDSRYAFATAHIHGEIYRRRGWLTSEGKEIKNKDEILALLKALFLPKRLSIIHCPGHQKGNRAEARGNRMADQAAREVATRETPETSTLLAGKRTADGSEFEKRTADGSEFESPKKKAKVE

SEQ ID NO: 2567 - protein, 2094 aa, synthetic construct
MPAAKRVKLDGGDKKYSIGLDIGTNSVGWAVITDEYKVPSKKFKVLGNTDRHSIKKNLIGALLFDSGETAEATRLKRTARRRYTRRKNRICYLQEIFSNEMAKVDDSFFHRLEESFLVEEDKKHERHPIFGNIVDEVAYHEKYPTIYHLRKKLVDSTDKADLRLIYLALAHMIKFRGHFLIEGDLNPDNSDVDKLFIQLVQTYNQLFEENPINASGVDAKAILSARLSKSRRLENLIAQLPGEKKNGLFGNLIALSLGLTPNFKSNFDLAEDAKLQLSKDTYDDDLDNLLAQIGDQYADLFLAAKNLSDAILLSDILRVNTEITKAPLSASMIKRYDEHHQDLTLLKALVRQQLPEKYKEIFFDQSKNGYAGYIDGGASQEEFYKFIKPILEKMDGTEELLVKLNREDLLRKQRTFDNGSIPHQIHLGELHAILRRQEDFYPFLKDNREKIEKILTFRIPYYVGPLARGNSRFAWMTRKSEETITPWNFEEVVDKGASAQSFIERMTNFDKNLPNEKVLPKHSLLYEYFTVYNELTKVKYVTEGMRKPAFLSGEQKKAIVDLLFKTNRKVTVKQLKEDYFKKIECFDSVEISGVEDRFNASLGTYHDLLKIIKDKDFLDNEENEDILEDIVLTLTLFEDREMIEERLKTYAHLFDDKVMKQLKRRRYTGWGRLSRKLINGIRDKQSGKTILDFLKSDGFANRNFMQLIHDDSLTFKEDIQKAQVSGQGDSLHEHIANLAGSPAIKKGILQTVKVVDELVKVMGRHKPENIVIEMARENQTTQKGQKNSRERMKRIEEGIKELGSQILKEHPVENTQLQNEKLYLYYLQNGRDMYVDQELDINRLSDYDVDHIVPQSFLKDDSIDNKVLTRSDKARGKSDNVPSEEVVKKMKNYWRQLLNAKLITQRKFDNLTKAERGGLSELDKAGFIKRQLVETRQITKHVAQILDSRMNTKYDENDKLIREVKVITLKSKLVSDFRKDFQFYKVREINNYHHAHDAYLNAVVGTALIKKYPKLESEFVYGDYKVYDVRKMIAKSEQEIGKATAKYFFYSNIMNFFKTEITLANGEIRKRPLIETNGETGEIVWDKGRDFATVRKVLSMPQVNIVKKTEVQTGGFSKESILPKRNSDKLIARKKDWDPKKYGGFDSPTVAYSVLVVAKVEKGKSKKLKSVKELLGITIMERSSFEKNPIDFLEAKGYKEVKKDLIIKLPKYSLFELENGRKRMLASAGELQKGNELALPSKYVNFLYLASHYEKLKGSPEDNEQKQLFVEQHKHYLDEIIEQISEFSKRVILADANLDKVLSAYNKHRDKPIREQAENIIHLFTLTNLGAPAAFKYFDTTIDRKRYTSTKEVLDATLIHQSITGLYETRIDLSQLGGDGGGSSGGSGGGGGTLNIEDEYRLHETSKGPDVPLGSTWLSDFPQAWAETGGMGLAVRQAPLIIPLKATSTPVSIKQYPMSQEARLGIKPHIQRLLDQGILVPCQSPWNTPLLPVKKPGTNDYRPVQDLREVNKRVEDIHPTVPNPYNLLSGLPPSHQWYTVLDLKDAFFCLRLHPTSQSLFAFEWRDPEMGISGQLTWTRLPQGFKNSPTLFNEALHRDLADFRIQHPDLILLQYVDDLLLAATSELDCQQGTRALLQTLGDLGYRASAKKAQICQKQVKYLGYLLKEGQRWLTEARKETVMGQPTPKTPRQLREFLGKAGFCRLFIPGFAEMAAPLYPLTKPGTLFEWGPDQQKAYQEIKQALLTAPALGLPDLTKPFELFVDEKQGYAKGVLTQKLGPWRRPVAYLSKKLDPVAAGWPPCLRMVAAIAVLTKDAGKLTMGQPLVILAPHAVEALVKQPPDRWLSNARMTHYQALLLDTDRVQFGPIVALNPATLLPLPEEGLQHDCLDILAEAHGTRPDLTDQPLPDADHTWYTDGSSFLQEGQRKAGAAVTTETEVVWAKALPAGTSAQRAELIALTQALKMAEGKKLNVYTDSRYAFATAHIHGEIYRRRGWLTSEGKEIKNKDEILALLKALFLPKRLSIIHCPGHQKGNRAEARGNRMADQAAREVATRETPETSTLLAGKRTADGSEFEKRTADGSEFESPKKKAKVE

SEQ ID NO: 2568 - protein, 2090 aa, synthetic construct
MPAAKRVKLDGGDKKYSIGLDIGTNSVGWAVITDEYKVPSKKFKVLGNTDRHSIKKNLIGALLFDSGETAEATRLKRTARRRYTRRKNRICYLQEIFSNEMAKVDDSFFHRLEESFLVEEDKKHERHPIFGNIVDEVAYHEKYPTIYHLRKKLVDSTDKADLRLIYLALAHMIKFRGHFLIEGDLNPDNSDVDKLFIQLVQTYNQLFEENPINASGVDAKAILSARLSKSRRLENLIAQLPGEKKNGLFGNLIALSLGLTPNFKSNFDLAEDAKLQLSKDTYDDDLDNLLAQIGDQYADLFLAAKNLSDAILLSDILRVNTEITKAPLSASMIKRYDEHHQDLTLLKALVRQQLPEKYKEIFFDQSKNGYAGYIDGGASQEEFYKFIKPILEKMDGTEELLVKLNREDLLRKQRTFDNGSIPHQIHLGELHAILRRQEDFYPFLKDNREKIEKILTFRIPYYVGPLARGNSRFAWMTRKSEETITPWNFEEVVDKGASAQSFIERMTNFDKNLPNEKVLPKHSLLYEYFTVYNELTKVKYVTEGMRKPAFLSGEQKKAIVDLLFKTNRKVTVKQLKEDYFKKIECFDSVEISGVEDRFNASLGTYHDLLKIIKDKDFLDNEENEDILEDIVLTLTLFEDREMIEERLKTYAHLFDDKVMKQLKRRRYTGWGRLSRKLINGIRDKQSGKTILDFLKSDGFANRNFMQLIHDDSLTFKEDIQKAQVSGQGDSLHEHIANLAGSPAIKKGILQTVKVVDELVKVMGRHKPENIVIEMARENQTTQKGQKNSRERMKRIEEGIKELGSQILKEHPVENTQLQNEKLYLYYLQNGRDMYVDQELDINRLSDYDVDHIVPQSFLKDDSIDNKVLTRSDKARGKSDNVPSEEVVKKMKNYWRQLLNAKLITQRKFDNLTKAERGGLSELDKAGFIKRQLVETRQITKHVAQILDSRMNTKYDENDKLIREVKVITLKSKLVSDFRKDFQFYKVREINNYHHAHDAYLNAVVGTALIKKYPKLESEFVYGDYKVYDVRKMIAKSEQEIGKATAKYFFYSNIMNFFKTEITLANGEIRKRPLIETNGETGEIVWDKGRDFATVRKVLSMPQVNIVKKTEVQTGGFSKESILPKRNSDKLIARKKDWDPKKYGGFDSPTVAYSVLVVAKVEKGKSKKLKSVKELLGITIMERSSFEKNPIDFLEAKGYKEVKKDLIIKLPKYSLFELENGRKRMLASAGELQKGNELALPSKYVNFLYLASHYEKLKGSPEDNEQKQLFVEQHKHYLDEIIEQISEFSKRVILADANLDKVLSAYNKHRDKPIREQAENIIHLFTLTNLGAPAAFKYFDTTIDRKRYTSTKEVLDATLIHQSITGLYETRIDLSQLGGDGGPAPAPGGTLNIEDEYRLHETSKGPDVPLGSTWLSDFPQAWAETGGMGLAVRQAPLIIPLKATSTPVSIKQYPMSQEARLGIKPHIQRLLDQGILVPCQSPWNTPLLPVKKPGTNDYRPVQDLREVNKRVEDIHPTVPNPYNLLSGLPPSHQWYTVLDLKDAFFCLRLHPTSQSLFAFEWRDPEMGISGQLTWTRLPQGFKNSPTLFNEALHRDLADFRIQHPDLILLQYVDDLLLAATSELDCQQGTRALLQTLGDLGYRASAKKAQICQKQVKYLGYLLKEGQRWLTEARKETVMGQPTPKTPRQLREFLGKAGFCRLFIPGFAEMAAPLYPLTKPGTLFEWGPDQQKAYQEIKQALLTAPALGLPDLTKPFELFVDEKQGYAKGVLTQKLGPWRRPVAYLSKKLDPVAAGWPPCLRMVAAIAVLTKDAGKLTMGQPLVILAPHAVEALVKQPPDRWLSNARMTHYQALLLDTDRVQFGPIVALNPATLLPLPEEGLQHDCLDILAEAHGTRPDLTDQPLPDADHTWYTDGSSFLQEGQRKAGAAVTTETEVVWAKALPAGTSAQRAELIALTQALKMAEGKKLNVYTDSRYAFATAHIHGEIYRRRGWLTSEGKEIKNKDEILALLKALFLPKRLSIIHCPGHQKGNRAEARGNRMADQAAREVATRETPETSTLLAGKRTADGSEFEKRTADGSEFESPKKKAKVE

SEQ ID NO: 2569 - protein, 2095 aa, synthetic construct
MPAAKRVKLDGGDKKYSIGLDIGTNSVGWAVITDEYKVPSKKFKVLGNTDRHSIKKNLIGALLFDSGETAEATRLKRTARRRYTRRKNRICYLQEIFSNEMAKVDDSFFHRLEESFLVEEDKKHERHPIFGNIVDEVAYHEKYPTIYHLRKKLVDSTDKADLRLIYLALAHMIKFRGHFLIEGDLNPDNSDVDKLFIQLVQTYNQLFEENPINASGVDAKAILSARLSKSRRLENLIAQLPGEKKNGLFGNLIALSLGLTPNFKSNFDLAEDAKLQLSKDTYDDDLDNLLAQIGDQYADLFLAAKNLSDAILLSDILRVNTEITKAPLSASMIKRYDEHHQDLTLLKALVRQQLPEKYKEIFFDQSKNGYAGYIDGGASQEEFYKFIKPILEKMDGTEELLVKLNREDLLRKQRTFDNGSIPHQIHLGELHAILRRQEDFYPFLKDNREKIEKILTFRIPYYVGPLARGNSRFAWMTRKSEETITPWNFEEVVDKGASAQSFIERMTNFDKNLPNEKVLPKHSLLYEYFTVYNELTKVKYVTEGMRKPAFLSGEQKKAIVDLLFKTNRKVTVKQLKEDYFKKIECFDSVEISGVEDRFNASLGTYHDLLKIIKDKDFLDNEENEDILEDIVLTLTLFEDREMIEERLKTYAHLFDDKVMKQLKRRRYTGWGRLSRKLINGIRDKQSGKTILDFLKSDGFANRNFMQLIHDDSLTFKEDIQKAQVSGQGDSLHEHIANLAGSPAIKKGILQTVKVVDELVKVMGRHKPENIVIEMARENQTTQKGQKNSRERMKRIEEGIKELGSQILKEHPVENTQLQNEKLYLYYLQNGRDMYVDQELDINRLSDYDVDHIVPQSFLKDDSIDNKVLTRSDKARGKSDNVPSEEVVKKMKNYWRQLLNAKLITQRKFDNLTKAERGGLSELDKAGFIKRQLVETRQITKHVAQILDSRMNTKYDENDKLIREVKVITLKSKLVSDFRKDFQFYKVREINNYHHAHDAYLNAVVGTALIKKYPKLESEFVYGDYKVYDVRKMIAKSEQEIGKATAKYFFYSNIMNFFKTEITLANGEIRKRPLIETNGETGEIVWDKGRDFATVRKVLSMPQVNIVKKTEVQTGGFSKESILPKRNSDKLIARKKDWDPKKYGGFDSPTVAYSVLVVAKVEKGKSKKLKSVKELLGITIMERSSFEKNPIDFLEAKGYKEVKKDLIIKLPKYSLFELENGRKRMLASAGELQKGNELALPSKYVNFLYLASHYEKLKGSPEDNEQKQLFVEQHKHYLDEIIEQISEFSKRVILADANLDKVLSAYNKHRDKPIREQAENIIHLFTLTNLGAPAAFKYFDTTIDRKRYTSTKEVLDATLIHQSITGLYETRIDLSQLGGDGGEAAAKEAAAKGGTLNIEDEYRLHETSKGPDVPLGSTWLSDFPQAWAETGGMGLAVRQAPLIIPLKATSTPVSIKQYPMSQEARLGIKPHIQRLLDQGILVPCQSPWNTPLLPVKKPGTNDYRPVQDLREVNKRVEDIHPTVPNPYNLLSGLPPSHQWYTVLDLKDAFFCLRLHPTSQSLFAFEWRDPEMGISGQLTWTRLPQGFKNSPTLFNEALHRDLADFRIQHPDLILLQYVDDLLLAATSELDCQQGTRALLQTLGDLGYRASAKKAQICQKQVKYLGYLLKEGQRWLTEARKETVMGQPTPKTPRQLREFLGKAGFCRLFIPGFAEMAAPLYPLTKPGTLFEWGPDQQKAYQEIKQALLTAPALGLPDLTKPFELFVDEKQGYAKGVLTQKLGPWRRPVAYLSKKLDPVAAGWPPCLRMVAAIAVLTKDAGKLTMGQPLVILAPHAVEALVKQPPDRWLSNARMTHYQALLLDTDRVQFGPIVALNPATLLPLPEEGLQHDCLDILAEAHGTRPDLTDQPLPDADHTWYTDGSSFLQEGQRKAGAAVTTETEVVWAKALPAGTSAQRAELIALTQALKMAEGKKLNVYTDSRYAFATAHIHGEIYRRRGWLTSEGKEIKNKDEILALLKALFLPKRLSIIHCPGHQKGNRAEARGNRMADQAAREVATRETPETSTLLAGKRTADGSEFEKRTADGSEFESPKKKAKVE

SEQ ID NO: 2570 - protein, 2096 aa, synthetic construct
MPAAKRVKLDGGDKKYSIGLDIGTNSVGWAVITDEYKVPSKKFKVLGNTDRHSIKKNLIGALLFDSGETAEATRLKRTARRRYTRRKNRICYLQEIFSNEMAKVDDSFFHRLEESFLVEEDKKHERHPIFGNIVDEVAYHEKYPTIYHLRKKLVDSTDKADLRLIYLALAHMIKFRGHFLIEGDLNPDNSDVDKLFIQLVQTYNQLFEENPINASGVDAKAILSARLSKSRRLENLIAQLPGEKKNGLFGNLIALSLGLTPNFKSNFDLAEDAKLQLSKDTYDDDLDNLLAQIGDQYADLFLAAKNLSDAILLSDILRVNTEITKAPLSASMIKRYDEHHQDLTLLKALVRQQLPEKYKEIFFDQSKNGYAGYIDGGASQEEFYKFIKPILEKMDGTEELLVKLNREDLLRKQRTFDNGSIPHQIHLGELHAILRRQEDFYPFLKDNREKIEKILTFRIPYYVGPLARGNSRFAWMTRKSEETITPWNFEEVVDKGASAQSFIERMTNFDKNLPNEKVLPKHSLLYEYFTVYNELTKVKYVTEGMRKPAFLSGEQKKAIVDLLFKTNRKVTVKQLKEDYFKKIECFDSVEISGVEDRFNASLGTYHDLLKIIKDKDFLDNEENEDILEDIVLTLTLFEDREMIEERLKTYAHLFDDKVMKQLKRRRYTGWGRLSRKLINGIRDKQSGKTILDFLKSDGFANRNFMQLIHDDSLTFKEDIQKAQVSGQGDSLHEHIANLAGSPAIKKGILQTVKVVDELVKVMGRHKPENIVIEMARENQTTQKGQKNSRERMKRIEEGIKELGSQILKEHPVENTQLQNEKLYLYYLQNGRDMYVDQELDINRLSDYDVDHIVPQSFLKDDSIDNKVLTRSDKARGKSDNVPSEEVVKKMKNYWRQLLNAKLITQRKFDNLTKAERGGLSELDKAGFIKRQLVETRQITKHVAQILDSRMNTKYDENDKLIREVKVITLKSKLVSDFRKDFQFYKVREINNYHHAHDAYLNAVVGTALIKKYPKLESEFVYGDYKVYDVRKMIAKSEQEIGKATAKYFFYSNIMNFFKTEITLANGEIRKRPLIETNGETGEIVWDKGRDFATVRKVLSMPQVNIVKKTEVQTGGFSKESILPKRNSDKLIARKKDWDPKKYGGFDSPTVAYSVLVVAKVEKGKSKKLKSVKELLGITIMERSSFEKNPIDFLEAKGYKEVKKDLIIKLPKYSLFELENGRKRMLASAGELQKGNELALPSKYVNFLYLASHYEKLKGSPEDNEQKQLFVEQHKHYLDEIIEQISEFSKRVILADANLDKVLSAYNKHRDKPIREQAENIIHLFTLTNLGAPAAFKYFDTTIDRKRYTSTKEVLDATLIHQSITGLYETRIDLSQLGGDGGGSSGGSEAAAKGGTLNIEDEYRLHETSKGPDVPLGSTWLSDFPQAWAETGGMGLAVRQAPLIIPLKATSTPVSIKQYPMSQEARLGIKPHIQRLLDQGILVPCQSPWNTPLLPVKKPGTNDYRPVQDLREVNKRVEDIHPTVPNPYNLLSGLPPSHQWYTVLDLKDAFFCLRLHPTSQSLFAFEWRDPEMGISGQLTWTRLPQGFKNSPTLFNEALHRDLADFRIQHPDLILLQYVDDLLLAATSELDCQQGTRALLQTLGDLGYRASAKKAQICQKQVKYLGYLLKEGQRWLTEARKETVMGQPTPKTPRQLREFLGKAGFCRLFIPGFAEMAAPLYPLTKPGTLFEWGPDQQKAYQEIKQALLTAPALGLPDLTKPFELFVDEKQGYAKGVLTQKLGPWRRPVAYLSKKLDPVAAGWPPCLRMVAAIAVLTKDAGKLTMGQPLVILAPHAVEALVKQPPDRWLSNARMTHYQALLLDTDRVQFGPIVALNPATLLPLPEEGLQHDCLDILAEAHGTRPDLTDQPLPDADHTWYTDGSSFLQEGQRKAGAAVTTETEVVWAKALPAGTSAQRAELIALTQALKMAEGKKLNVYTDSRYAFATAHIHGEIYRRRGWLTSEGKEIKNKDEILALLKALFLPKRLSIIHCPGHQKGNRAEARGNRMADQAAREVATRETPETSTLLAGKRTADGSEFEKRTADGSEFESPKKKAKVE

SEQ ID NO: 2571 - protein, 2094 aa, synthetic construct
MPAAKRVKLDGGDKKYSIGLDIGTNSVGWAVITDEYKVPSKKFKVLGNTDRHSIKKNLIGALLFDSGETAEATRLKRTARRRYTRRKNRICYLQEIFSNEMAKVDDSFFHRLEESFLVEEDKKHERHPIFGNIVDEVAYHEKYPTIYHLRKKLVDSTDKADLRLIYLALAHMIKFRGHFLIEGDLNPDNSDVDKLFIQLVQTYNQLFEENPINASGVDAKAILSARLSKSRRLENLIAQLPGEKKNGLFGNLIALSLGLTPNFKSNFDLAEDAKLQLSKDTYDDDLDNLLAQIGDQYADLFLAAKNLSDAILLSDILRVNTEITKAPLSASMIKRYDEHHQDLTLLKALVRQQLPEKYKEIFFDQSKNGYAGYIDGGASQEEFYKFIKPILEKMDGTEELLVKLNREDLLRKQRTFDNGSIPHQIHLGELHAILRRQEDFYPFLKDNREKIEKILTFRIPYYVGPLARGNSRFAWMTRKSEETITPWNFEEVVDKGASAQSFIERMTNFDKNLPNEKVLPKHSLLYEYFTVYNELTKVKYVTEGMRKPAFLSGEQKKAIVDLLFKTNRKVTVKQLKEDYFKKIECFDSVEISGVEDRFNASLGTYHDLLKIIKDKDFLDNEENEDILEDIVLTLTLFEDREMIEERLKTYAHLFDDKVMKQLKRRRYTGWGRLSRKLINGIRDKQSGKTILDFLKSDGFANRNFMQLIHDDSLTFKEDIQKAQVSGQGDSLHEHIANLAGSPAIKKGILQTVKVVDELVKVMGRHKPENIVIEMARENQTTQKGQKNSRERMKRIEEGIKELGSQILKEHPVENTQLQNEKLYLYYLQNGRDMYVDQELDINRLSDYDVDHIVPQSFLKDDSIDNKVLTRSDKARGKSDNVPSEEVVKKMKNYWRQLLNAKLITQRKFDNLTKAERGGLSELDKAGFIKRQLVETRQITKHVAQILDSRMNTKYDENDKLIREVKVITLKSKLVSDFRKDFQFYKVREINNYHHAHDAYLNAVVGTALIKKYPKLESEFVYGDYKVYDVRKMIAKSEQEIGKATAKYFFYSNIMNFFKTEITLANGEIRKRPLIETNGETGEIVWDKGRDFATVRKVLSMPQVNIVKKTEVQTGGFSKESILPKRNSDKLIARKKDWDPKKYGGFDSPTVAYSVLVVAKVEKGKSKKLKSVKELLGITIMERSSFEKNPIDFLEAKGYKEVKKDLIIKLPKYSLFELENGRKRMLASAGELQKGNELALPSKYVNFLYLASHYEKLKGSPEDNEQKQLFVEQHKHYLDEIIEQISEFSKRVILADANLDKVLSAYNKHRDKPIREQAENIIHLFTLTNLGAPAAFKYFDTTIDRKRYTSTKEVLDATLIHQSITGLYETRIDLSQLGGDGGGGGGSSGGSGGTLNIEDEYRLHETSKGPDVPLGSTWLSDFPQAWAETGGMGLAVRQAPLIIPLKATSTPVSIKQYPMSQEARLGIKPHIQRLLDQGILVPCQSPWNTPLLPVKKPGTNDYRPVQDLREVNKRVEDIHPTVPNPYNLLSGLPPSHQWYTVLDLKDAFFCLRLHPTSQSLFAFEWRDPEMGISGQLTWTRLPQGFKNSPTLFNEALHRDLADFRIQHPDLILLQYVDDLLLAATSELDCQQGTRALLQTLGDLGYRASAKKAQICQKQVKYLGYLLKEGQRWLTEARKETVMGQPTPKTPRQLREFLGKAGFCRLFIPGFAEMAAPLYPLTKPGTLFEWGPDQQKAYQEIKQALLTAPALGLPDLTKPFELFVDEKQGYAKGVLTQKLGPWRRPVAYLSKKLDPVAAGWPPCLRMVAAIAVLTKDAGKLTMGQPLVILAPHAVEALVKQPPDRWLSNARMTHYQALLLDTDRVQFGPIVALNPATLLPLPEEGLQHDCLDILAEAHGTRPDLTDQPLPDADHTWYTDGSSFLQEGQRKAGAAVTTETEVVWAKALPAGTSAQRAELIALTQALKMAEGKKLNVYTDSRYAFATAHIHGEIYRRRGWLTSEGKEIKNKDEILALLKALFLPKRLSIIHCPGHQKGNRAEARGNRMADQAAREVATRETPETSTLLAGKRTADGSEFEKRTADGSEFESPKKKAKVE

SEQ ID NO: 2572 - protein, 2091 aa, synthetic construct
MPAAKRVKLDGGDKKYSIGLDIGTNSVGWAVITDEYKVPSKKFKVLGNTDRHSIKKNLIGALLFDSGETAEATRLKRTARRRYTRRKNRICYLQEIFSNEMAKVDDSFFHRLEESFLVEEDKKHERHPIFGNIVDEVAYHEKYPTIYHLRKKLVDSTDKADLRLIYLALAHMIKFRGHFLIEGDLNPDNSDVDKLFIQLVQTYNQLFEENPINASGVDAKAILSARLSKSRRLENLIAQLPGEKKNGLFGNLIALSLGLTPNFKSNFDLAEDAKLQLSKDTYDDDLDNLLAQIGDQYADLFLAAKNLSDAILLSDILRVNTEITKAPLSASMIKRYDEHHQDLTLLKALVRQQLPEKYKEIFFDQSKNGYAGYIDGGASQEEFYKFIKPILEKMDGTEELLVKLNREDLLRKQRTFDNGSIPHQIHLGELHAILRRQEDFYPFLKDNREKIEKILTFRIPYYVGPLARGNSRFAWMTRKSEETITPWNFEEVVDKGASAQSFIERMTNFDKNLPNEKVLPKHSLLYEYFTVYNELTKVKYVTEGMRKPAFLSGEQKKAIVDLLFKTNRKVTVKQLKEDYFKKIECFDSVEISGVEDRFNASLGTYHDLLKIIKDKDFLDNEENEDILEDIVLTLTLFEDREMIEERLKTYAHLFDDKVMKQLKRRRYTGWGRLSRKLINGIRDKQSGKTILDFLKSDGFANRNFMQLIHDDSLTFKEDIQKAQVSGQGDSLHEHIANLAGSPAIKKGILQTVKVVDELVKVMGRHKPENIVIEMARENQTTQKGQKNSRERMKRIEEGIKELGSQILKEHPVENTQLQNEKLYLYYLQNGRDMYVDQELDINRLSDYDVDHIVPQSFLKDDSIDNKVLTRSDKARGKSDNVPSEEVVKKMKNYWRQLLNAKLITQRKFDNLTKAERGGLSELDKAGFIKRQLVETRQITKHVAQILDSRMNTKYDENDKLIREVKVITLKSKLVSDFRKDFQFYKVREINNYHHAHDAYLNAVVGTALIKKYPKLESEFVYGDYKVYDVRKMIAKSEQEIGKATAKYFFYSNIMNFFKTEITLANGEIRKRPLIETNGETGEIVWDKGRDFATVRKVLSMPQVNIVKKTEVQTGGFSKESILPKRNSDKLIARKKDWDPKKYGGFDSPTVAYSVLVVAKVEKGKSKKLKSVKELLGITIMERSSFEKNPIDFLEAKGYKEVKKDLIIKLPKYSLFELENGRKRMLASAGELQKGNELALPSKYVNFLYLASHYEKLKGSPEDNEQKQLFVEQHKHYLDEIIEQISEFSKRVILADANLDKVLSAYNKHRDKPIREQAENIIHLFTLTNLGAPAAFKYFDTTIDRKRYTSTKEVLDATLIHQSITGLYETRIDLSQLGGDGGGSSPAPGGTLNIEDEYRLHETSKGPDVPLGSTWLSDFPQAWAETGGMGLAVRQAPLIIPLKATSTPVSIKQYPMSQEARLGIKPHIQRLLDQGILVPCQSPWNTPLLPVKKPGTNDYRPVQDLREVNKRVEDIHPTVPNPYNLLSGLPPSHQWYTVLDLKDAFFCLRLHPTSQSLFAFEWRDPEMGISGQLTWTRLPQGFKNSPTLFNEALHRDLADFRIQHPDLILLQYVDDLLLAATSELDCQQGTRALLQTLGDLGYRASAKKAQICQKQVKYLGYLLKEGQRWLTEARKETVMGQPTPKTPRQLREFLGKAGFCRLFIPGFAEMAAPLYPLTKPGTLFEWGPDQQKAYQEIKQALLTAPALGLPDLTKPFELFVDEKQGYAKGVLTQKLGPWRRPVAYLSKKLDPVAAGWPPCLRMVAAIAVLTKDAGKLTMGQPLVILAPHAVEALVKQPPDRWLSNARMTHYQALLLDTDRVQFGPIVALNPATLLPLPEEGLQHDCLDILAEAHGTRPDLTDQPLPDADHTWYTDGSSFLQEGQRKAGAAVTTETEVVWAKALPAGTSAQRAELIALTQALKMAEGKKLNVYTDSRYAFATAHIHGEIYRRRGWLTSEGKEIKNKDEILALLKALFLPKRLSIIHCPGHQKGNRAEARGNRMADQAAREVATRETPETSTLLAGKRTADGSEFEKRTADGSEFESPKKKAKVE

SEQ ID NO: 2573 - protein, 2094 aa, synthetic construct
MPAAKRVKLDGGDKKYSIGLDIGTNSVGWAVITDEYKVPSKKFKVLGNTDRHSIKKNLIGALLFDSGETAEATRLKRTARRRYTRRKNRICYLQEIFSNEMAKVDDSFFHRLEESFLVEEDKKHERHPIFGNIVDEVAYHEKYPTIYHLRKKLVDSTDKADLRLIYLALAHMIKFRGHFLIEGDLNPDNSDVDKLFIQLVQTYNQLFEENPINASGVDAKAILSARLSKSRRLENLIAQLPGEKKNGLFGNLIALSLGLTPNFKSNFDLAEDAKLQLSKDTYDDDLDNLLAQIGDQYADLFLAAKNLSDAILLSDILRVNTEITKAPLSASMIKRYDEHHQDLTLLKALVRQQLPEKYKEIFFDQSKNGYAGYIDGGASQEEFYKFIKPILEKMDGTEELLVKLNREDLLRKQRTFDNGSIPHQIHLGELHAILRRQEDFYPFLKDNREKIEKILTFRIPYYVGPLARGNSRFAWMTRKSEETITPWNFEEVVDKGASAQSFIERMTNFDKNLPNEKVLPKHSLLYEYFTVYNELTKVKYVTEGMRKPAFLSGEQKKAIVDLLFKTNRKVTVKQLKEDYFKKIECFDSVEISGVEDRFNASLGTYHDLLKIIKDKDFLDNEENEDILEDIVLTLTLFEDREMIEERLKTYAHLFDDKVMKQLKRRRYTGWGRLSRKLINGIRDKQSGKTILDFLKSDGFANRNFMQLIHDDSLTFKEDIQKAQVSGQGDSLHEHIANLAGSPAIKKGILQTVKVVDELVKVMGRHKPENIVIEMARENQTTQKGQKNSRERMKRIEEGIKELGSQILKEHPVENTQLQNEKLYLYYLQNGRDMYVDQELDINRLSDYDVDHIVPQSFLKDDSIDNKVLTRSDKARGKSDNVPSEEVVKKMKNYWRQLLNAKLITQRKFDNLTKAERGGLSELDKAGFIKRQLVETRQITKHVAQILDSRMNTKYDENDKLIREVKVITLKSKLVSDFRKDFQFYKVREINNYHHAHDAYLNAVVGTALIKKYPKLESEFVYGDYKVYDVRKMIAKSEQEIGKATAKYFFYSNIMNFFKTEITLANGEIRKRPLIETNGETGEIVWDKGRDFATVRKVLSMPQVNIVKKTEVQTGGFSKESILPKRNSDKLIARKKDWDPKKYGGFDSPTVAYSVLVVAKVEKGKSKKLKSVKELLGITIMERSSFEKNPIDFLEAKGYKEVKKDLIIKLPKYSLFELENGRKRMLASAGELQKGNELALPSKYVNFLYLASHYEKLKGSPEDNEQKQLFVEQHKHYLDEIIEQISEFSKRVILADANLDKVLSAYNKHRDKPIREQAENIIHLFTLTNLGAPAAFKYFDTTIDRKRYTSTKEVLDATLIHQSITGLYETRIDLSQLGGDGGGGSPAPGGGGGTLNIEDEYRLHETSKGPDVPLGSTWLSDFPQAWAETGGMGLAVRQAPLIIPLKATSTPVSIKQYPMSQEARLGIKPHIQRLLDQGILVPCQSPWNTPLLPVKKPGTNDYRPVQDLREVNKRVEDIHPTVPNPYNLLSGLPPSHQWYTVLDLKDAFFCLRLHPTSQSLFAFEWRDPEMGISGQLTWTRLPQGFKNSPTLFNEALHRDLADFRIQHPDLILLQYVDDLLLAATSELDCQQGTRALLQTLGDLGYRASAKKAQICQKQVKYLGYLLKEGQRWLTEARKETVMGQPTPKTPRQLREFLGKAGFCRLFIPGFAEMAAPLYPLTKPGTLFEWGPDQQKAYQEIKQALLTAPALGLPDLTKPFELFVDEKQGYAKGVLTQKLGPWRRPVAYLSKKLDPVAAGWPPCLRMVAAIAVLTKDAGKLTMGQPLVILAPHAVEALVKQPPDRWLSNARMTHYQALLLDTDRVQFGPIVALNPATLLPLPEEGLQHDCLDILAEAHGTRPDLTDQPLPDADHTWYTDGSSFLQEGQRKAGAAVTTETEVVWAKALPAGTSAQRAELIALTQALKMAEGKKLNVYTDSRYAFATAHIHGEIYRRRGWLTSEGKEIKNKDEILALLKALFLPKRLSIIHCPGHQKGNRAEARGNRMADQAAREVATRETPETSTLLAGKRTADGSEFEKRTADGSEFESPKKKAKVE

SEQ ID NO: 2574 - protein, 2094 aa, synthetic construct
MPAAKRVKLDGGDKKYSIGLDIGTNSVGWAVITDEYKVPSKKFKVLGNTDRHSIKKNLIGALLFDSGETAEATRLKRTARRRYTRRKNRICYLQEIFSNEMAKVDDSFFHRLEESFLVEEDKKHERHPIFGNIVDEVAYHEKYPTIYHLRKKLVDSTDKADLRLIYLALAHMIKFRGHFLIEGDLNPDNSDVDKLFIQLVQTYNQLFEENPINASGVDAKAILSARLSKSRRLENLIAQLPGEKKNGLFGNLIALSLGLTPNFKSNFDLAEDAKLQLSKDTYDDDLDNLLAQIGDQYADLFLAAKNLSDAILLSDILRVNTEITKAPLSASMIKRYDEHHQDLTLLKALVRQQLPEKYKEIFFDQSKNGYAGYIDGGASQEEFYKFIKPILEKMDGTEELLVKLNREDLLRKQRTFDNGSIPHQIHLGELHAILRRQEDFYPFLKDNREKIEKILTFRIPYYVGPLARGNSRFAWMTRKSEETITPWNFEEVVDKGASAQSFIERMTNFDKNLPNEKVLPKHSLLYEYFTVYNELTKVKYVTEGMRKPAFLSGEQKKAIVDLLFKTNRKVTVKQLKEDYFKKIECFDSVEISGVEDRFNASLGTYHDLLKIIKDKDFLDNEENEDILEDIVLTLTLFEDREMIEERLKTYAHLFDDKVMKQLKRRRYTGWGRLSRKLINGIRDKQSGKTILDFLKSDGFANRNFMQLIHDDSLTFKEDIQKAQVSGQGDSLHEHIANLAGSPAIKKGILQTVKVVDELVKVMGRHKPENIVIEMARENQTTQKGQKNSRERMKRIEEGIKELGSQILKEHPVENTQLQNEKLYLYYLQNGRDMYVDQELDINRLSDYDVDHIVPQSFLKDDSIDNKVLTRSDKARGKSDNVPSEEVVKKMKNYWRQLLNAKLITQRKFDNLTKAERGGLSELDKAGFIKRQLVETRQITKHVAQILDSRMNTKYDENDKLIREVKVITLKSKLVSDFRKDFQFYKVREINNYHHAHDAYLNAVVGTALIKKYPKLESEFVYGDYKVYDVRKMIAKSEQEIGKATAKYFFYSNIMNFFKTEITLANGEIRKRPLIETNGETGEIVWDKGRDFATVRKVLSMPQVNIVKKTEVQTGGFSKESILPKRNSDKLIARKKDWDPKKYGGFDSPTVAYSVLVVAKVEKGKSKKLKSVKELLGITIMERSSFEKNPIDFLEAKGYKEVKKDLIIKLPKYSLFELENGRKRMLASAGELQKGNELALPSKYVNFLYLASHYEKLKGSPEDNEQKQLFVEQHKHYLDEIIEQISEFSKRVILADANLDKVLSAYNKHRDKPIREQAENIIHLFTLTNLGAPAAFKYFDTTIDRKRYTSTKEVLDATLIHQSITGLYETRIDLSQLGGDGGPAPGGSGGGGGTLNIEDEYRLHETSKGPDVPLGSTWLSDFPQAWAETGGMGLAVRQAPLIIPLKATSTPVSIKQYPMSQEARLGIKPHIQRLLDQGILVPCQSPWNTPLLPVKKPGTNDYRPVQDLREVNKRVEDIHPTVPNPYNLLSGLPPSHQWYTVLDLKDAFFCLRLHPTSQSLFAFEWRDPEMGISGQLTWTRLPQGFKNSPTLFNEALHRDLADFRIQHPDLILLQYVDDLLLAATSELDCQQGTRALLQTLGDLGYRASAKKAQICQKQVKYLGYLLKEGQRWLTEARKETVMGQPTPKTPRQLREFLGKAGFCRLFIPGFAEMAAPLYPLTKPGTLFEWGPDQQKAYQEIKQALLTAPALGLPDLTKPFELFVDEKQGYAKGVLTQKLGPWRRPVAYLSKKLDPVAAGWPPCLRMVAAIAVLTKDAGKLTMGQPLVILAPHAVEALVKQPPDRWLSNARMTHYQALLLDTDRVQFGPIVALNPATLLPLPEEGLQHDCLDILAEAHGTRPDLTDQPLPDADHTWYTDGSSFLQEGQRKAGAAVTTETEVVWAKALPAGTSAQRAELIALTQALKMAEGKKLNVYTDSRYAFATAHIHGEIYRRRGWLTSEGKEIKNKDEILALLKALFLPKRLSIIHCPGHQKGNRAEARGNRMADQAAREVATRETPETSTLLAGKRTADGSEFEKRTADGSEFESPKKKAKVE

SEQ ID NO: 2575 - protein, 2096 aa, synthetic construct
MPAAKRVKLDGGDKKYSIGLDIGTNSVGWAVITDEYKVPSKKFKVLGNTDRHSIKKNLIGALLFDSGETAEATRLKRTARRRYTRRKNRICYLQEIFSNEMAKVDDSFFHRLEESFLVEEDKKHERHPIFGNIVDEVAYHEKYPTIYHLRKKLVDSTDKADLRLIYLALAHMIKFRGHFLIEGDLNPDNSDVDKLFIQLVQTYNQLFEENPINASGVDAKAILSARLSKSRRLENLIAQLPGEKKNGLFGNLIALSLGLTPNFKSNFDLAEDAKLQLSKDTYDDDLDNLLAQIGDQYADLFLAAKNLSDAILLSDILRVNTEITKAPLSASMIKRYDEHHQDLTLLKALVRQQLPEKYKEIFFDQSKNGYAGYIDGGASQEEFYKFIKPILEKMDGTEELLVKLNREDLLRKQRTFDNGSIPHQIHLGELHAILRRQEDFYPFLKDNREKIEKILTFRIPYYVGPLARGNSRFAWMTRKSEETITPWNFEEVVDKGASAQSFIERMTNFDKNLPNEKVLPKHSLLYEYFTVYNELTKVKYVTEGMRKPAFLSGEQKKAIVDLLFKTNRKVTVKQLKEDYFKKIECFDSVEISGVEDRFNASLGTYHDLLKIIKDKDFLDNEENEDILEDIVLTLTLFEDREMIEERLKTYAHLFDDKVMKQLKRRRYTGWGRLSRKLINGIRDKQSGKTILDFLKSDGFANRNFMQLIHDDSLTFKEDIQKAQVSGQGDSLHEHIANLAGSPAIKKGILQTVKVVDELVKVMGRHKPENIVIEMARENQTTQKGQKNSRERMKRIEEGIKELGSQILKEHPVENTQLQNEKLYLYYLQNGRDMYVDQELDINRLSDYDVDHIVPQSFLKDDSIDNKVLTRSDKARGKSDNVPSEEVVKKMKNYWRQLLNAKLITQRKFDNLTKAERGGLSELDKAGFIKRQLVETRQITKHVAQILDSRMNTKYDENDKLIREVKVITLKSKLVSDFRKDFQFYKVREINNYHHAHDAYLNAVVGTALIKKYPKLESEFVYGDYKVYDVRKMIAKSEQEIGKATAKYFFYSNIMNFFKTEITLANGEIRKRPLIETNGETGEIVWDKGRDFATVRKVLSMPQVNIVKKTEVQTGGFSKESILPKRNSDKLIARKKDWDPKKYGGFDSPTVAYSVLVVAKVEKGKSKKLKSVKELLGITIMERSSFEKNPIDFLEAKGYKEVKKDLIIKLPKYSLFELENGRKRMLASAGELQKGNELALPSKYVNFLYLASHYEKLKGSPEDNEQKQLFVEQHKHYLDEIIEQISEFSKRVILADANLDKVLSAYNKHRDKPIREQAENIIHLFTLTNLGAPAAFKYFDTTIDRKRYTSTKEVLDATLIHQSITGLYETRIDLSQLGGDGGGGGGSSEAAAKGGTLNIEDEYRLHETSKGPDVPLGSTWLSDFPQAWAETGGMGLAVRQAPLIIPLKATSTPVSIKQYPMSQEARLGIKPHIQRLLDQGILVPCQSPWNTPLLPVKKPGTNDYRPVQDLREVNKRVEDIHPTVPNPYNLLSGLPPSHQWYTVLDLKDAFFCLRLHPTSQSLFAFEWRDPEMGISGQLTWTRLPQGFKNSPTLFNEALHRDLADFRIQHPDLILLQYVDDLLLAATSELDCQQGTRALLQTLGDLGYRASAKKAQICQKQVKYLGYLLKEGQRWLTEARKETVMGQPTPKTPRQLREFLGKAGFCRLFIPGFAEMAAPLYPLTKPGTLFEWGPDQQKAYQEIKQALLTAPALGLPDLTKPFELFVDEKQGYAKGVLTQKLGPWRRPVAYLSKKLDPVAAGWPPCLRMVAAIAVLTKDAGKLTMGQPLVILAPHAVEALVKQPPDRWLSNARMTHYQALLLDTDRVQFGPIVALNPATLLPLPEEGLQHDCLDILAEAHGTRPDLTDQPLPDADHTWYTDGSSFLQEGQRKAGAAVTTETEVVWAKALPAGTSAQRAELIALTQALKMAEGKKLNVYTDSRYAFATAHIHGEIYRRRGWLTSEGKEIKNKDEILALLKALFLPKRLSIIHCPGHQKGNRAEARGNRMADQAAREVATRETPETSTLLAGKRTADGSEFEKRTADGSEFESPKKKAKVE

SEQ ID NO: 2576 - protein, 2096 aa, synthetic construct
MPAAKRVKLDGGDKKYSIGLDIGTNSVGWAVITDEYKVPSKKFKVLGNTDRHSIKKNLIGALLFDSGETAEATRLKRTARRRYTRRKNRICYLQEIFSNEMAKVDDSFFHRLEESFLVEEDKKHERHPIFGNIVDEVAYHEKYPTIYHLRKKLVDSTDKADLRLIYLALAHMIKFRGHFLIEGDLNPDNSDVDKLFIQLVQTYNQLFEENPINASGVDAKAILSARLSKSRRLENLIAQLPGEKKNGLFGNLIALSLGLTPNFKSNFDLAEDAKLQLSKDTYDDDLDNLLAQIGDQYADLFLAAKNLSDAILLSDILRVNTEITKAPLSASMIKRYDEHHQDLTLLKALVRQQLPEKYKEIFFDQSKNGYAGYIDGGASQEEFYKFIKPILEKMDGTEELLVKLNREDLLRKQRTFDNGSIPHQIHLGELHAILRRQEDFYPFLKDNREKIEKILTFRIPYYVGPLARGNSRFAWMTRKSEETITPWNFEEVVDKGASAQSFIERMTNFDKNLPNEKVLPKHSLLYEYFTVYNELTKVKYVTEGMRKPAFLSGEQKKAIVDLLFKTNRKVTVKQLKEDYFKKIECFDSVEISGVEDRFNASLGTYHDLLKIIKDKDFLDNEENEDILEDIVLTLTLFEDREMIEERLKTYAHLFDDKVMKQLKRRRYTGWGRLSRKLINGIRDKQSGKTILDFLKSDGFANRNFMQLIHDDSLTFKEDIQKAQVSGQGDSLHEHIANLAGSPAIKKGILQTVKVVDELVKVMGRHKPENIVIEMARENQTTQKGQKNSRERMKRIEEGIKELGSQILKEHPVENTQLQNEKLYLYYLQNGRDMYVDQELDINRLSDYDVDHIVPQSFLKDDSIDNKVLTRSDKARGKSDNVPSEEVVKKMKNYWRQLLNAKLITQRKFDNLTKAERGGLSELDKAGFIKRQLVETRQITKHVAQILDSRMNTKYDENDKLIREVKVITLKSKLVSDFRKDFQFYKVREINNYHHAHDAYLNAVVGTALIKKYPKLESEFVYGDYKVYDVRKMIAKSEQEIGKATAKYFFYSNIMNFFKTEITLANGEIRKRPLIETNGETGEIVWDKGRDFATVRKVLSMPQVNIVKKTEVQTGGFSKESILPKRNSDKLIARKKDWDPKKYGGFDSPTVAYSVLVVAKVEKGKSKKLKSVKELLGITIMERSSFEKNPIDFLEAKGYKEVKKDLIIKLPKYSLFELENGRKRMLASAGELQKGNELALPSKYVNFLYLASHYEKLKGSPEDNEQKQLFVEQHKHYLDEIIEQISEFSKRVILADANLDKVLSAYNKHRDKPIREQAENIIHLFTLTNLGAPAAFKYFDTTIDRKRYTSTKEVLDATLIHQSITGLYETRIDLSQLGGDGGGGGEAAAKGSSGGTLNIEDEYRLHETSKGPDVPLGSTWLSDFPQAWAETGGMGLAVRQAPLIIPLKATSTPVSIKQYPMSQEARLGIKPHIQRLLDQGILVPCQSPWNTPLLPVKKPGTNDYRPVQDLREVNKRVEDIHPTVPNPYNLLSGLPPSHQWYTVLDLKDAFFCLRLHPTSQSLFAFEWRDPEMGISGQLTWTRLPQGFKNSPTLFNEALHRDLADFRIQHPDLILLQYVDDLLLAATSELDCQQGTRALLQTLGDLGYRASAKKAQICQKQVKYLGYLLKEGQRWLTEARKETVMGQPTPKTPRQLREFLGKAGFCRLFIPGFAEMAAPLYPLTKPGTLFEWGPDQQKAYQEIKQALLTAPALGLPDLTKPFELFVDEKQGYAKGVLTQKLGPWRRPVAYLSKKLDPVAAGWPPCLRMVAAIAVLTKDAGKLTMGQPLVILAPHAVEALVKQPPDRWLSNARMTHYQALLLDTDRVQFGPIVALNPATLLPLPEEGLQHDCLDILAEAHGTRPDLTDQPLPDADHTWYTDGSSFLQEGQRKAGAAVTTETEVVWAKALPAGTSAQRAELIALTQALKMAEGKKLNVYTDSRYAFATAHIHGEIYRRRGWLTSEGKEIKNKDEILALLKALFLPKRLSIIHCPGHQKGNRAEARGNRMADQAAREVATRETPETSTLLAGKRTADGSEFEKRTADGSEFESPKKKAKVE

SEQ ID NO: 2577 - protein, 2096 aa, synthetic construct
MPAAKRVKLDGGDKKYSIGLDIGTNSVGWAVITDEYKVPSKKFKVLGNTDRHSIKKNLIGALLFDSGETAEATRLKRTARRRYTRRKNRICYLQEIFSNEMAKVDDSFFHRLEESFLVEEDKKHERHPIFGNIVDEVAYHEKYPTIYHLRKKLVDSTDKADLRLIYLALAHMIKFRGHFLIEGDLNPDNSDVDKLFIQLVQTYNQLFEENPINASGVDAKAILSARLSKSRRLENLIAQLPGEKKNGLFGNLIALSLGLTPNFKSNFDLAEDAKLQLSKDTYDDDLDNLLAQIGDQYADLFLAAKNLSDAILLSDILRVNTEITKAPLSASMIKRYDEHHQDLTLLKALVRQQLPEKYKEIFFDQSKNGYAGYIDGGASQEEFYKFIKPILEKMDGTEELLVKLNREDLLRKQRTFDNGSIPHQIHLGELHAILRRQEDFYPFLKDNREKIEKILTFRIPYYVGPLARGNSRFAWMTRKSEETITPWNFEEVVDKGASAQSFIERMTNFDKNLPNEKVLPKHSLLYEYFTVYNELTKVKYVTEGMRKPAFLSGEQKKAIVDLLFKTNRKVTVKQLKEDYFKKIECFDSVEISGVEDRFNASLGTYHDLLKIIKDKDFLDNEENEDILEDIVLTLTLFEDREMIEERLKTYAHLFDDKVMKQLKRRRYTGWGRLSRKLINGIRDKQSGKTILDFLKSDGFANRNFMQLIHDDSLTFKEDIQKAQVSGQGDSLHEHIANLAGSPAIKKGILQTVKVVDELVKVMGRHKPENIVIEMARENQTTQKGQKNSRERMKRIEEGIKELGSQILKEHPVENTQLQNEKLYLYYLQNGRDMYVDQELDINRLSDYDVDHIVPQSFLKDDSIDNKVLTRSDKARGKSDNVPSEEVVKKMKNYWRQLLNAKLITQRKFDNLTKAERGGLSELDKAGFIKRQLVETRQITKHVAQILDSRMNTKYDENDKLIREVKVITLKSKLVSDFRKDFQFYKVREINNYHHAHDAYLNAVVGTALIKKYPKLESEFVYGDYKVYDVRKMIAKSEQEIGKATAKYFFYSNIMNFFKTEITLANGEIRKRPLIETNGETGEIVWDKGRDFATVRKVLSMPQVNIVKKTEVQTGGFSKESILPKRNSDKLIARKKDWDPKKYGGFDSPTVAYSVLVVAKVEKGKSKKLKSVKELLGITIMERSSFEKNPIDFLEAKGYKEVKKDLIIKLPKYSLFELENGRKRMLASAGELQKGNELALPSKYVNFLYLASHYEKLKGSPEDNEQKQLFVEQHKHYLDEIIEQISEFSKRVILADANLDKVLSAYNKHRDKPIREQAENIIHLFTLTNLGAPAAFKYFDTTIDRKRYTSTKEVLDATLIHQSITGLYETRIDLSQLGGDGGPAPEAAAKGGSGGTLNIEDEYRLHETSKGPDVPLGSTWLSDFPQAWAETGGMGLAVRQAPLIIPLKATSTPVSIKQYPMSQEARLGIKPHIQRLLDQGILVPCQSPWNTPLLPVKKPGTNDYRPVQDLREVNKRVEDIHPTVPNPYNLLSGLPPSHQWYTVLDLKDAFFCLRLHPTSQSLFAFEWRDPEMGISGQLTWTRLPQGFKNSPTLFNEALHRDLADFRIQHPDLILLQYVDDLLLAATSELDCQQGTRALLQTLGDLGYRASAKKAQICQKQVKYLGYLLKEGQRWLTEARKETVMGQPTPKTPRQLREFLGKAGFCRLFIPGFAEMAAPLYPLTKPGTLFEWGPDQQKAYQEIKQALLTAPALGLPDLTKPFELFVDEKQGYAKGVLTQKLGPWRRPVAYLSKKLDPVAAGWPPCLRMVAAIAVLTKDAGKLTMGQPLVILAPHAVEALVKQPPDRWLSNARMTHYQALLLDTDRVQFGPIVALNPATLLPLPEEGLQHDCLDILAEAHGTRPDLTDQPLPDADHTWYTDGSSFLQEGQRKAGAAVTTETEVVWAKALPAGTSAQRAELIALTQALKMAEGKKLNVYTDSRYAFATAHIHGEIYRRRGWLTSEGKEIKNKDEILALLKALFLPKRLSIIHCPGHQKGNRAEARGNRMADQAAREVATRETPETSTLLAGKRTADGSEFEKRTADGSEFESPKKKAKVE

SEQ ID NO: 2578 - protein, 2096 aa, synthetic construct
MPAAKRVKLDGGDKKYSIGLDIGTNSVGWAVITDEYKVPSKKFKVLGNTDRHSIKKNLIGALLFDSGETAEATRLKRTARRRYTRRKNRICYLQEIFSNEMAKVDDSFFHRLEESFLVEEDKKHERHPIFGNIVDEVAYHEKYPTIYHLRKKLVDSTDKADLRLIYLALAHMIKFRGHFLIEGDLNPDNSDVDKLFIQLVQTYNQLFEENPINASGVDAKAILSARLSKSRRLENLIAQLPGEKKNGLFGNLIALSLGLTPNFKSNFDLAEDAKLQLSKDTYDDDLDNLLAQIGDQYADLFLAAKNLSDAILLSDILRVNTEITKAPLSASMIKRYDEHHQDLTLLKALVRQQLPEKYKEIFFDQSKNGYAGYIDGGASQEEFYKFIKPILEKMDGTEELLVKLNREDLLRKQRTFDNGSIPHQIHLGELHAILRRQEDFYPFLKDNREKIEKILTFRIPYYVGPLARGNSRFAWMTRKSEETITPWNFEEVVDKGASAQSFIERMTNFDKNLPNEKVLPKHSLLYEYFTVYNELTKVKYVTEGMRKPAFLSGEQKKAIVDLLFKTNRKVTVKQLKEDYFKKIECFDSVEISGVEDRFNASLGTYHDLLKIIKDKDFLDNEENEDILEDIVLTLTLFEDREMIEERLKTYAHLFDDKVMKQLKRRRYTGWGRLSRKLINGIRDKQSGKTILDFLKSDGFANRNFMQLIHDDSLTFKEDIQKAQVSGQGDSLHEHIANLAGSPAIKKGILQTVKVVDELVKVMGRHKPENIVIEMARENQTTQKGQKNSRERMKRIEEGIKELGSQILKEHPVENTQLQNEKLYLYYLQNGRDMYVDQELDINRLSDYDVDHIVPQSFLKDDSIDNKVLTRSDKARGKSDNVPSEEVVKKMKNYWRQLLNAKLITQRKFDNLTKAERGGLSELDKAGFIKRQLVETRQITKHVAQILDSRMNTKYDENDKLIREVKVITLKSKLVSDFRKDFQFYKVREINNYHHAHDAYLNAVVGTALIKKYPKLESEFVYGDYKVYDVRKMIAKSEQEIGKATAKYFFYSNIMNFFKTEITLANGEIRKRPLIETNGETGEIVWDKGRDFATVRKVLSMPQVNIVKKTEVQTGGFSKESILPKRNSDKLIARKKDWDPKKYGGFDSPTVAYSVLVVAKVEKGKSKKLKSVKELLGITIMERSSFEKNPIDFLEAKGYKEVKKDLIIKLPKYSLFELENGRKRMLASAGELQKGNELALPSKYVNFLYLASHYEKLKGSPEDNEQKQLFVEQHKHYLDEIIEQISEFSKRVILADANLDKVLSAYNKHRDKPIREQAENIIHLFTLTNLGAPAAFKYFDTTIDRKRYTSTKEVLDATLIHQSITGLYETRIDLSQLGGDGGGGSEAAAKGGGGGTLNIEDEYRLHETSKGPDVPLGSTWLSDFPQAWAETGGMGLAVRQAPLIIPLKATSTPVSIKQYPMSQEARLGIKPHIQRLLDQGILVPCQSPWNTPLLPVKKPGTNDYRPVQDLREVNKRVEDIHPTVPNPYNLLSGLPPSHQWYTVLDLKDAFFCLRLHPTSQSLFAFEWRDPEMGISGQLTWTRLPQGFKNSPTLFNEALHRDLADFRIQHPDLILLQYVDDLLLAATSELDCQQGTRALLQTLGDLGYRASAKKAQICQKQVKYLGYLLKEGQRWLTEARKETVMGQPTPKTPRQLREFLGKAGFCRLFIPGFAEMAAPLYPLTKPGTLFEWGPDQQKAYQEIKQALLTAPALGLPDLTKPFELFVDEKQGYAKGVLTQKLGPWRRPVAYLSKKLDPVAAGWPPCLRMVAAIAVLTKDAGKLTMGQPLVILAPHAVEALVKQPPDRWLSNARMTHYQALLLDTDRVQFGPIVALNPATLLPLPEEGLQHDCLDILAEAHGTRPDLTDQPLPDADHTWYTDGSSFLQEGQRKAGAAVTTETEVVWAKALPAGTSAQRAELIALTQALKMAEGKKLNVYTDSRYAFATAHIHGEIYRRRGWLTSEGKEIKNKDEILALLKALFLPKRLSIIHCPGHQKGNRAEARGNRMADQAAREVATRETPETSTLLAGKRTADGSEFEKRTADGSEFESPKKKAKVE

SEQ ID NO: 2579 - protein, 2090 aa, synthetic construct
MPAAKRVKLDGGDKKYSIGLDIGTNSVGWAVITDEYKVPSKKFKVLGNTDRHSIKKNLIGALLFDSGETAEATRLKRTARRRYTRRKNRICYLQEIFSNEMAKVDDSFFHRLEESFLVEEDKKHERHPIFGNIVDEVAYHEKYPTIYHLRKKLVDSTDKADLRLIYLALAHMIKFRGHFLIEGDLNPDNSDVDKLFIQLVQTYNQLFEENPINASGVDAKAILSARLSKSRRLENLIAQLPGEKKNGLFGNLIALSLGLTPNFKSNFDLAEDAKLQLSKDTYDDDLDNLLAQIGDQYADLFLAAKNLSDAILLSDILRVNTEITKAPLSASMIKRYDEHHQDLTLLKALVRQQLPEKYKEIFFDQSKNGYAGYIDGGASQEEFYKFIKPILEKMDGTEELLVKLNREDLLRKQRTFDNGSIPHQIHLGELHAILRRQEDFYPFLKDNREKIEKILTFRIPYYVGPLARGNSRFAWMTRKSEETITPWNFEEVVDKGASAQSFIERMTNFDKNLPNEKVLPKHSLLYEYFTVYNELTKVKYVTEGMRKPAFLSGEQKKAIVDLLFKTNRKVTVKQLKEDYFKKIECFDSVEISGVEDRFNASLGTYHDLLKIIKDKDFLDNEENEDILEDIVLTLTLFEDREMIEERLKTYAHLFDDKVMKQLKRRRYTGWGRLSRKLINGIRDKQSGKTILDFLKSDGFANRNFMQLIHDDSLTFKEDIQKAQVSGQGDSLHEHIANLAGSPAIKKGILQTVKVVDELVKVMGRHKPENIVIEMARENQTTQKGQKNSRERMKRIEEGIKELGSQILKEHPVENTQLQNEKLYLYYLQNGRDMYVDQELDINRLSDYDVDHIVPQSFLKDDSIDNKVLTRSDKARGKSDNVPSEEVVKKMKNYWRQLLNAKLITQRKFDNLTKAERGGLSELDKAGFIKRQLVETRQITKHVAQILDSRMNTKYDENDKLIREVKVITLKSKLVSDFRKDFQFYKVREINNYHHAHDAYLNAVVGTALIKKYPKLESEFVYGDYKVYDVRKMIAKSEQEIGKATAKYFFYSNIMNFFKTEITLANGEIRKRPLIETNGETGEIVWDKGRDFATVRKVLSMPQVNIVKKTEVQTGGFSKESILPKRNSDKLIARKKDWDPKKYGGFDSPTVAYSVLVVAKVEKGKSKKLKSVKELLGITIMERSSFEKNPIDFLEAKGYKEVKKDLIIKLPKYSLFELENGRKRMLASAGELQKGNELALPSKYVNFLYLASHYEKLKGSPEDNEQKQLFVEQHKHYLDEIIEQISEFSKRVILADANLDKVLSAYNKHRDKPIREQAENIIHLFTLTNLGAPAAFKYFDTTIDRKRYTSTKEVLDATLIHQSITGLYETRIDLSQLGGDGGGGGGGGGTLNIEDEYRLHETSKGPDVPLGSTWLSDFPQAWAETGGMGLAVRQAPLIIPLKATSTPVSIKQYPMSQEARLGIKPHIQRLLDQGILVPCQSPWNTPLLPVKKPGTNDYRPVQDLREVNKRVEDIHPTVPNPYNLLSGLPPSHQWYTVLDLKDAFFCLRLHPTSQSLFAFEWRDPEMGISGQLTWTRLPQGFKNSPTLFNEALHRDLADFRIQHPDLILLQYVDDLLLAATSELDCQQGTRALLQTLGDLGYRASAKKAQICQKQVKYLGYLLKEGQRWLTEARKETVMGQPTPKTPRQLREFLGKAGFCRLFIPGFAEMAAPLYPLTKPGTLFEWGPDQQKAYQEIKQALLTAPALGLPDLTKPFELFVDEKQGYAKGVLTQKLGPWRRPVAYLSKKLDPVAAGWPPCLRMVAAIAVLTKDAGKLTMGQPLVILAPHAVEALVKQPPDRWLSNARMTHYQALLLDTDRVQFGPIVALNPATLLPLPEEGLQHDCLDILAEAHGTRPDLTDQPLPDADHTWYTDGSSFLQEGQRKAGAAVTTETEVVWAKALPAGTSAQRAELIALTQALKMAEGKKLNVYTDSRYAFATAHIHGEIYRRRGWLTSEGKEIKNKDEILALLKALFLPKRLSIIHCPGHQKGNRAEARGNRMADQAAREVATRETPETSTLLAGKRTADGSEFEKRTADGSEFESPKKKAKVE

SEQ ID NO: 2580 - protein, 2094 aa, synthetic construct
MPAAKRVKLDGGDKKYSIGLDIGTNSVGWAVITDEYKVPSKKFKVLGNTDRHSIKKNLIGALLFDSGETAEATRLKRTARRRYTRRKNRICYLQEIFSNEMAKVDDSFFHRLEESFLVEEDKKHERHPIFGNIVDEVAYHEKYPTIYHLRKKLVDSTDKADLRLIYLALAHMIKFRGHFLIEGDLNPDNSDVDKLFIQLVQTYNQLFEENPINASGVDAKAILSARLSKSRRLENLIAQLPGEKKNGLFGNLIALSLGLTPNFKSNFDLAEDAKLQLSKDTYDDDLDNLLAQIGDQYADLFLAAKNLSDAILLSDILRVNTEITKAPLSASMIKRYDEHHQDLTLLKALVRQQLPEKYKEIFFDQSKNGYAGYIDGGASQEEFYKFIKPILEKMDGTEELLVKLNREDLLRKQRTFDNGSIPHQIHLGELHAILRRQEDFYPFLKDNREKIEKILTFRIPYYVGPLARGNSRFAWMTRKSEETITPWNFEEVVDKGASAQSFIERMTNFDKNLPNEKVLPKHSLLYEYFTVYNELTKVKYVTEGMRKPAFLSGEQKKAIVDLLFKTNRKVTVKQLKEDYFKKIECFDSVEISGVEDRFNASLGTYHDLLKIIKDKDFLDNEENEDILEDIVLTLTLFEDREMIEERLKTYAHLFDDKVMKQLKRRRYTGWGRLSRKLINGIRDKQSGKTILDFLKSDGFANRNFMQLIHDDSLTFKEDIQKAQVSGQGDSLHEHIANLAGSPAIKKGILQTVKVVDELVKVMGRHKPENIVIEMARENQTTQKGQKNSRERMKRIEEGIKELGSQILKEHPVENTQLQNEKLYLYYLQNGRDMYVDQELDINRLSDYDVDHIVPQSFLKDDSIDNKVLTRSDKARGKSDNVPSEEVVKKMKNYWRQLLNAKLITQRKFDNLTKAERGGLSELDKAGFIKRQLVETRQITKHVAQILDSRMNTKYDENDKLIREVKVITLKSKLVSDFRKDFQFYKVREINNYHHAHDAYLNAVVGTALIKKYPKLESEFVYGDYKVYDVRKMIAKSEQEIGKATAKYFFYSNIMNFFKTEITLANGEIRKRPLIETNGETGEIVWDKGRDFATVRKVLSMPQVNIVKKTEVQTGGFSKESILPKRNSDKLIARKKDWDPKKYGGFDSPTVAYSVLVVAKVEKGKSKKLKSVKELLGITIMERSSFEKNPIDFLEAKGYKEVKKDLIIKLPKYSLFELENGRKRMLASAGELQKGNELALPSKYVNFLYLASHYEKLKGSPEDNEQKQLFVEQHKHYLDEIIEQISEFSKRVILADANLDKVLSAYNKHRDKPIREQAENIIHLFTLTNLGAPAAFKYFDTTIDRKRYTSTKEVLDATLIHQSITGLYETRIDLSQLGGDGGGSSPAPGGGGGTLNIEDEYRLHETSKGPDVPLGSTWLSDFPQAWAETGGMGLAVRQAPLIIPLKATSTPVSIKQYPMSQEARLGIKPHIQRLLDQGILVPCQSPWNTPLLPVKKPGTNDYRPVQDLREVNKRVEDIHPTVPNPYNLLSGLPPSHQWYTVLDLKDAFFCLRLHPTSQSLFAFEWRDPEMGISGQLTWTRLPQGFKNSPTLFNEALHRDLADFRIQHPDLILLQYVDDLLLAATSELDCQQGTRALLQTLGDLGYRASAKKAQICQKQVKYLGYLLKEGQRWLTEARKETVMGQPTPKTPRQLREFLGKAGFCRLFIPGFAEMAAPLYPLTKPGTLFEWGPDQQKAYQEIKQALLTAPALGLPDLTKPFELFVDEKQGYAKGVLTQKLGPWRRPVAYLSKKLDPVAAGWPPCLRMVAAIAVLTKDAGKLTMGQPLVILAPHAVEALVKQPPDRWLSNARMTHYQALLLDTDRVQFGPIVALNPATLLPLPEEGLQHDCLDILAEAHGTRPDLTDQPLPDADHTWYTDGSSFLQEGQRKAGAAVTTETEVVWAKALPAGTSAQRAELIALTQALKMAEGKKLNVYTDSRYAFATAHIHGEIYRRRGWLTSEGKEIKNKDEILALLKALFLPKRLSIIHCPGHQKGNRAEARGNRMADQAAREVATRETPETSTLLAGKRTADGSEFEKRTADGSEFESPKKKAKVE

SEQ ID NO: 2581 - protein, 2094 aa, synthetic construct
MPAAKRVKLDGGDKKYSIGLDIGTNSVGWAVITDEYKVPSKKFKVLGNTDRHSIKKNLIGALLFDSGETAEATRLKRTARRRYTRRKNRICYLQEIFSNEMAKVDDSFFHRLEESFLVEEDKKHERHPIFGNIVDEVAYHEKYPTIYHLRKKLVDSTDKADLRLIYLALAHMIKFRGHFLIEGDLNPDNSDVDKLFIQLVQTYNQLFEENPINASGVDAKAILSARLSKSRRLENLIAQLPGEKKNGLFGNLIALSLGLTPNFKSNFDLAEDAKLQLSKDTYDDDLDNLLAQIGDQYADLFLAAKNLSDAILLSDILRVNTEITKAPLSASMIKRYDEHHQDLTLLKALVRQQLPEKYKEIFFDQSKNGYAGYIDGGASQEEFYKFIKPILEKMDGTEELLVKLNREDLLRKQRTFDNGSIPHQIHLGELHAILRRQEDFYPFLKDNREKIEKILTFRIPYYVGPLARGNSRFAWMTRKSEETITPWNFEEVVDKGASAQSFIERMTNFDKNLPNEKVLPKHSLLYEYFTVYNELTKVKYVTEGMRKPAFLSGEQKKAIVDLLFKTNRKVTVKQLKEDYFKKIECFDSVEISGVEDRFNASLGTYHDLLKIIKDKDFLDNEENEDILEDIVLTLTLFEDREMIEERLKTYAHLFDDKVMKQLKRRRYTGWGRLSRKLINGIRDKQSGKTILDFLKSDGFANRNFMQLIHDDSLTFKEDIQKAQVSGQGDSLHEHIANLAGSPAIKKGILQTVKVVDELVKVMGRHKPENIVIEMARENQTTQKGQKNSRERMKRIEEGIKELGSQILKEHPVENTQLQNEKLYLYYLQNGRDMYVDQELDINRLSDYDVDHIVPQSFLKDDSIDNKVLTRSDKARGKSDNVPSEEVVKKMKNYWRQLLNAKLITQRKFDNLTKAERGGLSELDKAGFIKRQLVETRQITKHVAQILDSRMNTKYDENDKLIREVKVITLKSKLVSDFRKDFQFYKVREINNYHHAHDAYLNAVVGTALIKKYPKLESEFVYGDYKVYDVRKMIAKSEQEIGKATAKYFFYSNIMNFFKTEITLANGEIRKRPLIETNGETGEIVWDKGRDFATVRKVLSMPQVNIVKKTEVQTGGFSKESILPKRNSDKLIARKKDWDPKKYGGFDSPTVAYSVLVVAKVEKGKSKKLKSVKELLGITIMERSSFEKNPIDFLEAKGYKEVKKDLIIKLPKYSLFELENGRKRMLASAGELQKGNELALPSKYVNFLYLASHYEKLKGSPEDNEQKQLFVEQHKHYLDEIIEQISEFSKRVILADANLDKVLSAYNKHRDKPIREQAENIIHLFTLTNLGAPAAFKYFDTTIDRKRYTSTKEVLDATLIHQSITGLYETRIDLSQLGGDGGPAPGSSGGSGGTLNIEDEYRLHETSKGPDVPLGSTWLSDFPQAWAETGGMGLAVRQAPLIIPLKATSTPVSIKQYPMSQEARLGIKPHIQRLLDQGILVPCQSPWNTPLLPVKKPGTNDYRPVQDLREVNKRVEDIHPTVPNPYNLLSGLPPSHQWYTVLDLKDAFFCLRLHPTSQSLFAFEWRDPEMGISGQLTWTRLPQGFKNSPTLFNEALHRDLADFRIQHPDLILLQYVDDLLLAATSELDCQQGTRALLQTLGDLGYRASAKKAQICQKQVKYLGYLLKEGQRWLTEARKETVMGQPTPKTPRQLREFLGKAGFCRLFIPGFAEMAAPLYPLTKPGTLFEWGPDQQKAYQEIKQALLTAPALGLPDLTKPFELFVDEKQGYAKGVLTQKLGPWRRPVAYLSKKLDPVAAGWPPCLRMVAAIAVLTKDAGKLTMGQPLVILAPHAVEALVKQPPDRWLSNARMTHYQALLLDTDRVQFGPIVALNPATLLPLPEEGLQHDCLDILAEAHGTRPDLTDQPLPDADHTWYTDGSSFLQEGQRKAGAAVTTETEVVWAKALPAGTSAQRAELIALTQALKMAEGKKLNVYTDSRYAFATAHIHGEIYRRRGWLTSEGKEIKNKDEILALLKALFLPKRLSIIHCPGHQKGNRAEARGNRMADQAAREVATRETPETSTLLAGKRTADGSEFEKRTADGSEFESPKKKAKVE

SEQ ID NO: 2582 - protein, 2096 aa, synthetic construct
MPAAKRVKLDGGDKKYSIGLDIGTNSVGWAVITDEYKVPSKKFKVLGNTDRHSIKKNLIGALLFDSGETAEATRLKRTARRRYTRRKNRICYLQEIFSNEMAKVDDSFFHRLEESFLVEEDKKHERHPIFGNIVDEVAYHEKYPTIYHLRKKLVDSTDKADLRLIYLALAHMIKFRGHFLIEGDLNPDNSDVDKLFIQLVQTYNQLFEENPINASGVDAKAILSARLSKSRRLENLIAQLPGEKKNGLFGNLIALSLGLTPNFKSNFDLAEDAKLQLSKDTYDDDLDNLLAQIGDQYADLFLAAKNLSDAILLSDILRVNTEITKAPLSASMIKRYDEHHQDLTLLKALVRQQLPEKYKEIFFDQSKNGYAGYIDGGASQEEFYKFIKPILEKMDGTEELLVKLNREDLLRKQRTFDNGSIPHQIHLGELHAILRRQEDFYPFLKDNREKIEKILTFRIPYYVGPLARGNSRFAWMTRKSEETITPWNFEEVVDKGASAQSFIERMTNFDKNLPNEKVLPKHSLLYEYFTVYNELTKVKYVTEGMRKPAFLSGEQKKAIVDLLFKTNRKVTVKQLKEDYFKKIECFDSVEISGVEDRFNASLGTYHDLLKIIKDKDFLDNEENEDILEDIVLTLTLFEDREMIEERLKTYAHLFDDKVMKQLKRRRYTGWGRLSRKLINGIRDKQSGKTILDFLKSDGFANRNFMQLIHDDSLTFKEDIQKAQVSGQGDSLHEHIANLAGSPAIKKGILQTVKVVDELVKVMGRHKPENIVIEMARENQTTQKGQKNSRERMKRIEEGIKELGSQILKEHPVENTQLQNEKLYLYYLQNGRDMYVDQELDINRLSDYDVDHIVPQSFLKDDSIDNKVLTRSDKARGKSDNVPSEEVVKKMKNYWRQLLNAKLITQRKFDNLTKAERGGLSELDKAGFIKRQLVETRQITKHVAQILDSRMNTKYDENDKLIREVKVITLKSKLVSDFRKDFQFYKVREINNYHHAHDAYLNAVVGTALIKKYPKLESEFVYGDYKVYDVRKMIAKSEQEIGKATAKYFFYSNIMNFFKTEITLANGEIRKRPLIETNGETGEIVWDKGRDFATVRKVLSMPQVNIVKKTEVQTGGFSKESILPKRNSDKLIARKKDWDPKKYGGFDSPTVAYSVLVVAKVEKGKSKKLKSVKELLGITIMERSSFEKNPIDFLEAKGYKEVKKDLIIKLPKYSLFELENGRKRMLASAGELQKGNELALPSKYVNFLYLASHYEKLKGSPEDNEQKQLFVEQHKHYLDEIIEQISEFSKRVILADANLDKVLSAYNKHRDKPIREQAENIIHLFTLTNLGAPAAFKYFDTTIDRKRYTSTKEVLDATLIHQSITGLYETRIDLSQLGGDGGEAAAKGGGGGSGGTLNIEDEYRLHETSKGPDVPLGSTWLSDFPQAWAETGGMGLAVRQAPLIIPLKATSTPVSIKQYPMSQEARLGIKPHIQRLLDQGILVPCQSPWNTPLLPVKKPGTNDYRPVQDLREVNKRVEDIHPTVPNPYNLLSGLPPSHQWYTVLDLKDAFFCLRLHPTSQSLFAFEWRDPEMGISGQLTWTRLPQGFKNSPTLFNEALHRDLADFRIQHPDLILLQYVDDLLLAATSELDCQQGTRALLQTLGDLGYRASAKKAQICQKQVKYLGYLLKEGQRWLTEARKETVMGQPTPKTPRQLREFLGKAGFCRLFIPGFAEMAAPLYPLTKPGTLFEWGPDQQKAYQEIKQALLTAPALGLPDLTKPFELFVDEKQGYAKGVLTQKLGPWRRPVAYLSKKLDPVAAGWPPCLRMVAAIAVLTKDAGKLTMGQPLVILAPHAVEALVKQPPDRWLSNARMTHYQALLLDTDRVQFGPIVALNPATLLPLPEEGLQHDCLDILAEAHGTRPDLTDQPLPDADHTWYTDGSSFLQEGQRKAGAAVTTETEVVWAKALPAGTSAQRAELIALTQALKMAEGKKLNVYTDSRYAFATAHIHGEIYRRRGWLTSEGKEIKNKDEILALLKALFLPKRLSIIHCPGHQKGNRAEARGNRMADQAAREVATRETPETSTLLAGKRTADGSEFEKRTADGSEFESPKKKAKVE

SEQ ID NO: 2583 - protein, 2097 aa, synthetic construct
MPAAKRVKLDGGDKKYSIGLDIGTNSVGWAVITDEYKVPSKKFKVLGNTDRHSIKKNLIGALLFDSGETAEATRLKRTARRRYTRRKNRICYLQEIFSNEMAKVDDSFFHRLEESFLVEEDKKHERHPIFGNIVDEVAYHEKYPTIYHLRKKLVDSTDKADLRLIYLALAHMIKFRGHFLIEGDLNPDNSDVDKLFIQLVQTYNQLFEENPINASGVDAKAILSARLSKSRRLENLIAQLPGEKKNGLFGNLIALSLGLTPNFKSNFDLAEDAKLQLSKDTYDDDLDNLLAQIGDQYADLFLAAKNLSDAILLSDILRVNTEITKAPLSASMIKRYDEHHQDLTLLKALVRQQLPEKYKEIFFDQSKNGYAGYIDGGASQEEFYKFIKPILEKMDGTEELLVKLNREDLLRKQRTFDNGSIPHQIHLGELHAILRRQEDFYPFLKDNREKIEKILTFRIPYYVGPLARGNSRFAWMTRKSEETITPWNFEEVVDKGASAQSFIERMTNFDKNLPNEKVLPKHSLLYEYFTVYNELTKVKYVTEGMRKPAFLSGEQKKAIVDLLFKTNRKVTVKQLKEDYFKKIECFDSVEISGVEDRFNASLGTYHDLLKIIKDKDFLDNEENEDILEDIVLTLTLFEDREMIEERLKTYAHLFDDKVMKQLKRRRYTGWGRLSRKLINGIRDKQSGKTILDFLKSDGFANRNFMQLIHDDSLTFKEDIQKAQVSGQGDSLHEHIANLAGSPAIKKGILQTVKVVDELVKVMGRHKPENIVIEMARENQTTQKGQKNSRERMKRIEEGIKELGSQILKEHPVENTQLQNEKLYLYYLQNGRDMYVDQELDINRLSDYDVDHIVPQSFLKDDSIDNKVLTRSDKARGKSDNVPSEEVVKKMKNYWRQLLNAKLITQRKFDNLTKAERGGLSELDKAGFIKRQLVETRQITKHVAQILDSRMNTKYDENDKLIREVKVITLKSKLVSDFRKDFQFYKVREINNYHHAHDAYLNAVVGTALIKKYPKLESEFVYGDYKVYDVRKMIAKSEQEIGKATAKYFFYSNIMNFFKTEITLANGEIRKRPLIETNGETGEIVWDKGRDFATVRKVLSMPQVNIVKKTEVQTGGFSKESILPKRNSDKLIARKKDWDPKKYGGFDSPTVAYSVLVVAKVEKGKSKKLKSVKELLGITIMERSSFEKNPIDFLEAKGYKEVKKDLIIKLPKYSLFELENGRKRMLASAGELQKGNELALPSKYVNFLYLASHYEKLKGSPEDNEQKQLFVEQHKHYLDEIIEQISEFSKRVILADANLDKVLSAYNKHRDKPIREQAENIIHLFTLTNLGAPAAFKYFDTTIDRKRYTSTKEVLDATLIHQSITGLYETRIDLSQLGGDGGGSAGSAAGSGEFGGTLNIEDEYRLHETSKGPDVPLGSTWLSDFPQAWAETGGMGLAVRQAPLIIPLKATSTPVSIKQYPMSQEARLGIKPHIQRLLDQGILVPCQSPWNTPLLPVKKPGTNDYRPVQDLREVNKRVEDIHPTVPNPYNLLSGLPPSHQWYTVLDLKDAFFCLRLHPTSQSLFAFEWRDPEMGISGQLTWTRLPQGFKNSPTLFNEALHRDLADFRIQHPDLILLQYVDDLLLAATSELDCQQGTRALLQTLGDLGYRASAKKAQICQKQVKYLGYLLKEGQRWLTEARKETVMGQPTPKTPRQLREFLGKAGFCRLFIPGFAEMAAPLYPLTKPGTLFEWGPDQQKAYQEIKQALLTAPALGLPDLTKPFELFVDEKQGYAKGVLTQKLGPWRRPVAYLSKKLDPVAAGWPPCLRMVAAIAVLTKDAGKLTMGQPLVILAPHAVEALVKQPPDRWLSNARMTHYQALLLDTDRVQFGPIVALNPATLLPLPEEGLQHDCLDILAEAHGTRPDLTDQPLPDADHTWYTDGSSFLQEGQRKAGAAVTTETEVVWAKALPAGTSAQRAELIALTQALKMAEGKKLNVYTDSRYAFATAHIHGEIYRRRGWLTSEGKEIKNKDEILALLKALFLPKRLSIIHCPGHQKGNRAEARGNRMADQAAREVATRETPETSTLLAGKRTADGSEFEKRTADGSEFESPKKKAKVE

SEQ ID NO: 2584 - protein, 2093 aa, synthetic construct
MPAAKRVKLDGGDKKYSIGLDIGTNSVGWAVITDEYKVPSKKFKVLGNTDRHSIKKNLIGALLFDSGETAEATRLKRTARRRYTRRKNRICYLQEIFSNEMAKVDDSFFHRLEESFLVEEDKKHERHPIFGNIVDEVAYHEKYPTIYHLRKKLVDSTDKADLRLIYLALAHMIKFRGHFLIEGDLNPDNSDVDKLFIQLVQTYNQLFEENPINASGVDAKAILSARLSKSRRLENLIAQLPGEKKNGLFGNLIALSLGLTPNFKSNFDLAEDAKLQLSKDTYDDDLDNLLAQIGDQYADLFLAAKNLSDAILLSDILRVNTEITKAPLSASMIKRYDEHHQDLTLLKALVRQQLPEKYKEIFFDQSKNGYAGYIDGGASQEEFYKFIKPILEKMDGTEELLVKLNREDLLRKQRTFDNGSIPHQIHLGELHAILRRQEDFYPFLKDNREKIEKILTFRIPYYVGPLARGNSRFAWMTRKSEETITPWNFEEVVDKGASAQSFIERMTNFDKNLPNEKVLPKHSLLYEYFTVYNELTKVKYVTEGMRKPAFLSGEQKKAIVDLLFKTNRKVTVKQLKEDYFKKIECFDSVEISGVEDRFNASLGTYHDLLKIIKDKDFLDNEENEDILEDIVLTLTLFEDREMIEERLKTYAHLFDDKVMKQLKRRRYTGWGRLSRKLINGIRDKQSGKTILDFLKSDGFANRNFMQLIHDDSLTFKEDIQKAQVSGQGDSLHEHIANLAGSPAIKKGILQTVKVVDELVKVMGRHKPENIVIEMARENQTTQKGQKNSRERMKRIEEGIKELGSQILKEHPVENTQLQNEKLYLYYLQNGRDMYVDQELDINRLSDYDVDHIVPQSFLKDDSIDNKVLTRSDKARGKSDNVPSEEVVKKMKNYWRQLLNAKLITQRKFDNLTKAERGGLSELDKAGFIKRQLVETRQITKHVAQILDSRMNTKYDENDKLIREVKVITLKSKLVSDFRKDFQFYKVREINNYHHAHDAYLNAVVGTALIKKYPKLESEFVYGDYKVYDVRKMIAKSEQEIGKATAKYFFYSNIMNFFKTEITLANGEIRKRPLIETNGETGEIVWDKGRDFATVRKVLSMPQVNIVKKTEVQTGGFSKESILPKRNSDKLIARKKDWDPKKYGGFDSPTVAYSVLVVAKVEKGKSKKLKSVKELLGITIMERSSFEKNPIDFLEAKGYKEVKKDLIIKLPKYSLFELENGRKRMLASAGELQKGNELALPSKYVNFLYLASHYEKLKGSPEDNEQKQLFVEQHKHYLDEIIEQISEFSKRVILADANLDKVLSAYNKHRDKPIREQAENIIHLFTLTNLGAPAAFKYFDTTIDRKRYTSTKEVLDATLIHQSITGLYETRIDLSQLGGDGGEAAAKGGSGGTLNIEDEYRLHETSKGPDVPLGSTWLSDFPQAWAETGGMGLAVRQAPLIIPLKATSTPVSIKQYPMSQEARLGIKPHIQRLLDQGILVPCQSPWNTPLLPVKKPGTNDYRPVQDLREVNKRVEDIHPTVPNPYNLLSGLPPSHQWYTVLDLKDAFFCLRLHPTSQSLFAFEWRDPEMGISGQLTWTRLPQGFKNSPTLFNEALHRDLADFRIQHPDLILLQYVDDLLLAATSELDCQQGTRALLQTLGDLGYRASAKKAQICQKQVKYLGYLLKEGQRWLTEARKETVMGQPTPKTPRQLREFLGKAGFCRLFIPGFAEMAAPLYPLTKPGTLFEWGPDQQKAYQEIKQALLTAPALGLPDLTKPFELFVDEKQGYAKGVLTQKLGPWRRPVAYLSKKLDPVAAGWPPCLRMVAAIAVLTKDAGKLTMGQPLVILAPHAVEALVKQPPDRWLSNARMTHYQALLLDTDRVQFGPIVALNPATLLPLPEEGLQHDCLDILAEAHGTRPDLTDQPLPDADHTWYTDGSSFLQEGQRKAGAAVTTETEVVWAKALPAGTSAQRAELIALTQALKMAEGKKLNVYTDSRYAFATAHIHGEIYRRRGWLTSEGKEIKNKDEILALLKALFLPKRLSIIHCPGHQKGNRAEARGNRMADQAAREVATRETPETSTLLAGKRTADGSEFEKRTADGSEFESPKKKAKVE

SEQ ID NO: 2585 - protein, 2093 aa, synthetic construct
MPAAKRVKLDGGDKKYSIGLDIGTNSVGWAVITDEYKVPSKKFKVLGNTDRHSIKKNLIGALLFDSGETAEATRLKRTARRRYTRRKNRICYLQEIFSNEMAKVDDSFFHRLEESFLVEEDKKHERHPIFGNIVDEVAYHEKYPTIYHLRKKLVDSTDKADLRLIYLALAHMIKFRGHFLIEGDLNPDNSDVDKLFIQLVQTYNQLFEENPINASGVDAKAILSARLSKSRRLENLIAQLPGEKKNGLFGNLIALSLGLTPNFKSNFDLAEDAKLQLSKDTYDDDLDNLLAQIGDQYADLFLAAKNLSDAILLSDILRVNTEITKAPLSASMIKRYDEHHQDLTLLKALVRQQLPEKYKEIFFDQSKNGYAGYIDGGASQEEFYKFIKPILEKMDGTEELLVKLNREDLLRKQRTFDNGSIPHQIHLGELHAILRRQEDFYPFLKDNREKIEKILTFRIPYYVGPLARGNSRFAWMTRKSEETITPWNFEEVVDKGASAQSFIERMTNFDKNLPNEKVLPKHSLLYEYFTVYNELTKVKYVTEGMRKPAFLSGEQKKAIVDLLFKTNRKVTVKQLKEDYFKKIECFDSVEISGVEDRFNASLGTYHDLLKIIKDKDFLDNEENEDILEDIVLTLTLFEDREMIEERLKTYAHLFDDKVMKQLKRRRYTGWGRLSRKLINGIRDKQSGKTILDFLKSDGFANRNFMQLIHDDSLTFKEDIQKAQVSGQGDSLHEHIANLAGSPAIKKGILQTVKVVDELVKVMGRHKPENIVIEMARENQTTQKGQKNSRERMKRIEEGIKELGSQILKEHPVENTQLQNEKLYLYYLQNGRDMYVDQELDINRLSDYDVDHIVPQSFLKDDSIDNKVLTRSDKARGKSDNVPSEEVVKKMKNYWRQLLNAKLITQRKFDNLTKAERGGLSELDKAGFIKRQLVETRQITKHVAQILDSRMNTKYDENDKLIREVKVITLKSKLVSDFRKDFQFYKVREINNYHHAHDAYLNAVVGTALIKKYPKLESEFVYGDYKVYDVRKMIAKSEQEIGKATAKYFFYSNIMNFFKTEITLANGEIRKRPLIETNGETGEIVWDKGRDFATVRKVLSMPQVNIVKKTEVQTGGFSKESILPKRNSDKLIARKKDWDPKKYGGFDSPTVAYSVLVVAKVEKGKSKKLKSVKELLGITIMERSSFEKNPIDFLEAKGYKEVKKDLIIKLPKYSLFELENGRKRMLASAGELQKGNELALPSKYVNFLYLASHYEKLKGSPEDNEQKQLFVEQHKHYLDEIIEQISEFSKRVILADANLDKVLSAYNKHRDKPIREQAENIIHLFTLTNLGAPAAFKYFDTTIDRKRYTSTKEVLDATLIHQSITGLYETRIDLSQLGGDGGEAAAKGSSGGTLNIEDEYRLHETSKGPDVPLGSTWLSDFPQAWAETGGMGLAVRQAPLIIPLKATSTPVSIKQYPMSQEARLGIKPHIQRLLDQGILVPCQSPWNTPLLPVKKPGTNDYRPVQDLREVNKRVEDIHPTVPNPYNLLSGLPPSHQWYTVLDLKDAFFCLRLHPTSQSLFAFEWRDPEMGISGQLTWTRLPQGFKNSPTLFNEALHRDLADFRIQHPDLILLQYVDDLLLAATSELDCQQGTRALLQTLGDLGYRASAKKAQICQKQVKYLGYLLKEGQRWLTEARKETVMGQPTPKTPRQLREFLGKAGFCRLFIPGFAEMAAPLYPLTKPGTLFEWGPDQQKAYQEIKQALLTAPALGLPDLTKPFELFVDEKQGYAKGVLTQKLGPWRRPVAYLSKKLDPVAAGWPPCLRMVAAIAVLTKDAGKLTMGQPLVILAPHAVEALVKQPPDRWLSNARMTHYQALLLDTDRVQFGPIVALNPATLLPLPEEGLQHDCLDILAEAHGTRPDLTDQPLPDADHTWYTDGSSFLQEGQRKAGAAVTTETEVVWAKALPAGTSAQRAELIALTQALKMAEGKKLNVYTDSRYAFATAHIHGEIYRRRGWLTSEGKEIKNKDEILALLKALFLPKRLSIIHCPGHQKGNRAEARGNRMADQAAREVATRETPETSTLLAGKRTADGSEFEKRTADGSEFESPKKKAKVE

SEQ ID NO: 2586 - protein, 2091 aa, synthetic construct
MPAAKRVKLDGGDKKYSIGLDIGTNSVGWAVITDEYKVPSKKFKVLGNTDRHSIKKNLIGALLFDSGETAEATRLKRTARRRYTRRKNRICYLQEIFSNEMAKVDDSFFHRLEESFLVEEDKKHERHPIFGNIVDEVAYHEKYPTIYHLRKKLVDSTDKADLRLIYLALAHMIKFRGHFLIEGDLNPDNSDVDKLFIQLVQTYNQLFEENPINASGVDAKAILSARLSKSRRLENLIAQLPGEKKNGLFGNLIALSLGLTPNFKSNFDLAEDAKLQLSKDTYDDDLDNLLAQIGDQYADLFLAAKNLSDAILLSDILRVNTEITKAPLSASMIKRYDEHHQDLTLLKALVRQQLPEKYKEIFFDQSKNGYAGYIDGGASQEEFYKFIKPILEKMDGTEELLVKLNREDLLRKQRTFDNGSIPHQIHLGELHAILRRQEDFYPFLKDNREKIEKILTFRIPYYVGPLARGNSRFAWMTRKSEETITPWNFEEVVDKGASAQSFIERMTNFDKNLPNEKVLPKHSLLYEYFTVYNELTKVKYVTEGMRKPAFLSGEQKKAIVDLLFKTNRKVTVKQLKEDYFKKIECFDSVEISGVEDRFNASLGTYHDLLKIIKDKDFLDNEENEDILEDIVLTLTLFEDREMIEERLKTYAHLFDDKVMKQLKRRRYTGWGRLSRKLINGIRDKQSGKTILDFLKSDGFANRNFMQLIHDDSLTFKEDIQKAQVSGQGDSLHEHIANLAGSPAIKKGILQTVKVVDELVKVMGRHKPENIVIEMARENQTTQKGQKNSRERMKRIEEGIKELGSQILKEHPVENTQLQNEKLYLYYLQNGRDMYVDQELDINRLSDYDVDHIVPQSFLKDDSIDNKVLTRSDKARGKSDNVPSEEVVKKMKNYWRQLLNAKLITQRKFDNLTKAERGGLSELDKAGFIKRQLVETRQITKHVAQILDSRMNTKYDENDKLIREVKVITLKSKLVSDFRKDFQFYKVREINNYHHAHDAYLNAVVGTALIKKYPKLESEFVYGDYKVYDVRKMIAKSEQEIGKATAKYFFYSNIMNFFKTEITLANGEIRKRPLIETNGETGEIVWDKGRDFATVRKVLSMPQVNIVKKTEVQTGGFSKESILPKRNSDKLIARKKDWDPKKYGGFDSPTVAYSVLVVAKVEKGKSKKLKSVKELLGITIMERSSFEKNPIDFLEAKGYKEVKKDLIIKLPKYSLFELENGRKRMLASAGELQKGNELALPSKYVNFLYLASHYEKLKGSPEDNEQKQLFVEQHKHYLDEIIEQISEFSKRVILADANLDKVLSAYNKHRDKPIREQAENIIHLFTLTNLGAPAAFKYFDTTIDRKRYTSTKEVLDATLIHQSITGLYETRIDLSQLGGDGGGGGGSSGGTLNIEDEYRLHETSKGPDVPLGSTWLSDFPQAWAETGGMGLAVRQAPLIIPLKATSTPVSIKQYPMSQEARLGIKPHIQRLLDQGILVPCQSPWNTPLLPVKKPGTNDYRPVQDLREVNKRVEDIHPTVPNPYNLLSGLPPSHQWYTVLDLKDAFFCLRLHPTSQSLFAFEWRDPEMGISGQLTWTRLPQGFKNSPTLFNEALHRDLADFRIQHPDLILLQYVDDLLLAATSELDCQQGTRALLQTLGDLGYRASAKKAQICQKQVKYLGYLLKEGQRWLTEARKETVMGQPTPKTPRQLREFLGKAGFCRLFIPGFAEMAAPLYPLTKPGTLFEWGPDQQKAYQEIKQALLTAPALGLPDLTKPFELFVDEKQGYAKGVLTQKLGPWRRPVAYLSKKLDPVAAGWPPCLRMVAAIAVLTKDAGKLTMGQPLVILAPHAVEALVKQPPDRWLSNARMTHYQALLLDTDRVQFGPIVALNPATLLPLPEEGLQHDCLDILAEAHGTRPDLTDQPLPDADHTWYTDGSSFLQEGQRKAGAAVTTETEVVWAKALPAGTSAQRAELIALTQALKMAEGKKLNVYTDSRYAFATAHIHGEIYRRRGWLTSEGKEIKNKDEILALLKALFLPKRLSIIHCPGHQKGNRAEARGNRMADQAAREVATRETPETSTLLAGKRTADGSEFEKRTADGSEFESPKKKAKVE

SEQ ID NO: 2587 - protein, 2093 aa, synthetic construct
MPAAKRVKLDGGDKKYSIGLDIGTNSVGWAVITDEYKVPSKKFKVLGNTDRHSIKKNLIGALLFDSGETAEATRLKRTARRRYTRRKNRICYLQEIFSNEMAKVDDSFFHRLEESFLVEEDKKHERHPIFGNIVDEVAYHEKYPTIYHLRKKLVDSTDKADLRLIYLALAHMIKFRGHFLIEGDLNPDNSDVDKLFIQLVQTYNQLFEENPINASGVDAKAILSARLSKSRRLENLIAQLPGEKKNGLFGNLIALSLGLTPNFKSNFDLAEDAKLQLSKDTYDDDLDNLLAQIGDQYADLFLAAKNLSDAILLSDILRVNTEITKAPLSASMIKRYDEHHQDLTLLKALVRQQLPEKYKEIFFDQSKNGYAGYIDGGASQEEFYKFIKPILEKMDGTEELLVKLNREDLLRKQRTFDNGSIPHQIHLGELHAILRRQEDFYPFLKDNREKIEKILTFRIPYYVGPLARGNSRFAWMTRKSEETITPWNFEEVVDKGASAQSFIERMTNFDKNLPNEKVLPKHSLLYEYFTVYNELTKVKYVTEGMRKPAFLSGEQKKAIVDLLFKTNRKVTVKQLKEDYFKKIECFDSVEISGVEDRFNASLGTYHDLLKIIKDKDFLDNEENEDILEDIVLTLTLFEDREMIEERLKTYAHLFDDKVMKQLKRRRYTGWGRLSRKLINGIRDKQSGKTILDFLKSDGFANRNFMQLIHDDSLTFKEDIQKAQVSGQGDSLHEHIANLAGSPAIKKGILQTVKVVDELVKVMGRHKPENIVIEMARENQTTQKGQKNSRERMKRIEEGIKELGSQILKEHPVENTQLQNEKLYLYYLQNGRDMYVDQELDINRLSDYDVDHIVPQSFLKDDSIDNKVLTRSDKARGKSDNVPSEEVVKKMKNYWRQLLNAKLITQRKFDNLTKAERGGLSELDKAGFIKRQLVETRQITKHVAQILDSRMNTKYDENDKLIREVKVITLKSKLVSDFRKDFQFYKVREINNYHHAHDAYLNAVVGTALIKKYPKLESEFVYGDYKVYDVRKMIAKSEQEIGKATAKYFFYSNIMNFFKTEITLANGEIRKRPLIETNGETGEIVWDKGRDFATVRKVLSMPQVNIVKKTEVQTGGFSKESILPKRNSDKLIARKKDWDPKKYGGFDSPTVAYSVLVVAKVEKGKSKKLKSVKELLGITIMERSSFEKNPIDFLEAKGYKEVKKDLIIKLPKYSLFELENGRKRMLASAGELQKGNELALPSKYVNFLYLASHYEKLKGSPEDNEQKQLFVEQHKHYLDEIIEQISEFSKRVILADANLDKVLSAYNKHRDKPIREQAENIIHLFTLTNLGAPAAFKYFDTTIDRKRYTSTKEVLDATLIHQSITGLYETRIDLSQLGGDGGEAAAKPAPGGTLNIEDEYRLHETSKGPDVPLGSTWLSDFPQAWAETGGMGLAVRQAPLIIPLKATSTPVSIKQYPMSQEARLGIKPHIQRLLDQGILVPCQSPWNTPLLPVKKPGTNDYRPVQDLREVNKRVEDIHPTVPNPYNLLSGLPPSHQWYTVLDLKDAFFCLRLHPTSQSLFAFEWRDPEMGISGQLTWTRLPQGFKNSPTLFNEALHRDLADFRIQHPDLILLQYVDDLLLAATSELDCQQGTRALLQTLGDLGYRASAKKAQICQKQVKYLGYLLKEGQRWLTEARKETVMGQPTPKTPRQLREFLGKAGFCRLFIPGFAEMAAPLYPLTKPGTLFEWGPDQQKAYQEIKQALLTAPALGLPDLTKPFELFVDEKQGYAKGVLTQKLGPWRRPVAYLSKKLDPVAAGWPPCLRMVAAIAVLTKDAGKLTMGQPLVILAPHAVEALVKQPPDRWLSNARMTHYQALLLDTDRVQFGPIVALNPATLLPLPEEGLQHDCLDILAEAHGTRPDLTDQPLPDADHTWYTDGSSFLQEGQRKAGAAVTTETEVVWAKALPAGTSAQRAELIALTQALKMAEGKKLNVYTDSRYAFATAHIHGEIYRRRGWLTSEGKEIKNKDEILALLKALFLPKRLSIIHCPGHQKGNRAEARGNRMADQAAREVATRETPETSTLLAGKRTADGSEFEKRTADGSEFESPKKKAKVE

SEQ ID NO: 2588 - protein, 2094 aa, synthetic construct
MPAAKRVKLDGGDKKYSIGLDIGTNSVGWAVITDEYKVPSKKFKVLGNTDRHSIKKNLIGALLFDSGETAEATRLKRTARRRYTRRKNRICYLQEIFSNEMAKVDDSFFHRLEESFLVEEDKKHERHPIFGNIVDEVAYHEKYPTIYHLRKKLVDSTDKADLRLIYLALAHMIKFRGHFLIEGDLNPDNSDVDKLFIQLVQTYNQLFEENPINASGVDAKAILSARLSKSRRLENLIAQLPGEKKNGLFGNLIALSLGLTPNFKSNFDLAEDAKLQLSKDTYDDDLDNLLAQIGDQYADLFLAAKNLSDAILLSDILRVNTEITKAPLSASMIKRYDEHHQDLTLLKALVRQQLPEKYKEIFFDQSKNGYAGYIDGGASQEEFYKFIKPILEKMDGTEELLVKLNREDLLRKQRTFDNGSIPHQIHLGELHAILRRQEDFYPFLKDNREKIEKILTFRIPYYVGPLARGNSRFAWMTRKSEETITPWNFEEVVDKGASAQSFIERMTNFDKNLPNEKVLPKHSLLYEYFTVYNELTKVKYVTEGMRKPAFLSGEQKKAIVDLLFKTNRKVTVKQLKEDYFKKIECFDSVEISGVEDRFNASLGTYHDLLKIIKDKDFLDNEENEDILEDIVLTLTLFEDREMIEERLKTYAHLFDDKVMKQLKRRRYTGWGRLSRKLINGIRDKQSGKTILDFLKSDGFANRNFMQLIHDDSLTFKEDIQKAQVSGQGDSLHEHIANLAGSPAIKKGILQTVKVVDELVKVMGRHKPENIVIEMARENQTTQKGQKNSRERMKRIEEGIKELGSQILKEHPVENTQLQNEKLYLYYLQNGRDMYVDQELDINRLSDYDVDHIVPQSFLKDDSIDNKVLTRSDKARGKSDNVPSEEVVKKMKNYWRQLLNAKLITQRKFDNLTKAERGGLSELDKAGFIKRQLVETRQITKHVAQILDSRMNTKYDENDKLIREVKVITLKSKLVSDFRKDFQFYKVREINNYHHAHDAYLNAVVGTALIKKYPKLESEFVYGDYKVYDVRKMIAKSEQEIGKATAKYFFYSNIMNFFKTEITLANGEIRKRPLIETNGETGEIVWDKGRDFATVRKVLSMPQVNIVKKTEVQTGGFSKESILPKRNSDKLIARKKDWDPKKYGGFDSPTVAYSVLVVAKVEKGKSKKLKSVKELLGITIMERSSFEKNPIDFLEAKGYKEVKKDLIIKLPKYSLFELENGRKRMLASAGELQKGNELALPSKYVNFLYLASHYEKLKGSPEDNEQKQLFVEQHKHYLDEIIEQISEFSKRVILADANLDKVLSAYNKHRDKPIREQAENIIHLFTLTNLGAPAAFKYFDTTIDRKRYTSTKEVLDATLIHQSITGLYETRIDLSQLGGDGGGGGGGSPAPGGTLNIEDEYRLHETSKGPDVPLGSTWLSDFPQAWAETGGMGLAVRQAPLIIPLKATSTPVSIKQYPMSQEARLGIKPHIQRLLDQGILVPCQSPWNTPLLPVKKPGTNDYRPVQDLREVNKRVEDIHPTVPNPYNLLSGLPPSHQWYTVLDLKDAFFCLRLHPTSQSLFAFEWRDPEMGISGQLTWTRLPQGFKNSPTLFNEALHRDLADFRIQHPDLILLQYVDDLLLAATSELDCQQGTRALLQTLGDLGYRASAKKAQICQKQVKYLGYLLKEGQRWLTEARKETVMGQPTPKTPRQLREFLGKAGFCRLFIPGFAEMAAPLYPLTKPGTLFEWGPDQQKAYQEIKQALLTAPALGLPDLTKPFELFVDEKQGYAKGVLTQKLGPWRRPVAYLSKKLDPVAAGWPPCLRMVAAIAVLTKDAGKLTMGQPLVILAPHAVEALVKQPPDRWLSNARMTHYQALLLDTDRVQFGPIVALNPATLLPLPEEGLQHDCLDILAEAHGTRPDLTDQPLPDADHTWYTDGSSFLQEGQRKAGAAVTTETEVVWAKALPAGTSAQRAELIALTQALKMAEGKKLNVYTDSRYAFATAHIHGEIYRRRGWLTSEGKEIKNKDEILALLKALFLPKRLSIIHCPGHQKGNRAEARGNRMADQAAREVATRETPETSTLLAGKRTADGSEFEKRTADGSEFESPKKKAKVE

SEQ ID NO: 2589 - protein, 2094 aa, synthetic construct
MPAAKRVKLDGGDKKYSIGLDIGTNSVGWAVITDEYKVPSKKFKVLGNTDRHSIKKNLIGALLFDSGETAEATRLKRTARRRYTRRKNRICYLQEIFSNEMAKVDDSFFHRLEESFLVEEDKKHERHPIFGNIVDEVAYHEKYPTIYHLRKKLVDSTDKADLRLIYLALAHMIKFRGHFLIEGDLNPDNSDVDKLFIQLVQTYNQLFEENPINASGVDAKAILSARLSKSRRLENLIAQLPGEKKNGLFGNLIALSLGLTPNFKSNFDLAEDAKLQLSKDTYDDDLDNLLAQIGDQYADLFLAAKNLSDAILLSDILRVNTEITKAPLSASMIKRYDEHHQDLTLLKALVRQQLPEKYKEIFFDQSKNGYAGYIDGGASQEEFYKFIKPILEKMDGTEELLVKLNREDLLRKQRTFDNGSIPHQIHLGELHAILRRQEDFYPFLKDNREKIEKILTFRIPYYVGPLARGNSRFAWMTRKSEETITPWNFEEVVDKGASAQSFIERMTNFDKNLPNEKVLPKHSLLYEYFTVYNELTKVKYVTEGMRKPAFLSGEQKKAIVDLLFKTNRKVTVKQLKEDYFKKIECFDSVEISGVEDRFNASLGTYHDLLKIIKDKDFLDNEENEDILEDIVLTLTLFEDREMIEERLKTYAHLFDDKVMKQLKRRRYTGWGRLSRKLINGIRDKQSGKTILDFLKSDGFANRNFMQLIHDDSLTFKEDIQKAQVSGQGDSLHEHIANLAGSPAIKKGILQTVKVVDELVKVMGRHKPENIVIEMARENQTTQKGQKNSRERMKRIEEGIKELGSQILKEHPVENTQLQNEKLYLYYLQNGRDMYVDQELDINRLSDYDVDHIVPQSFLKDDSIDNKVLTRSDKARGKSDNVPSEEVVKKMKNYWRQLLNAKLITQRKFDNLTKAERGGLSELDKAGFIKRQLVETRQITKHVAQILDSRMNTKYDENDKLIREVKVITLKSKLVSDFRKDFQFYKVREINNYHHAHDAYLNAVVGTALIKKYPKLESEFVYGDYKVYDVRKMIAKSEQEIGKATAKYFFYSNIMNFFKTEITLANGEIRKRPLIETNGETGEIVWDKGRDFATVRKVLSMPQVNIVKKTEVQTGGFSKESILPKRNSDKLIARKKDWDPKKYGGFDSPTVAYSVLVVAKVEKGKSKKLKSVKELLGITIMERSSFEKNPIDFLEAKGYKEVKKDLIIKLPKYSLFELENGRKRMLASAGELQKGNELALPSKYVNFLYLASHYEKLKGSPEDNEQKQLFVEQHKHYLDEIIEQISEFSKRVILADANLDKVLSAYNKHRDKPIREQAENIIHLFTLTNLGAPAAFKYFDTTIDRKRYTSTKEVLDATLIHQSITGLYETRIDLSQLGGDGGGGGGSSPAPGGTLNIEDEYRLHETSKGPDVPLGSTWLSDFPQAWAETGGMGLAVRQAPLIIPLKATSTPVSIKQYPMSQEARLGIKPHIQRLLDQGILVPCQSPWNTPLLPVKKPGTNDYRPVQDLREVNKRVEDIHPTVPNPYNLLSGLPPSHQWYTVLDLKDAFFCLRLHPTSQSLFAFEWRDPEMGISGQLTWTRLPQGFKNSPTLFNEALHRDLADFRIQHPDLILLQYVDDLLLAATSELDCQQGTRALLQTLGDLGYRASAKKAQICQKQVKYLGYLLKEGQRWLTEARKETVMGQPTPKTPRQLREFLGKAGFCRLFIPGFAEMAAPLYPLTKPGTLFEWGPDQQKAYQEIKQALLTAPALGLPDLTKPFELFVDEKQGYAKGVLTQKLGPWRRPVAYLSKKLDPVAAGWPPCLRMVAAIAVLTKDAGKLTMGQPLVILAPHAVEALVKQPPDRWLSNARMTHYQALLLDTDRVQFGPIVALNPATLLPLPEEGLQHDCLDILAEAHGTRPDLTDQPLPDADHTWYTDGSSFLQEGQRKAGAAVTTETEVVWAKALPAGTSAQRAELIALTQALKMAEGKKLNVYTDSRYAFATAHIHGEIYRRRGWLTSEGKEIKNKDEILALLKALFLPKRLSIIHCPGHQKGNRAEARGNRMADQAAREVATRETPETSTLLAGKRTADGSEFEKRTADGSEFESPKKKAKVE

SEQ ID NO: 2590 - protein, 2091 aa, synthetic construct
MPAAKRVKLDGGDKKYSIGLDIGTNSVGWAVITDEYKVPSKKFKVLGNTDRHSIKKNLIGALLFDSGETAEATRLKRTARRRYTRRKNRICYLQEIFSNEMAKVDDSFFHRLEESFLVEEDKKHERHPIFGNIVDEVAYHEKYPTIYHLRKKLVDSTDKADLRLIYLALAHMIKFRGHFLIEGDLNPDNSDVDKLFIQLVQTYNQLFEENPINASGVDAKAILSARLSKSRRLENLIAQLPGEKKNGLFGNLIALSLGLTPNFKSNFDLAEDAKLQLSKDTYDDDLDNLLAQIGDQYADLFLAAKNLSDAILLSDILRVNTEITKAPLSASMIKRYDEHHQDLTLLKALVRQQLPEKYKEIFFDQSKNGYAGYIDGGASQEEFYKFIKPILEKMDGTEELLVKLNREDLLRKQRTFDNGSIPHQIHLGELHAILRRQEDFYPFLKDNREKIEKILTFRIPYYVGPLARGNSRFAWMTRKSEETITPWNFEEVVDKGASAQSFIERMTNFDKNLPNEKVLPKHSLLYEYFTVYNELTKVKYVTEGMRKPAFLSGEQKKAIVDLLFKTNRKVTVKQLKEDYFKKIECFDSVEISGVEDRFNASLGTYHDLLKIIKDKDFLDNEENEDILEDIVLTLTLFEDREMIEERLKTYAHLFDDKVMKQLKRRRYTGWGRLSRKLINGIRDKQSGKTILDFLKSDGFANRNFMQLIHDDSLTFKEDIQKAQVSGQGDSLHEHIANLAGSPAIKKGILQTVKVVDELVKVMGRHKPENIVIEMARENQTTQKGQKNSRERMKRIEEGIKELGSQILKEHPVENTQLQNEKLYLYYLQNGRDMYVDQELDINRLSDYDVDHIVPQSFLKDDSIDNKVLTRSDKARGKSDNVPSEEVVKKMKNYWRQLLNAKLITQRKFDNLTKAERGGLSELDKAGFIKRQLVETRQITKHVAQILDSRMNTKYDENDKLIREVKVITLKSKLVSDFRKDFQFYKVREINNYHHAHDAYLNAVVGTALIKKYPKLESEFVYGDYKVYDVRKMIAKSEQEIGKATAKYFFYSNIMNFFKTEITLANGEIRKRPLIETNGETGEIVWDKGRDFATVRKVLSMPQVNIVKKTEVQTGGFSKESILPKRNSDKLIARKKDWDPKKYGGFDSPTVAYSVLVVAKVEKGKSKKLKSVKELLGITIMERSSFEKNPIDFLEAKGYKEVKKDLIIKLPKYSLFELENGRKRMLASAGELQKGNELALPSKYVNFLYLASHYEKLKGSPEDNEQKQLFVEQHKHYLDEIIEQISEFSKRVILADANLDKVLSAYNKHRDKPIREQAENIIHLFTLTNLGAPAAFKYFDTTIDRKRYTSTKEVLDATLIHQSITGLYETRIDLSQLGGDGGGSSGGSGGTLNIEDEYRLHETSKGPDVPLGSTWLSDFPQAWAETGGMGLAVRQAPLIIPLKATSTPVSIKQYPMSQEARLGIKPHIQRLLDQGILVPCQSPWNTPLLPVKKPGTNDYRPVQDLREVNKRVEDIHPTVPNPYNLLSGLPPSHQWYTVLDLKDAFFCLRLHPTSQSLFAFEWRDPEMGISGQLTWTRLPQGFKNSPTLFNEALHRDLADFRIQHPDLILLQYVDDLLLAATSELDCQQGTRALLQTLGDLGYRASAKKAQICQKQVKYLGYLLKEGQRWLTEARKETVMGQPTPKTPRQLREFLGKAGFCRLFIPGFAEMAAPLYPLTKPGTLFEWGPDQQKAYQEIKQALLTAPALGLPDLTKPFELFVDEKQGYAKGVLTQKLGPWRRPVAYLSKKLDPVAAGWPPCLRMVAAIAVLTKDAGKLTMGQPLVILAPHAVEALVKQPPDRWLSNARMTHYQALLLDTDRVQFGPIVALNPATLLPLPEEGLQHDCLDILAEAHGTRPDLTDQPLPDADHTWYTDGSSFLQEGQRKAGAAVTTETEVVWAKALPAGTSAQRAELIALTQALKMAEGKKLNVYTDSRYAFATAHIHGEIYRRRGWLTSEGKEIKNKDEILALLKALFLPKRLSIIHCPGHQKGNRAEARGNRMADQAAREVATRETPETSTLLAGKRTADGSEFEKRTADGSEFESPKKKAKVE

SEQ ID NO: 2591 - protein, 2094 aa, synthetic construct
MPAAKRVKLDGGDKKYSIGLDIGTNSVGWAVITDEYKVPSKKFKVLGNTDRHSIKKNLIGALLFDSGETAEATRLKRTARRRYTRRKNRICYLQEIFSNEMAKVDDSFFHRLEESFLVEEDKKHERHPIFGNIVDEVAYHEKYPTIYHLRKKLVDSTDKADLRLIYLALAHMIKFRGHFLIEGDLNPDNSDVDKLFIQLVQTYNQLFEENPINASGVDAKAILSARLSKSRRLENLIAQLPGEKKNGLFGNLIALSLGLTPNFKSNFDLAEDAKLQLSKDTYDDDLDNLLAQIGDQYADLFLAAKNLSDAILLSDILRVNTEITKAPLSASMIKRYDEHHQDLTLLKALVRQQLPEKYKEIFFDQSKNGYAGYIDGGASQEEFYKFIKPILEKMDGTEELLVKLNREDLLRKQRTFDNGSIPHQIHLGELHAILRRQEDFYPFLKDNREKIEKILTFRIPYYVGPLARGNSRFAWMTRKSEETITPWNFEEVVDKGASAQSFIERMTNFDKNLPNEKVLPKHSLLYEYFTVYNELTKVKYVTEGMRKPAFLSGEQKKAIVDLLFKTNRKVTVKQLKEDYFKKIECFDSVEISGVEDRFNASLGTYHDLLKIIKDKDFLDNEENEDILEDIVLTLTLFEDREMIEERLKTYAHLFDDKVMKQLKRRRYTGWGRLSRKLINGIRDKQSGKTILDFLKSDGFANRNFMQLIHDDSLTFKEDIQKAQVSGQGDSLHEHIANLAGSPAIKKGILQTVKVVDELVKVMGRHKPENIVIEMARENQTTQKGQKNSRERMKRIEEGIKELGSQILKEHPVENTQLQNEKLYLYYLQNGRDMYVDQELDINRLSDYDVDHIVPQSFLKDDSIDNKVLTRSDKARGKSDNVPSEEVVKKMKNYWRQLLNAKLITQRKFDNLTKAERGGLSELDKAGFIKRQLVETRQITKHVAQILDSRMNTKYDENDKLIREVKVITLKSKLVSDFRKDFQFYKVREINNYHHAHDAYLNAVVGTALIKKYPKLESEFVYGDYKVYDVRKMIAKSEQEIGKATAKYFFYSNIMNFFKTEITLANGEIRKRPLIETNGETGEIVWDKGRDFATVRKVLSMPQVNIVKKTEVQTGGFSKESILPKRNSDKLIARKKDWDPKKYGGFDSPTVAYSVLVVAKVEKGKSKKLKSVKELLGITIMERSSFEKNPIDFLEAKGYKEVKKDLIIKLPKYSLFELENGRKRMLASAGELQKGNELALPSKYVNFLYLASHYEKLKGSPEDNEQKQLFVEQHKHYLDEIIEQISEFSKRVILADANLDKVLSAYNKHRDKPIREQAENIIHLFTLTNLGAPAAFKYFDTTIDRKRYTSTKEVLDATLIHQSITGLYETRIDLSQLGGDGGGSSGGSPAPGGTLNIEDEYRLHETSKGPDVPLGSTWLSDFPQAWAETGGMGLAVRQAPLIIPLKATSTPVSIKQYPMSQEARLGIKPHIQRLLDQGILVPCQSPWNTPLLPVKKPGTNDYRPVQDLREVNKRVEDIHPTVPNPYNLLSGLPPSHQWYTVLDLKDAFFCLRLHPTSQSLFAFEWRDPEMGISGQLTWTRLPQGFKNSPTLFNEALHRDLADFRIQHPDLILLQYVDDLLLAATSELDCQQGTRALLQTLGDLGYRASAKKAQICQKQVKYLGYLLKEGQRWLTEARKETVMGQPTPKTPRQLREFLGKAGFCRLFIPGFAEMAAPLYPLTKPGTLFEWGPDQQKAYQEIKQALLTAPALGLPDLTKPFELFVDEKQGYAKGVLTQKLGPWRRPVAYLSKKLDPVAAGWPPCLRMVAAIAVLTKDAGKLTMGQPLVILAPHAVEALVKQPPDRWLSNARMTHYQALLLDTDRVQFGPIVALNPATLLPLPEEGLQHDCLDILAEAHGTRPDLTDQPLPDADHTWYTDGSSFLQEGQRKAGAAVTTETEVVWAKALPAGTSAQRAELIALTQALKMAEGKKLNVYTDSRYAFATAHIHGEIYRRRGWLTSEGKEIKNKDEILALLKALFLPKRLSIIHCPGHQKGNRAEARGNRMADQAAREVATRETPETSTLLAGKRTADGSEFEKRTADGSEFESPKKKAKVE

SEQ ID NO: 2592 - protein, 2096 aa, synthetic construct
MPAAKRVKLDGGDKKYSIGLDIGTNSVGWAVITDEYKVPSKKFKVLGNTDRHSIKKNLIGALLFDSGETAEATRLKRTARRRYTRRKNRICYLQEIFSNEMAKVDDSFFHRLEESFLVEEDKKHERHPIFGNIVDEVAYHEKYPTIYHLRKKLVDSTDKADLRLIYLALAHMIKFRGHFLIEGDLNPDNSDVDKLFIQLVQTYNQLFEENPINASGVDAKAILSARLSKSRRLENLIAQLPGEKKNGLFGNLIALSLGLTPNFKSNFDLAEDAKLQLSKDTYDDDLDNLLAQIGDQYADLFLAAKNLSDAILLSDILRVNTEITKAPLSASMIKRYDEHHQDLTLLKALVRQQLPEKYKEIFFDQSKNGYAGYIDGGASQEEFYKFIKPILEKMDGTEELLVKLNREDLLRKQRTFDNGSIPHQIHLGELHAILRRQEDFYPFLKDNREKIEKILTFRIPYYVGPLARGNSRFAWMTRKSEETITPWNFEEVVDKGASAQSFIERMTNFDKNLPNEKVLPKHSLLYEYFTVYNELTKVKYVTEGMRKPAFLSGEQKKAIVDLLFKTNRKVTVKQLKEDYFKKIECFDSVEISGVEDRFNASLGTYHDLLKIIKDKDFLDNEENEDILEDIVLTLTLFEDREMIEERLKTYAHLFDDKVMKQLKRRRYTGWGRLSRKLINGIRDKQSGKTILDFLKSDGFANRNFMQLIHDDSLTFKEDIQKAQVSGQGDSLHEHIANLAGSPAIKKGILQTVKVVDELVKVMGRHKPENIVIEMARENQTTQKGQKNSRERMKRIEEGIKELGSQILKEHPVENTQLQNEKLYLYYLQNGRDMYVDQELDINRLSDYDVDHIVPQSFLKDDSIDNKVLTRSDKARGKSDNVPSEEVVKKMKNYWRQLLNAKLITQRKFDNLTKAERGGLSELDKAGFIKRQLVETRQITKHVAQILDSRMNTKYDENDKLIREVKVITLKSKLVSDFRKDFQFYKVREINNYHHAHDAYLNAVVGTALIKKYPKLESEFVYGDYKVYDVRKMIAKSEQEIGKATAKYFFYSNIMNFFKTEITLANGEIRKRPLIETNGETGEIVWDKGRDFATVRKVLSMPQVNIVKKTEVQTGGFSKESILPKRNSDKLIARKKDWDPKKYGGFDSPTVAYSVLVVAKVEKGKSKKLKSVKELLGITIMERSSFEKNPIDFLEAKGYKEVKKDLIIKLPKYSLFELENGRKRMLASAGELQKGNELALPSKYVNFLYLASHYEKLKGSPEDNEQKQLFVEQHKHYLDEIIEQISEFSKRVILADANLDKVLSAYNKHRDKPIREQAENIIHLFTLTNLGAPAAFKYFDTTIDRKRYTSTKEVLDATLIHQSITGLYETRIDLSQLGGDGGGGGPAPEAAAKGGTLNIEDEYRLHETSKGPDVPLGSTWLSDFPQAWAETGGMGLAVRQAPLIIPLKATSTPVSIKQYPMSQEARLGIKPHIQRLLDQGILVPCQSPWNTPLLPVKKPGTNDYRPVQDLREVNKRVEDIHPTVPNPYNLLSGLPPSHQWYTVLDLKDAFFCLRLHPTSQSLFAFEWRDPEMGISGQLTWTRLPQGFKNSPTLFNEALHRDLADFRIQHPDLILLQYVDDLLLAATSELDCQQGTRALLQTLGDLGYRASAKKAQICQKQVKYLGYLLKEGQRWLTEARKETVMGQPTPKTPRQLREFLGKAGFCRLFIPGFAEMAAPLYPLTKPGTLFEWGPDQQKAYQEIKQALLTAPALGLPDLTKPFELFVDEKQGYAKGVLTQKLGPWRRPVAYLSKKLDPVAAGWPPCLRMVAAIAVLTKDAGKLTMGQPLVILAPHAVEALVKQPPDRWLSNARMTHYQALLLDTDRVQFGPIVALNPATLLPLPEEGLQHDCLDILAEAHGTRPDLTDQPLPDADHTWYTDGSSFLQEGQRKAGAAVTTETEVVWAKALPAGTSAQRAELIALTQALKMAEGKKLNVYTDSRYAFATAHIHGEIYRRRGWLTSEGKEIKNKDEILALLKALFLPKRLSIIHCPGHQKGNRAEARGNRMADQAAREVATRETPETSTLLAGKRTADGSEFEKRTADGSEFESPKKKAKVE

SEQ ID NO: 2593 - protein, 2094 aa, synthetic construct
MPAAKRVKLDGGDKKYSIGLDIGTNSVGWAVITDEYKVPSKKFKVLGNTDRHSIKKNLIGALLFDSGETAEATRLKRTARRRYTRRKNRICYLQEIFSNEMAKVDDSFFHRLEESFLVEEDKKHERHPIFGNIVDEVAYHEKYPTIYHLRKKLVDSTDKADLRLIYLALAHMIKFRGHFLIEGDLNPDNSDVDKLFIQLVQTYNQLFEENPINASGVDAKAILSARLSKSRRLENLIAQLPGEKKNGLFGNLIALSLGLTPNFKSNFDLAEDAKLQLSKDTYDDDLDNLLAQIGDQYADLFLAAKNLSDAILLSDILRVNTEITKAPLSASMIKRYDEHHQDLTLLKALVRQQLPEKYKEIFFDQSKNGYAGYIDGGASQEEFYKFIKPILEKMDGTEELLVKLNREDLLRKQRTFDNGSIPHQIHLGELHAILRRQEDFYPFLKDNREKIEKILTFRIPYYVGPLARGNSRFAWMTRKSEETITPWNFEEVVDKGASAQSFIERMTNFDKNLPNEKVLPKHSLLYEYFTVYNELTKVKYVTEGMRKPAFLSGEQKKAIVDLLFKTNRKVTVKQLKEDYFKKIECFDSVEISGVEDRFNASLGTYHDLLKIIKDKDFLDNEENEDILEDIVLTLTLFEDREMIEERLKTYAHLFDDKVMKQLKRRRYTGWGRLSRKLINGIRDKQSGKTILDFLKSDGFANRNFMQLIHDDSLTFKEDIQKAQVSGQGDSLHEHIANLAGSPAIKKGILQTVKVVDELVKVMGRHKPENIVIEMARENQTTQKGQKNSRERMKRIEEGIKELGSQILKEHPVENTQLQNEKLYLYYLQNGRDMYVDQELDINRLSDYDVDHIVPQSFLKDDSIDNKVLTRSDKARGKSDNVPSEEVVKKMKNYWRQLLNAKLITQRKFDNLTKAERGGLSELDKAGFIKRQLVETRQITKHVAQILDSRMNTKYDENDKLIREVKVITLKSKLVSDFRKDFQFYKVREINNYHHAHDAYLNAVVGTALIKKYPKLESEFVYGDYKVYDVRKMIAKSEQEIGKATAKYFFYSNIMNFFKTEITLANGEIRKRPLIETNGETGEIVWDKGRDFATVRKVLSMPQVNIVKKTEVQTGGFSKESILPKRNSDKLIARKKDWDPKKYGGFDSPTVAYSVLVVAKVEKGKSKKLKSVKELLGITIMERSSFEKNPIDFLEAKGYKEVKKDLIIKLPKYSLFELENGRKRMLASAGELQKGNELALPSKYVNFLYLASHYEKLKGSPEDNEQKQLFVEQHKHYLDEIIEQISEFSKRVILADANLDKVLSAYNKHRDKPIREQAENIIHLFTLTNLGAPAAFKYFDTTIDRKRYTSTKEVLDATLIHQSITGLYETRIDLSQLGGDGGGGGPAPGSSGGTLNIEDEYRLHETSKGPDVPLGSTWLSDFPQAWAETGGMGLAVRQAPLIIPLKATSTPVSIKQYPMSQEARLGIKPHIQRLLDQGILVPCQSPWNTPLLPVKKPGTNDYRPVQDLREVNKRVEDIHPTVPNPYNLLSGLPPSHQWYTVLDLKDAFFCLRLHPTSQSLFAFEWRDPEMGISGQLTWTRLPQGFKNSPTLFNEALHRDLADFRIQHPDLILLQYVDDLLLAATSELDCQQGTRALLQTLGDLGYRASAKKAQICQKQVKYLGYLLKEGQRWLTEARKETVMGQPTPKTPRQLREFLGKAGFCRLFIPGFAEMAAPLYPLTKPGTLFEWGPDQQKAYQEIKQALLTAPALGLPDLTKPFELFVDEKQGYAKGVLTQKLGPWRRPVAYLSKKLDPVAAGWPPCLRMVAAIAVLTKDAGKLTMGQPLVILAPHAVEALVKQPPDRWLSNARMTHYQALLLDTDRVQFGPIVALNPATLLPLPEEGLQHDCLDILAEAHGTRPDLTDQPLPDADHTWYTDGSSFLQEGQRKAGAAVTTETEVVWAKALPAGTSAQRAELIALTQALKMAEGKKLNVYTDSRYAFATAHIHGEIYRRRGWLTSEGKEIKNKDEILALLKALFLPKRLSIIHCPGHQKGNRAEARGNRMADQAAREVATRETPETSTLLAGKRTADGSEFEKRTADGSEFESPKKKAKVE

SEQ ID NO: 2594 - protein, 2091 aa, synthetic construct
MPAAKRVKLDGGDKKYSIGLDIGTNSVGWAVITDEYKVPSKKFKVLGNTDRHSIKKNLIGALLFDSGETAEATRLKRTARRRYTRRKNRICYLQEIFSNEMAKVDDSFFHRLEESFLVEEDKKHERHPIFGNIVDEVAYHEKYPTIYHLRKKLVDSTDKADLRLIYLALAHMIKFRGHFLIEGDLNPDNSDVDKLFIQLVQTYNQLFEENPINASGVDAKAILSARLSKSRRLENLIAQLPGEKKNGLFGNLIALSLGLTPNFKSNFDLAEDAKLQLSKDTYDDDLDNLLAQIGDQYADLFLAAKNLSDAILLSDILRVNTEITKAPLSASMIKRYDEHHQDLTLLKALVRQQLPEKYKEIFFDQSKNGYAGYIDGGASQEEFYKFIKPILEKMDGTEELLVKLNREDLLRKQRTFDNGSIPHQIHLGELHAILRRQEDFYPFLKDNREKIEKILTFRIPYYVGPLARGNSRFAWMTRKSEETITPWNFEEVVDKGASAQSFIERMTNFDKNLPNEKVLPKHSLLYEYFTVYNELTKVKYVTEGMRKPAFLSGEQKKAIVDLLFKTNRKVTVKQLKEDYFKKIECFDSVEISGVEDRFNASLGTYHDLLKIIKDKDFLDNEENEDILEDIVLTLTLFEDREMIEERLKTYAHLFDDKVMKQLKRRRYTGWGRLSRKLINGIRDKQSGKTILDFLKSDGFANRNFMQLIHDDSLTFKEDIQKAQVSGQGDSLHEHIANLAGSPAIKKGILQTVKVVDELVKVMGRHKPENIVIEMARENQTTQKGQKNSRERMKRIEEGIKELGSQILKEHPVENTQLQNEKLYLYYLQNGRDMYVDQELDINRLSDYDVDHIVPQSFLKDDSIDNKVLTRSDKARGKSDNVPSEEVVKKMKNYWRQLLNAKLITQRKFDNLTKAERGGLSELDKAGFIKRQLVETRQITKHVAQILDSRMNTKYDENDKLIREVKVITLKSKLVSDFRKDFQFYKVREINNYHHAHDAYLNAVVGTALIKKYPKLESEFVYGDYKVYDVRKMIAKSEQEIGKATAKYFFYSNIMNFFKTEITLANGEIRKRPLIETNGETGEIVWDKGRDFATVRKVLSMPQVNIVKKTEVQTGGFSKESILPKRNSDKLIARKKDWDPKKYGGFDSPTVAYSVLVVAKVEKGKSKKLKSVKELLGITIMERSSFEKNPIDFLEAKGYKEVKKDLIIKLPKYSLFELENGRKRMLASAGELQKGNELALPSKYVNFLYLASHYEKLKGSPEDNEQKQLFVEQHKHYLDEIIEQISEFSKRVILADANLDKVLSAYNKHRDKPIREQAENIIHLFTLTNLGAPAAFKYFDTTIDRKRYTSTKEVLDATLIHQSITGLYETRIDLSQLGGDGGGSSGGGGGTLNIEDEYRLHETSKGPDVPLGSTWLSDFPQAWAETGGMGLAVRQAPLIIPLKATSTPVSIKQYPMSQEARLGIKPHIQRLLDQGILVPCQSPWNTPLLPVKKPGTNDYRPVQDLREVNKRVEDIHPTVPNPYNLLSGLPPSHQWYTVLDLKDAFFCLRLHPTSQSLFAFEWRDPEMGISGQLTWTRLPQGFKNSPTLFNEALHRDLADFRIQHPDLILLQYVDDLLLAATSELDCQQGTRALLQTLGDLGYRASAKKAQICQKQVKYLGYLLKEGQRWLTEARKETVMGQPTPKTPRQLREFLGKAGFCRLFIPGFAEMAAPLYPLTKPGTLFEWGPDQQKAYQEIKQALLTAPALGLPDLTKPFELFVDEKQGYAKGVLTQKLGPWRRPVAYLSKKLDPVAAGWPPCLRMVAAIAVLTKDAGKLTMGQPLVILAPHAVEALVKQPPDRWLSNARMTHYQALLLDTDRVQFGPIVALNPATLLPLPEEGLQHDCLDILAEAHGTRPDLTDQPLPDADHTWYTDGSSFLQEGQRKAGAAVTTETEVVWAKALPAGTSAQRAELIALTQALKMAEGKKLNVYTDSRYAFATAHIHGEIYRRRGWLTSEGKEIKNKDEILALLKALFLPKRLSIIHCPGHQKGNRAEARGNRMADQAAREVATRETPETSTLLAGKRTADGSEFEKRTADGSEFESPKKKAKVE

SEQ ID NO: 2595 - protein, 2103 aa, synthetic construct
MPAAKRVKLDGGDKKYSIGLDIGTNSVGWAVITDEYKVPSKKFKVLGNTDRHSIKKNLIGALLFDSGETAEATRLKRTARRRYTRRKNRICYLQEIFSNEMAKVDDSFFHRLEESFLVEEDKKHERHPIFGNIVDEVAYHEKYPTIYHLRKKLVDSTDKADLRLIYLALAHMIKFRGHFLIEGDLNPDNSDVDKLFIQLVQTYNQLFEENPINASGVDAKAILSARLSKSRRLENLIAQLPGEKKNGLFGNLIALSLGLTPNFKSNFDLAEDAKLQLSKDTYDDDLDNLLAQIGDQYADLFLAAKNLSDAILLSDILRVNTEITKAPLSASMIKRYDEHHQDLTLLKALVRQQLPEKYKEIFFDQSKNGYAGYIDGGASQEEFYKFIKPILEKMDGTEELLVKLNREDLLRKQRTFDNGSIPHQIHLGELHAILRRQEDFYPFLKDNREKIEKILTFRIPYYVGPLARGNSRFAWMTRKSEETITPWNFEEVVDKGASAQSFIERMTNFDKNLPNEKVLPKHSLLYEYFTVYNELTKVKYVTEGMRKPAFLSGEQKKAIVDLLFKTNRKVTVKQLKEDYFKKIECFDSVEISGVEDRFNASLGTYHDLLKIIKDKDFLDNEENEDILEDIVLTLTLFEDREMIEERLKTYAHLFDDKVMKQLKRRRYTGWGRLSRKLINGIRDKQSGKTILDFLKSDGFANRNFMQLIHDDSLTFKEDIQKAQVSGQGDSLHEHIANLAGSPAIKKGILQTVKVVDELVKVMGRHKPENIVIEMARENQTTQKGQKNSRERMKRIEEGIKELGSQILKEHPVENTQLQNEKLYLYYLQNGRDMYVDQELDINRLSDYDVDHIVPQSFLKDDSIDNKVLTRSDKARGKSDNVPSEEVVKKMKNYWRQLLNAKLITQRKFDNLTKAERGGLSELDKAGFIKRQLVETRQITKHVAQILDSRMNTKYDENDKLIREVKVITLKSKLVSDFRKDFQFYKVREINNYHHAHDAYLNAVVGTALIKKYPKLESEFVYGDYKVYDVRKMIAKSEQEIGKATAKYFFYSNIMNFFKTEITLANGEIRKRPLIETNGETGEIVWDKGRDFATVRKVLSMPQVNIVKKTEVQTGGFSKESILPKRNSDKLIARKKDWDPKKYGGFDSPTVAYSVLVVAKVEKGKSKKLKSVKELLGITIMERSSFEKNPIDFLEAKGYKEVKKDLIIKLPKYSLFELENGRKRMLASAGELQKGNELALPSKYVNFLYLASHYEKLKGSPEDNEQKQLFVEQHKHYLDEIIEQISEFSKRVILADANLDKVLSAYNKHRDKPIREQAENIIHLFTLTNLGAPAAFKYFDTTIDRKRYTSTKEVLDATLIHQSITGLYETRIDLSQLGGDGGGSSGSSGSSGSSGSSGSSGGTLNIEDEYRLHETSKGPDVPLGSTWLSDFPQAWAETGGMGLAVRQAPLIIPLKATSTPVSIKQYPMSQEARLGIKPHIQRLLDQGILVPCQSPWNTPLLPVKKPGTNDYRPVQDLREVNKRVEDIHPTVPNPYNLLSGLPPSHQWYTVLDLKDAFFCLRLHPTSQSLFAFEWRDPEMGISGQLTWTRLPQGFKNSPTLFNEALHRDLADFRIQHPDLILLQYVDDLLLAATSELDCQQGTRALLQTLGDLGYRASAKKAQICQKQVKYLGYLLKEGQRWLTEARKETVMGQPTPKTPRQLREFLGKAGFCRLFIPGFAEMAAPLYPLTKPGTLFEWGPDQQKAYQEIKQALLTAPALGLPDLTKPFELFVDEKQGYAKGVLTQKLGPWRRPVAYLSKKLDPVAAGWPPCLRMVAAIAVLTKDAGKLTMGQPLVILAPHAVEALVKQPPDRWLSNARMTHYQALLLDTDRVQFGPIVALNPATLLPLPEEGLQHDCLDILAEAHGTRPDLTDQPLPDADHTWYTDGSSFLQEGQRKAGAAVTTETEVVWAKALPAGTSAQRAELIALTQALKMAEGKKLNVYTDSRYAFATAHIHGEIYRRRGWLTSEGKEIKNKDEILALLKALFLPKRLSIIHCPGHQKGNRAEARGNRMADQAAREVATRETPETSTLLAGKRTADGSEFEKRTADGSEFESPKKKAKVE

SEQ ID NO: 2596 - protein, 2088 aa, synthetic construct
MPAAKRVKLDGGDKKYSIGLDIGTNSVGWAVITDEYKVPSKKFKVLGNTDRHSIKKNLIGALLFDSGETAEATRLKRTARRRYTRRKNRICYLQEIFSNEMAKVDDSFFHRLEESFLVEEDKKHERHPIFGNIVDEVAYHEKYPTIYHLRKKLVDSTDKADLRLIYLALAHMIKFRGHFLIEGDLNPDNSDVDKLFIQLVQTYNQLFEENPINASGVDAKAILSARLSKSRRLENLIAQLPGEKKNGLFGNLIALSLGLTPNFKSNFDLAEDAKLQLSKDTYDDDLDNLLAQIGDQYADLFLAAKNLSDAILLSDILRVNTEITKAPLSASMIKRYDEHHQDLTLLKALVRQQLPEKYKEIFFDQSKNGYAGYIDGGASQEEFYKFIKPILEKMDGTEELLVKLNREDLLRKQRTFDNGSIPHQIHLGELHAILRRQEDFYPFLKDNREKIEKILTFRIPYYVGPLARGNSRFAWMTRKSEETITPWNFEEVVDKGASAQSFIERMTNFDKNLPNEKVLPKHSLLYEYFTVYNELTKVKYVTEGMRKPAFLSGEQKKAIVDLLFKTNRKVTVKQLKEDYFKKIECFDSVEISGVEDRFNASLGTYHDLLKIIKDKDFLDNEENEDILEDIVLTLTLFEDREMIEERLKTYAHLFDDKVMKQLKRRRYTGWGRLSRKLINGIRDKQSGKTILDFLKSDGFANRNFMQLIHDDSLTFKEDIQKAQVSGQGDSLHEHIANLAGSPAIKKGILQTVKVVDELVKVMGRHKPENIVIEMARENQTTQKGQKNSRERMKRIEEGIKELGSQILKEHPVENTQLQNEKLYLYYLQNGRDMYVDQELDINRLSDYDVDHIVPQSFLKDDSIDNKVLTRSDKARGKSDNVPSEEVVKKMKNYWRQLLNAKLITQRKFDNLTKAERGGLSELDKAGFIKRQLVETRQITKHVAQILDSRMNTKYDENDKLIREVKVITLKSKLVSDFRKDFQFYKVREINNYHHAHDAYLNAVVGTALIKKYPKLESEFVYGDYKVYDVRKMIAKSEQEIGKATAKYFFYSNIMNFFKTEITLANGEIRKRPLIETNGETGEIVWDKGRDFATVRKVLSMPQVNIVKKTEVQTGGFSKESILPKRNSDKLIARKKDWDPKKYGGFDSPTVAYSVLVVAKVEKGKSKKLKSVKELLGITIMERSSFEKNPIDFLEAKGYKEVKKDLIIKLPKYSLFELENGRKRMLASAGELQKGNELALPSKYVNFLYLASHYEKLKGSPEDNEQKQLFVEQHKHYLDEIIEQISEFSKRVILADANLDKVLSAYNKHRDKPIREQAENIIHLFTLTNLGAPAAFKYFDTTIDRKRYTSTKEVLDATLIHQSITGLYETRIDLSQLGGDGGGGGGGTLNIEDEYRLHETSKGPDVPLGSTWLSDFPQAWAETGGMGLAVRQAPLIIPLKATSTPVSIKQYPMSQEARLGIKPHIQRLLDQGILVPCQSPWNTPLLPVKKPGTNDYRPVQDLREVNKRVEDIHPTVPNPYNLLSGLPPSHQWYTVLDLKDAFFCLRLHPTSQSLFAFEWRDPEMGISGQLTWTRLPQGFKNSPTLFNEALHRDLADFRIQHPDLILLQYVDDLLLAATSELDCQQGTRALLQTLGDLGYRASAKKAQICQKQVKYLGYLLKEGQRWLTEARKETVMGQPTPKTPRQLREFLGKAGFCRLFIPGFAEMAAPLYPLTKPGTLFEWGPDQQKAYQEIKQALLTAPALGLPDLTKPFELFVDEKQGYAKGVLTQKLGPWRRPVAYLSKKLDPVAAGWPPCLRMVAAIAVLTKDAGKLTMGQPLVILAPHAVEALVKQPPDRWLSNARMTHYQALLLDTDRVQFGPIVALNPATLLPLPEEGLQHDCLDILAEAHGTRPDLTDQPLPDADHTWYTDGSSFLQEGQRKAGAAVTTETEVVWAKALPAGTSAQRAELIALTQALKMAEGKKLNVYTDSRYAFATAHIHGEIYRRRGWLTSEGKEIKNKDEILALLKALFLPKRLSIIHCPGHQKGNRAEARGNRMADQAAREVATRETPETSTLLAGKRTADGSEFEKRTADGSEFESPKKKAKVE

SEQ ID NO: 2597 - protein, 2096 aa, synthetic construct
MPAAKRVKLDGGDKKYSIGLDIGTNSVGWAVITDEYKVPSKKFKVLGNTDRHSIKKNLIGALLFDSGETAEATRLKRTARRRYTRRKNRICYLQEIFSNEMAKVDDSFFHRLEESFLVEEDKKHERHPIFGNIVDEVAYHEKYPTIYHLRKKLVDSTDKADLRLIYLALAHMIKFRGHFLIEGDLNPDNSDVDKLFIQLVQTYNQLFEENPINASGVDAKAILSARLSKSRRLENLIAQLPGEKKNGLFGNLIALSLGLTPNFKSNFDLAEDAKLQLSKDTYDDDLDNLLAQIGDQYADLFLAAKNLSDAILLSDILRVNTEITKAPLSASMIKRYDEHHQDLTLLKALVRQQLPEKYKEIFFDQSKNGYAGYIDGGASQEEFYKFIKPILEKMDGTEELLVKLNREDLLRKQRTFDNGSIPHQIHLGELHAILRRQEDFYPFLKDNREKIEKILTFRIPYYVGPLARGNSRFAWMTRKSEETITPWNFEEVVDKGASAQSFIERMTNFDKNLPNEKVLPKHSLLYEYFTVYNELTKVKYVTEGMRKPAFLSGEQKKAIVDLLFKTNRKVTVKQLKEDYFKKIECFDSVEISGVEDRFNASLGTYHDLLKIIKDKDFLDNEENEDILEDIVLTLTLFEDREMIEERLKTYAHLFDDKVMKQLKRRRYTGWGRLSRKLINGIRDKQSGKTILDFLKSDGFANRNFMQLIHDDSLTFKEDIQKAQVSGQGDSLHEHIANLAGSPAIKKGILQTVKVVDELVKVMGRHKPENIVIEMARENQTTQKGQKNSRERMKRIEEGIKELGSQILKEHPVENTQLQNEKLYLYYLQNGRDMYVDQELDINRLSDYDVDHIVPQSFLKDDSIDNKVLTRSDKARGKSDNVPSEEVVKKMKNYWRQLLNAKLITQRKFDNLTKAERGGLSELDKAGFIKRQLVETRQITKHVAQILDSRMNTKYDENDKLIREVKVITLKSKLVSDFRKDFQFYKVREINNYHHAHDAYLNAVVGTALIKKYPKLESEFVYGDYKVYDVRKMIAKSEQEIGKATAKYFFYSNIMNFFKTEITLANGEIRKRPLIETNGETGEIVWDKGRDFATVRKVLSMPQVNIVKKTEVQTGGFSKESILPKRNSDKLIARKKDWDPKKYGGFDSPTVAYSVLVVAKVEKGKSKKLKSVKELLGITIMERSSFEKNPIDFLEAKGYKEVKKDLIIKLPKYSLFELENGRKRMLASAGELQKGNELALPSKYVNFLYLASHYEKLKGSPEDNEQKQLFVEQHKHYLDEIIEQISEFSKRVILADANLDKVLSAYNKHRDKPIREQAENIIHLFTLTNLGAPAAFKYFDTTIDRKRYTSTKEVLDATLIHQSITGLYETRIDLSQLGGDGGGGGGGSEAAAKGGTLNIEDEYRLHETSKGPDVPLGSTWLSDFPQAWAETGGMGLAVRQAPLIIPLKATSTPVSIKQYPMSQEARLGIKPHIQRLLDQGILVPCQSPWNTPLLPVKKPGTNDYRPVQDLREVNKRVEDIHPTVPNPYNLLSGLPPSHQWYTVLDLKDAFFCLRLHPTSQSLFAFEWRDPEMGISGQLTWTRLPQGFKNSPTLFNEALHRDLADFRIQHPDLILLQYVDDLLLAATSELDCQQGTRALLQTLGDLGYRASAKKAQICQKQVKYLGYLLKEGQRWLTEARKETVMGQPTPKTPRQLREFLGKAGFCRLFIPGFAEMAAPLYPLTKPGTLFEWGPDQQKAYQEIKQALLTAPALGLPDLTKPFELFVDEKQGYAKGVLTQKLGPWRRPVAYLSKKLDPVAAGWPPCLRMVAAIAVLTKDAGKLTMGQPLVILAPHAVEALVKQPPDRWLSNARMTHYQALLLDTDRVQFGPIVALNPATLLPLPEEGLQHDCLDILAEAHGTRPDLTDQPLPDADHTWYTDGSSFLQEGQRKAGAAVTTETEVVWAKALPAGTSAQRAELIALTQALKMAEGKKLNVYTDSRYAFATAHIHGEIYRRRGWLTSEGKEIKNKDEILALLKALFLPKRLSIIHCPGHQKGNRAEARGNRMADQAAREVATRETPETSTLLAGKRTADGSEFEKRTADGSEFESPKKKAKVE

SEQ ID NO: 2598 - protein, 2110 aa, synthetic construct
MPAAKRVKLDGGDKKYSIGLDIGTNSVGWAVITDEYKVPSKKFKVLGNTDRHSIKKNLIGALLFDSGETAEATRLKRTARRRYTRRKNRICYLQEIFSNEMAKVDDSFFHRLEESFLVEEDKKHERHPIFGNIVDEVAYHEKYPTIYHLRKKLVDSTDKADLRLIYLALAHMIKFRGHFLIEGDLNPDNSDVDKLFIQLVQTYNQLFEENPINASGVDAKAILSARLSKSRRLENLIAQLPGEKKNGLFGNLIALSLGLTPNFKSNFDLAEDAKLQLSKDTYDDDLDNLLAQIGDQYADLFLAAKNLSDAILLSDILRVNTEITKAPLSASMIKRYDEHHQDLTLLKALVRQQLPEKYKEIFFDQSKNGYAGYIDGGASQEEFYKFIKPILEKMDGTEELLVKLNREDLLRKQRTFDNGSIPHQIHLGELHAILRRQEDFYPFLKDNREKIEKILTFRIPYYVGPLARGNSRFAWMTRKSEETITPWNFEEVVDKGASAQSFIERMTNFDKNLPNEKVLPKHSLLYEYFTVYNELTKVKYVTEGMRKPAFLSGEQKKAIVDLLFKTNRKVTVKQLKEDYFKKIECFDSVEISGVEDRFNASLGTYHDLLKIIKDKDFLDNEENEDILEDIVLTLTLFEDREMIEERLKTYAHLFDDKVMKQLKRRRYTGWGRLSRKLINGIRDKQSGKTILDFLKSDGFANRNFMQLIHDDSLTFKEDIQKAQVSGQGDSLHEHIANLAGSPAIKKGILQTVKVVDELVKVMGRHKPENIVIEMARENQTTQKGQKNSRERMKRIEEGIKELGSQILKEHPVENTQLQNEKLYLYYLQNGRDMYVDQELDINRLSDYDVDHIVPQSFLKDDSIDNKVLTRSDKARGKSDNVPSEEVVKKMKNYWRQLLNAKLITQRKFDNLTKAERGGLSELDKAGFIKRQLVETRQITKHVAQILDSRMNTKYDENDKLIREVKVITLKSKLVSDFRKDFQFYKVREINNYHHAHDAYLNAVVGTALIKKYPKLESEFVYGDYKVYDVRKMIAKSEQEIGKATAKYFFYSNIMNFFKTEITLANGEIRKRPLIETNGETGEIVWDKGRDFATVRKVLSMPQVNIVKKTEVQTGGFSKESILPKRNSDKLIARKKDWDPKKYGGFDSPTVAYSVLVVAKVEKGKSKKLKSVKELLGITIMERSSFEKNPIDFLEAKGYKEVKKDLIIKLPKYSLFELENGRKRMLASAGELQKGNELALPSKYVNFLYLASHYEKLKGSPEDNEQKQLFVEQHKHYLDEIIEQISEFSKRVILADANLDKVLSAYNKHRDKPIREQAENIIHLFTLTNLGAPAAFKYFDTTIDRKRYTSTKEVLDATLIHQSITGLYETRIDLSQLGGDGGGGGGSGGGGSGGGGSGGGGSGGGGSGGTLNIEDEYRLHETSKGPDVPLGSTWLSDFPQAWAETGGMGLAVRQAPLIIPLKATSTPVSIKQYPMSQEARLGIKPHIQRLLDQGILVPCQSPWNTPLLPVKKPGTNDYRPVQDLREVNKRVEDIHPTVPNPYNLLSGLPPSHQWYTVLDLKDAFFCLRLHPTSQSLFAFEWRDPEMGISGQLTWTRLPQGFKNSPTLFNEALHRDLADFRIQHPDLILLQYVDDLLLAATSELDCQQGTRALLQTLGDLGYRASAKKAQICQKQVKYLGYLLKEGQRWLTEARKETVMGQPTPKTPRQLREFLGKAGFCRLFIPGFAEMAAPLYPLTKPGTLFEWGPDQQKAYQEIKQALLTAPALGLPDLTKPFELFVDEKQGYAKGVLTQKLGPWRRPVAYLSKKLDPVAAGWPPCLRMVAAIAVLTKDAGKLTMGQPLVILAPHAVEALVKQPPDRWLSNARMTHYQALLLDTDRVQFGPIVALNPATLLPLPEEGLQHDCLDILAEAHGTRPDLTDQPLPDADHTWYTDGSSFLQEGQRKAGAAVTTETEVVWAKALPAGTSAQRAELIALTQALKMAEGKKLNVYTDSRYAFATAHIHGEIYRRRGWLTSEGKEIKNKDEILALLKALFLPKRLSIIHCPGHQKGNRAEARGNRMADQAAREVATRETPETSTLLAGKRTADGSEFEKRTADGSEFESPKKKAKVE

SEQ ID NO: 2599 - protein, 2096 aa, synthetic construct
MPAAKRVKLDGGDKKYSIGLDIGTNSVGWAVITDEYKVPSKKFKVLGNTDRHSIKKNLIGALLFDSGETAEATRLKRTARRRYTRRKNRICYLQEIFSNEMAKVDDSFFHRLEESFLVEEDKKHERHPIFGNIVDEVAYHEKYPTIYHLRKKLVDSTDKADLRLIYLALAHMIKFRGHFLIEGDLNPDNSDVDKLFIQLVQTYNQLFEENPINASGVDAKAILSARLSKSRRLENLIAQLPGEKKNGLFGNLIALSLGLTPNFKSNFDLAEDAKLQLSKDTYDDDLDNLLAQIGDQYADLFLAAKNLSDAILLSDILRVNTEITKAPLSASMIKRYDEHHQDLTLLKALVRQQLPEKYKEIFFDQSKNGYAGYIDGGASQEEFYKFIKPILEKMDGTEELLVKLNREDLLRKQRTFDNGSIPHQIHLGELHAILRRQEDFYPFLKDNREKIEKILTFRIPYYVGPLARGNSRFAWMTRKSEETITPWNFEEVVDKGASAQSFIERMTNFDKNLPNEKVLPKHSLLYEYFTVYNELTKVKYVTEGMRKPAFLSGEQKKAIVDLLFKTNRKVTVKQLKEDYFKKIECFDSVEISGVEDRFNASLGTYHDLLKIIKDKDFLDNEENEDILEDIVLTLTLFEDREMIEERLKTYAHLFDDKVMKQLKRRRYTGWGRLSRKLINGIRDKQSGKTILDFLKSDGFANRNFMQLIHDDSLTFKEDIQKAQVSGQGDSLHEHIANLAGSPAIKKGILQTVKVVDELVKVMGRHKPENIVIEMARENQTTQKGQKNSRERMKRIEEGIKELGSQILKEHPVENTQLQNEKLYLYYLQNGRDMYVDQELDINRLSDYDVDHIVPQSFLKDDSIDNKVLTRSDKARGKSDNVPSEEVVKKMKNYWRQLLNAKLITQRKFDNLTKAERGGLSELDKAGFIKRQLVETRQITKHVAQILDSRMNTKYDENDKLIREVKVITLKSKLVSDFRKDFQFYKVREINNYHHAHDAYLNAVVGTALIKKYPKLESEFVYGDYKVYDVRKMIAKSEQEIGKATAKYFFYSNIMNFFKTEITLANGEIRKRPLIETNGETGEIVWDKGRDFATVRKVLSMPQVNIVKKTEVQTGGFSKESILPKRNSDKLIARKKDWDPKKYGGFDSPTVAYSVLVVAKVEKGKSKKLKSVKELLGITIMERSSFEKNPIDFLEAKGYKEVKKDLIIKLPKYSLFELENGRKRMLASAGELQKGNELALPSKYVNFLYLASHYEKLKGSPEDNEQKQLFVEQHKHYLDEIIEQISEFSKRVILADANLDKVLSAYNKHRDKPIREQAENIIHLFTLTNLGAPAAFKYFDTTIDRKRYTSTKEVLDATLIHQSITGLYETRIDLSQLGGDGGGSSPAPEAAAKGGTLNIEDEYRLHETSKGPDVPLGSTWLSDFPQAWAETGGMGLAVRQAPLIIPLKATSTPVSIKQYPMSQEARLGIKPHIQRLLDQGILVPCQSPWNTPLLPVKKPGTNDYRPVQDLREVNKRVEDIHPTVPNPYNLLSGLPPSHQWYTVLDLKDAFFCLRLHPTSQSLFAFEWRDPEMGISGQLTWTRLPQGFKNSPTLFNEALHRDLADFRIQHPDLILLQYVDDLLLAATSELDCQQGTRALLQTLGDLGYRASAKKAQICQKQVKYLGYLLKEGQRWLTEARKETVMGQPTPKTPRQLREFLGKAGFCRLFIPGFAEMAAPLYPLTKPGTLFEWGPDQQKAYQEIKQALLTAPALGLPDLTKPFELFVDEKQGYAKGVLTQKLGPWRRPVAYLSKKLDPVAAGWPPCLRMVAAIAVLTKDAGKLTMGQPLVILAPHAVEALVKQPPDRWLSNARMTHYQALLLDTDRVQFGPIVALNPATLLPLPEEGLQHDCLDILAEAHGTRPDLTDQPLPDADHTWYTDGSSFLQEGQRKAGAAVTTETEVVWAKALPAGTSAQRAELIALTQALKMAEGKKLNVYTDSRYAFATAHIHGEIYRRRGWLTSEGKEIKNKDEILALLKALFLPKRLSIIHCPGHQKGNRAEARGNRMADQAAREVATRETPETSTLLAGKRTADGSEFEKRTADGSEFESPKKKAKVE

SEQ ID NO: 2600 - protein, 2093 aa, synthetic construct
MPAAKRVKLDGGDKKYSIGLDIGTNSVGWAVITDEYKVPSKKFKVLGNTDRHSIKKNLIGALLFDSGETAEATRLKRTARRRYTRRKNRICYLQEIFSNEMAKVDDSFFHRLEESFLVEEDKKHERHPIFGNIVDEVAYHEKYPTIYHLRKKLVDSTDKADLRLIYLALAHMIKFRGHFLIEGDLNPDNSDVDKLFIQLVQTYNQLFEENPINASGVDAKAILSARLSKSRRLENLIAQLPGEKKNGLFGNLIALSLGLTPNFKSNFDLAEDAKLQLSKDTYDDDLDNLLAQIGDQYADLFLAAKNLSDAILLSDILRVNTEITKAPLSASMIKRYDEHHQDLTLLKALVRQQLPEKYKEIFFDQSKNGYAGYIDGGASQEEFYKFIKPILEKMDGTEELLVKLNREDLLRKQRTFDNGSIPHQIHLGELHAILRRQEDFYPFLKDNREKIEKILTFRIPYYVGPLARGNSRFAWMTRKSEETITPWNFEEVVDKGASAQSFIERMTNFDKNLPNEKVLPKHSLLYEYFTVYNELTKVKYVTEGMRKPAFLSGEQKKAIVDLLFKTNRKVTVKQLKEDYFKKIECFDSVEISGVEDRFNASLGTYHDLLKIIKDKDFLDNEENEDILEDIVLTLTLFEDREMIEERLKTYAHLFDDKVMKQLKRRRYTGWGRLSRKLINGIRDKQSGKTILDFLKSDGFANRNFMQLIHDDSLTFKEDIQKAQVSGQGDSLHEHIANLAGSPAIKKGILQTVKVVDELVKVMGRHKPENIVIEMARENQTTQKGQKNSRERMKRIEEGIKELGSQILKEHPVENTQLQNEKLYLYYLQNGRDMYVDQELDINRLSDYDVDHIVPQSFLKDDSIDNKVLTRSDKARGKSDNVPSEEVVKKMKNYWRQLLNAKLITQRKFDNLTKAERGGLSELDKAGFIKRQLVETRQITKHVAQILDSRMNTKYDENDKLIREVKVITLKSKLVSDFRKDFQFYKVREINNYHHAHDAYLNAVVGTALIKKYPKLESEFVYGDYKVYDVRKMIAKSEQEIGKATAKYFFYSNIMNFFKTEITLANGEIRKRPLIETNGETGEIVWDKGRDFATVRKVLSMPQVNIVKKTEVQTGGFSKESILPKRNSDKLIARKKDWDPKKYGGFDSPTVAYSVLVVAKVEKGKSKKLKSVKELLGITIMERSSFEKNPIDFLEAKGYKEVKKDLIIKLPKYSLFELENGRKRMLASAGELQKGNELALPSKYVNFLYLASHYEKLKGSPEDNEQKQLFVEQHKHYLDEIIEQISEFSKRVILADANLDKVLSAYNKHRDKPIREQAENIIHLFTLTNLGAPAAFKYFDTTIDRKRYTSTKEVLDATLIHQSITGLYETRIDLSQLGGDGGGGSEAAAKGGTLNIEDEYRLHETSKGPDVPLGSTWLSDFPQAWAETGGMGLAVRQAPLIIPLKATSTPVSIKQYPMSQEARLGIKPHIQRLLDQGILVPCQSPWNTPLLPVKKPGTNDYRPVQDLREVNKRVEDIHPTVPNPYNLLSGLPPSHQWYTVLDLKDAFFCLRLHPTSQSLFAFEWRDPEMGISGQLTWTRLPQGFKNSPTLFNEALHRDLADFRIQHPDLILLQYVDDLLLAATSELDCQQGTRALLQTLGDLGYRASAKKAQICQKQVKYLGYLLKEGQRWLTEARKETVMGQPTPKTPRQLREFLGKAGFCRLFIPGFAEMAAPLYPLTKPGTLFEWGPDQQKAYQEIKQALLTAPALGLPDLTKPFELFVDEKQGYAKGVLTQKLGPWRRPVAYLSKKLDPVAAGWPPCLRMVAAIAVLTKDAGKLTMGQPLVILAPHAVEALVKQPPDRWLSNARMTHYQALLLDTDRVQFGPIVALNPATLLPLPEEGLQHDCLDILAEAHGTRPDLTDQPLPDADHTWYTDGSSFLQEGQRKAGAAVTTETEVVWAKALPAGTSAQRAELIALTQALKMAEGKKLNVYTDSRYAFATAHIHGEIYRRRGWLTSEGKEIKNKDEILALLKALFLPKRLSIIHCPGHQKGNRAEARGNRMADQAAREVATRETPETSTLLAGKRTADGSEFEKRTADGSEFESPKKKAKVE

SEQ ID NO: 2601 - protein, 2094 aa, synthetic construct
MPAAKRVKLDGGDKKYSIGLDIGTNSVGWAVITDEYKVPSKKFKVLGNTDRHSIKKNLIGALLFDSGETAEATRLKRTARRRYTRRKNRICYLQEIFSNEMAKVDDSFFHRLEESFLVEEDKKHERHPIFGNIVDEVAYHEKYPTIYHLRKKLVDSTDKADLRLIYLALAHMIKFRGHFLIEGDLNPDNSDVDKLFIQLVQTYNQLFEENPINASGVDAKAILSARLSKSRRLENLIAQLPGEKKNGLFGNLIALSLGLTPNFKSNFDLAEDAKLQLSKDTYDDDLDNLLAQIGDQYADLFLAAKNLSDAILLSDILRVNTEITKAPLSASMIKRYDEHHQDLTLLKALVRQQLPEKYKEIFFDQSKNGYAGYIDGGASQEEFYKFIKPILEKMDGTEELLVKLNREDLLRKQRTFDNGSIPHQIHLGELHAILRRQEDFYPFLKDNREKIEKILTFRIPYYVGPLARGNSRFAWMTRKSEETITPWNFEEVVDKGASAQSFIERMTNFDKNLPNEKVLPKHSLLYEYFTVYNELTKVKYVTEGMRKPAFLSGEQKKAIVDLLFKTNRKVTVKQLKEDYFKKIECFDSVEISGVEDRFNASLGTYHDLLKIIKDKDFLDNEENEDILEDIVLTLTLFEDREMIEERLKTYAHLFDDKVMKQLKRRRYTGWGRLSRKLINGIRDKQSGKTILDFLKSDGFANRNFMQLIHDDSLTFKEDIQKAQVSGQGDSLHEHIANLAGSPAIKKGILQTVKVVDELVKVMGRHKPENIVIEMARENQTTQKGQKNSRERMKRIEEGIKELGSQILKEHPVENTQLQNEKLYLYYLQNGRDMYVDQELDINRLSDYDVDHIVPQSFLKDDSIDNKVLTRSDKARGKSDNVPSEEVVKKMKNYWRQLLNAKLITQRKFDNLTKAERGGLSELDKAGFIKRQLVETRQITKHVAQILDSRMNTKYDENDKLIREVKVITLKSKLVSDFRKDFQFYKVREINNYHHAHDAYLNAVVGTALIKKYPKLESEFVYGDYKVYDVRKMIAKSEQEIGKATAKYFFYSNIMNFFKTEITLANGEIRKRPLIETNGETGEIVWDKGRDFATVRKVLSMPQVNIVKKTEVQTGGFSKESILPKRNSDKLIARKKDWDPKKYGGFDSPTVAYSVLVVAKVEKGKSKKLKSVKELLGITIMERSSFEKNPIDFLEAKGYKEVKKDLIIKLPKYSLFELENGRKRMLASAGELQKGNELALPSKYVNFLYLASHYEKLKGSPEDNEQKQLFVEQHKHYLDEIIEQISEFSKRVILADANLDKVLSAYNKHRDKPIREQAENIIHLFTLTNLGAPAAFKYFDTTIDRKRYTSTKEVLDATLIHQSITGLYETRIDLSQLGGDGGGGSGGGGSSGGTLNIEDEYRLHETSKGPDVPLGSTWLSDFPQAWAETGGMGLAVRQAPLIIPLKATSTPVSIKQYPMSQEARLGIKPHIQRLLDQGILVPCQSPWNTPLLPVKKPGTNDYRPVQDLREVNKRVEDIHPTVPNPYNLLSGLPPSHQWYTVLDLKDAFFCLRLHPTSQSLFAFEWRDPEMGISGQLTWTRLPQGFKNSPTLFNEALHRDLADFRIQHPDLILLQYVDDLLLAATSELDCQQGTRALLQTLGDLGYRASAKKAQICQKQVKYLGYLLKEGQRWLTEARKETVMGQPTPKTPRQLREFLGKAGFCRLFIPGFAEMAAPLYPLTKPGTLFEWGPDQQKAYQEIKQALLTAPALGLPDLTKPFELFVDEKQGYAKGVLTQKLGPWRRPVAYLSKKLDPVAAGWPPCLRMVAAIAVLTKDAGKLTMGQPLVILAPHAVEALVKQPPDRWLSNARMTHYQALLLDTDRVQFGPIVALNPATLLPLPEEGLQHDCLDILAEAHGTRPDLTDQPLPDADHTWYTDGSSFLQEGQRKAGAAVTTETEVVWAKALPAGTSAQRAELIALTQALKMAEGKKLNVYTDSRYAFATAHIHGEIYRRRGWLTSEGKEIKNKDEILALLKALFLPKRLSIIHCPGHQKGNRAEARGNRMADQAAREVATRETPETSTLLAGKRTADGSEFEKRTADGSEFESPKKKAKVE

SEQ ID NO: 2602 - protein, 2089 aa, synthetic construct
MPAAKRVKLDGGDKKYSIGLDIGTNSVGWAVITDEYKVPSKKFKVLGNTDRHSIKKNLIGALLFDSGETAEATRLKRTARRRYTRRKNRICYLQEIFSNEMAKVDDSFFHRLEESFLVEEDKKHERHPIFGNIVDEVAYHEKYPTIYHLRKKLVDSTDKADLRLIYLALAHMIKFRGHFLIEGDLNPDNSDVDKLFIQLVQTYNQLFEENPINASGVDAKAILSARLSKSRRLENLIAQLPGEKKNGLFGNLIALSLGLTPNFKSNFDLAEDAKLQLSKDTYDDDLDNLLAQIGDQYADLFLAAKNLSDAILLSDILRVNTEITKAPLSASMIKRYDEHHQDLTLLKALVRQQLPEKYKEIFFDQSKNGYAGYIDGGASQEEFYKFIKPILEKMDGTEELLVKLNREDLLRKQRTFDNGSIPHQIHLGELHAILRRQEDFYPFLKDNREKIEKILTFRIPYYVGPLARGNSRFAWMTRKSEETITPWNFEEVVDKGASAQSFIERMTNFDKNLPNEKVLPKHSLLYEYFTVYNELTKVKYVTEGMRKPAFLSGEQKKAIVDLLFKTNRKVTVKQLKEDYFKKIECFDSVEISGVEDRFNASLGTYHDLLKIIKDKDFLDNEENEDILEDIVLTLTLFEDREMIEERLKTYAHLFDDKVMKQLKRRRYTGWGRLSRKLINGIRDKQSGKTILDFLKSDGFANRNFMQLIHDDSLTFKEDIQKAQVSGQGDSLHEHIANLAGSPAIKKGILQTVKVVDELVKVMGRHKPENIVIEMARENQTTQKGQKNSRERMKRIEEGIKELGSQILKEHPVENTQLQNEKLYLYYLQNGRDMYVDQELDINRLSDYDVDHIVPQSFLKDDSIDNKVLTRSDKARGKSDNVPSEEVVKKMKNYWRQLLNAKLITQRKFDNLTKAERGGLSELDKAGFIKRQLVETRQITKHVAQILDSRMNTKYDENDKLIREVKVITLKSKLVSDFRKDFQFYKVREINNYHHAHDAYLNAVVGTALIKKYPKLESEFVYGDYKVYDVRKMIAKSEQEIGKATAKYFFYSNIMNFFKTEITLANGEIRKRPLIETNGETGEIVWDKGRDFATVRKVLSMPQVNIVKKTEVQTGGFSKESILPKRNSDKLIARKKDWDPKKYGGFDSPTVAYSVLVVAKVEKGKSKKLKSVKELLGITIMERSSFEKNPIDFLEAKGYKEVKKDLIIKLPKYSLFELENGRKRMLASAGELQKGNELALPSKYVNFLYLASHYEKLKGSPEDNEQKQLFVEQHKHYLDEIIEQISEFSKRVILADANLDKVLSAYNKHRDKPIREQAENIIHLFTLTNLGAPAAFKYFDTTIDRKRYTSTKEVLDATLIHQSITGLYETRIDLSQLGGDGGGGGGGGTLNIEDEYRLHETSKGPDVPLGSTWLSDFPQAWAETGGMGLAVRQAPLIIPLKATSTPVSIKQYPMSQEARLGIKPHIQRLLDQGILVPCQSPWNTPLLPVKKPGTNDYRPVQDLREVNKRVEDIHPTVPNPYNLLSGLPPSHQWYTVLDLKDAFFCLRLHPTSQSLFAFEWRDPEMGISGQLTWTRLPQGFKNSPTLFNEALHRDLADFRIQHPDLILLQYVDDLLLAATSELDCQQGTRALLQTLGDLGYRASAKKAQICQKQVKYLGYLLKEGQRWLTEARKETVMGQPTPKTPRQLREFLGKAGFCRLFIPGFAEMAAPLYPLTKPGTLFEWGPDQQKAYQEIKQALLTAPALGLPDLTKPFELFVDEKQGYAKGVLTQKLGPWRRPVAYLSKKLDPVAAGWPPCLRMVAAIAVLTKDAGKLTMGQPLVILAPHAVEALVKQPPDRWLSNARMTHYQALLLDTDRVQFGPIVALNPATLLPLPEEGLQHDCLDILAEAHGTRPDLTDQPLPDADHTWYTDGSSFLQEGQRKAGAAVTTETEVVWAKALPAGTSAQRAELIALTQALKMAEGKKLNVYTDSRYAFATAHIHGEIYRRRGWLTSEGKEIKNKDEILALLKALFLPKRLSIIHCPGHQKGNRAEARGNRMADQAAREVATRETPETSTLLAGKRTADGSEFEKRTADGSEFESPKKKAKVE

SEQ ID NO: 2603 - protein, 2096 aa, synthetic construct
MPAAKRVKLDGGDKKYSIGLDIGTNSVGWAVITDEYKVPSKKFKVLGNTDRHSIKKNLIGALLFDSGETAEATRLKRTARRRYTRRKNRICYLQEIFSNEMAKVDDSFFHRLEESFLVEEDKKHERHPIFGNIVDEVAYHEKYPTIYHLRKKLVDSTDKADLRLIYLALAHMIKFRGHFLIEGDLNPDNSDVDKLFIQLVQTYNQLFEENPINASGVDAKAILSARLSKSRRLENLIAQLPGEKKNGLFGNLIALSLGLTPNFKSNFDLAEDAKLQLSKDTYDDDLDNLLAQIGDQYADLFLAAKNLSDAILLSDILRVNTEITKAPLSASMIKRYDEHHQDLTLLKALVRQQLPEKYKEIFFDQSKNGYAGYIDGGASQEEFYKFIKPILEKMDGTEELLVKLNREDLLRKQRTFDNGSIPHQIHLGELHAILRRQEDFYPFLKDNREKIEKILTFRIPYYVGPLARGNSRFAWMTRKSEETITPWNFEEVVDKGASAQSFIERMTNFDKNLPNEKVLPKHSLLYEYFTVYNELTKVKYVTEGMRKPAFLSGEQKKAIVDLLFKTNRKVTVKQLKEDYFKKIECFDSVEISGVEDRFNASLGTYHDLLKIIKDKDFLDNEENEDILEDIVLTLTLFEDREMIEERLKTYAHLFDDKVMKQLKRRRYTGWGRLSRKLINGIRDKQSGKTILDFLKSDGFANRNFMQLIHDDSLTFKEDIQKAQVSGQGDSLHEHIANLAGSPAIKKGILQTVKVVDELVKVMGRHKPENIVIEMARENQTTQKGQKNSRERMKRIEEGIKELGSQILKEHPVENTQLQNEKLYLYYLQNGRDMYVDQELDINRLSDYDVDHIVPQSFLKDDSIDNKVLTRSDKARGKSDNVPSEEVVKKMKNYWRQLLNAKLITQRKFDNLTKAERGGLSELDKAGFIKRQLVETRQITKHVAQILDSRMNTKYDENDKLIREVKVITLKSKLVSDFRKDFQFYKVREINNYHHAHDAYLNAVVGTALIKKYPKLESEFVYGDYKVYDVRKMIAKSEQEIGKATAKYFFYSNIMNFFKTEITLANGEIRKRPLIETNGETGEIVWDKGRDFATVRKVLSMPQVNIVKKTEVQTGGFSKESILPKRNSDKLIARKKDWDPKKYGGFDSPTVAYSVLVVAKVEKGKSKKLKSVKELLGITIMERSSFEKNPIDFLEAKGYKEVKKDLIIKLPKYSLFELENGRKRMLASAGELQKGNELALPSKYVNFLYLASHYEKLKGSPEDNEQKQLFVEQHKHYLDEIIEQISEFSKRVILADANLDKVLSAYNKHRDKPIREQAENIIHLFTLTNLGAPAAFKYFDTTIDRKRYTSTKEVLDATLIHQSITGLYETRIDLSQLGGDGGGGSGGGEAAAKGGTLNIEDEYRLHETSKGPDVPLGSTWLSDFPQAWAETGGMGLAVRQAPLIIPLKATSTPVSIKQYPMSQEARLGIKPHIQRLLDQGILVPCQSPWNTPLLPVKKPGTNDYRPVQDLREVNKRVEDIHPTVPNPYNLLSGLPPSHQWYTVLDLKDAFFCLRLHPTSQSLFAFEWRDPEMGISGQLTWTRLPQGFKNSPTLFNEALHRDLADFRIQHPDLILLQYVDDLLLAATSELDCQQGTRALLQTLGDLGYRASAKKAQICQKQVKYLGYLLKEGQRWLTEARKETVMGQPTPKTPRQLREFLGKAGFCRLFIPGFAEMAAPLYPLTKPGTLFEWGPDQQKAYQEIKQALLTAPALGLPDLTKPFELFVDEKQGYAKGVLTQKLGPWRRPVAYLSKKLDPVAAGWPPCLRMVAAIAVLTKDAGKLTMGQPLVILAPHAVEALVKQPPDRWLSNARMTHYQALLLDTDRVQFGPIVALNPATLLPLPEEGLQHDCLDILAEAHGTRPDLTDQPLPDADHTWYTDGSSFLQEGQRKAGAAVTTETEVVWAKALPAGTSAQRAELIALTQALKMAEGKKLNVYTDSRYAFATAHIHGEIYRRRGWLTSEGKEIKNKDEILALLKALFLPKRLSIIHCPGHQKGNRAEARGNRMADQAAREVATRETPETSTLLAGKRTADGSEFEKRTADGSEFESPKKKAKVE

SEQ ID NO: 2604 - protein, 2091 aa, synthetic construct
MPAAKRVKLDGGDKKYSIGLDIGTNSVGWAVITDEYKVPSKKFKVLGNTDRHSIKKNLIGALLFDSGETAEATRLKRTARRRYTRRKNRICYLQEIFSNEMAKVDDSFFHRLEESFLVEEDKKHERHPIFGNIVDEVAYHEKYPTIYHLRKKLVDSTDKADLRLIYLALAHMIKFRGHFLIEGDLNPDNSDVDKLFIQLVQTYNQLFEENPINASGVDAKAILSARLSKSRRLENLIAQLPGEKKNGLFGNLIALSLGLTPNFKSNFDLAEDAKLQLSKDTYDDDLDNLLAQIGDQYADLFLAAKNLSDAILLSDILRVNTEITKAPLSASMIKRYDEHHQDLTLLKALVRQQLPEKYKEIFFDQSKNGYAGYIDGGASQEEFYKFIKPILEKMDGTEELLVKLNREDLLRKQRTFDNGSIPHQIHLGELHAILRRQEDFYPFLKDNREKIEKILTFRIPYYVGPLARGNSRFAWMTRKSEETITPWNFEEVVDKGASAQSFIERMTNFDKNLPNEKVLPKHSLLYEYFTVYNELTKVKYVTEGMRKPAFLSGEQKKAIVDLLFKTNRKVTVKQLKEDYFKKIECFDSVEISGVEDRFNASLGTYHDLLKIIKDKDFLDNEENEDILEDIVLTLTLFEDREMIEERLKTYAHLFDDKVMKQLKRRRYTGWGRLSRKLINGIRDKQSGKTILDFLKSDGFANRNFMQLIHDDSLTFKEDIQKAQVSGQGDSLHEHIANLAGSPAIKKGILQTVKVVDELVKVMGRHKPENIVIEMARENQTTQKGQKNSRERMKRIEEGIKELGSQILKEHPVENTQLQNEKLYLYYLQNGRDMYVDQELDINRLSDYDVDHIVPQSFLKDDSIDNKVLTRSDKARGKSDNVPSEEVVKKMKNYWRQLLNAKLITQRKFDNLTKAERGGLSELDKAGFIKRQLVETRQITKHVAQILDSRMNTKYDENDKLIREVKVITLKSKLVSDFRKDFQFYKVREINNYHHAHDAYLNAVVGTALIKKYPKLESEFVYGDYKVYDVRKMIAKSEQEIGKATAKYFFYSNIMNFFKTEITLANGEIRKRPLIETNGETGEIVWDKGRDFATVRKVLSMPQVNIVKKTEVQTGGFSKESILPKRNSDKLIARKKDWDPKKYGGFDSPTVAYSVLVVAKVEKGKSKKLKSVKELLGITIMERSSFEKNPIDFLEAKGYKEVKKDLIIKLPKYSLFELENGRKRMLASAGELQKGNELALPSKYVNFLYLASHYEKLKGSPEDNEQKQLFVEQHKHYLDEIIEQISEFSKRVILADANLDKVLSAYNKHRDKPIREQAENIIHLFTLTNLGAPAAFKYFDTTIDRKRYTSTKEVLDATLIHQSITGLYETRIDLSQLGGDGGGGSGGSGGTLNIEDEYRLHETSKGPDVPLGSTWLSDFPQAWAETGGMGLAVRQAPLIIPLKATSTPVSIKQYPMSQEARLGIKPHIQRLLDQGILVPCQSPWNTPLLPVKKPGTNDYRPVQDLREVNKRVEDIHPTVPNPYNLLSGLPPSHQWYTVLDLKDAFFCLRLHPTSQSLFAFEWRDPEMGISGQLTWTRLPQGFKNSPTLFNEALHRDLADFRIQHPDLILLQYVDDLLLAATSELDCQQGTRALLQTLGDLGYRASAKKAQICQKQVKYLGYLLKEGQRWLTEARKETVMGQPTPKTPRQLREFLGKAGFCRLFIPGFAEMAAPLYPLTKPGTLFEWGPDQQKAYQEIKQALLTAPALGLPDLTKPFELFVDEKQGYAKGVLTQKLGPWRRPVAYLSKKLDPVAAGWPPCLRMVAAIAVLTKDAGKLTMGQPLVILAPHAVEALVKQPPDRWLSNARMTHYQALLLDTDRVQFGPIVALNPATLLPLPEEGLQHDCLDILAEAHGTRPDLTDQPLPDADHTWYTDGSSFLQEGQRKAGAAVTTETEVVWAKALPAGTSAQRAELIALTQALKMAEGKKLNVYTDSRYAFATAHIHGEIYRRRGWLTSEGKEIKNKDEILALLKALFLPKRLSIIHCPGHQKGNRAEARGNRMADQAAREVATRETPETSTLLAGKRTADGSEFEKRTADGSEFESPKKKAKVE

SEQ ID NO: 2605 - protein, 2094 aa, synthetic construct
MPAAKRVKLDGGDKKYSIGLDIGTNSVGWAVITDEYKVPSKKFKVLGNTDRHSIKKNLIGALLFDSGETAEATRLKRTARRRYTRRKNRICYLQEIFSNEMAKVDDSFFHRLEESFLVEEDKKHERHPIFGNIVDEVAYHEKYPTIYHLRKKLVDSTDKADLRLIYLALAHMIKFRGHFLIEGDLNPDNSDVDKLFIQLVQTYNQLFEENPINASGVDAKAILSARLSKSRRLENLIAQLPGEKKNGLFGNLIALSLGLTPNFKSNFDLAEDAKLQLSKDTYDDDLDNLLAQIGDQYADLFLAAKNLSDAILLSDILRVNTEITKAPLSASMIKRYDEHHQDLTLLKALVRQQLPEKYKEIFFDQSKNGYAGYIDGGASQEEFYKFIKPILEKMDGTEELLVKLNREDLLRKQRTFDNGSIPHQIHLGELHAILRRQEDFYPFLKDNREKIEKILTFRIPYYVGPLARGNSRFAWMTRKSEETITPWNFEEVVDKGASAQSFIERMTNFDKNLPNEKVLPKHSLLYEYFTVYNELTKVKYVTEGMRKPAFLSGEQKKAIVDLLFKTNRKVTVKQLKEDYFKKIECFDSVEISGVEDRFNASLGTYHDLLKIIKDKDFLDNEENEDILEDIVLTLTLFEDREMIEERLKTYAHLFDDKVMKQLKRRRYTGWGRLSRKLINGIRDKQSGKTILDFLKSDGFANRNFMQLIHDDSLTFKEDIQKAQVSGQGDSLHEHIANLAGSPAIKKGILQTVKVVDELVKVMGRHKPENIVIEMARENQTTQKGQKNSRERMKRIEEGIKELGSQILKEHPVENTQLQNEKLYLYYLQNGRDMYVDQELDINRLSDYDVDHIVPQSFLKDDSIDNKVLTRSDKARGKSDNVPSEEVVKKMKNYWRQLLNAKLITQRKFDNLTKAERGGLSELDKAGFIKRQLVETRQITKHVAQILDSRMNTKYDENDKLIREVKVITLKSKLVSDFRKDFQFYKVREINNYHHAHDAYLNAVVGTALIKKYPKLESEFVYGDYKVYDVRKMIAKSEQEIGKATAKYFFYSNIMNFFKTEITLANGEIRKRPLIETNGETGEIVWDKGRDFATVRKVLSMPQVNIVKKTEVQTGGFSKESILPKRNSDKLIARKKDWDPKKYGGFDSPTVAYSVLVVAKVEKGKSKKLKSVKELLGITIMERSSFEKNPIDFLEAKGYKEVKKDLIIKLPKYSLFELENGRKRMLASAGELQKGNELALPSKYVNFLYLASHYEKLKGSPEDNEQKQLFVEQHKHYLDEIIEQISEFSKRVILADANLDKVLSAYNKHRDKPIREQAENIIHLFTLTNLGAPAAFKYFDTTIDRKRYTSTKEVLDATLIHQSITGLYETRIDLSQLGGDGGGGGGGSGSSGGTLNIEDEYRLHETSKGPDVPLGSTWLSDFPQAWAETGGMGLAVRQAPLIIPLKATSTPVSIKQYPMSQEARLGIKPHIQRLLDQGILVPCQSPWNTPLLPVKKPGTNDYRPVQDLREVNKRVEDIHPTVPNPYNLLSGLPPSHQWYTVLDLKDAFFCLRLHPTSQSLFAFEWRDPEMGISGQLTWTRLPQGFKNSPTLFNEALHRDLADFRIQHPDLILLQYVDDLLLAATSELDCQQGTRALLQTLGDLGYRASAKKAQICQKQVKYLGYLLKEGQRWLTEARKETVMGQPTPKTPRQLREFLGKAGFCRLFIPGFAEMAAPLYPLTKPGTLFEWGPDQQKAYQEIKQALLTAPALGLPDLTKPFELFVDEKQGYAKGVLTQKLGPWRRPVAYLSKKLDPVAAGWPPCLRMVAAIAVLTKDAGKLTMGQPLVILAPHAVEALVKQPPDRWLSNARMTHYQALLLDTDRVQFGPIVALNPATLLPLPEEGLQHDCLDILAEAHGTRPDLTDQPLPDADHTWYTDGSSFLQEGQRKAGAAVTTETEVVWAKALPAGTSAQRAELIALTQALKMAEGKKLNVYTDSRYAFATAHIHGEIYRRRGWLTSEGKEIKNKDEILALLKALFLPKRLSIIHCPGHQKGNRAEARGNRMADQAAREVATRETPETSTLLAGKRTADGSEFEKRTADGSEFESPKKKAKVE

SEQ ID NO: 2606 - protein, 2091 aa, synthetic construct
MPAAKRVKLDGGDKKYSIGLDIGTNSVGWAVITDEYKVPSKKFKVLGNTDRHSIKKNLIGALLFDSGETAEATRLKRTARRRYTRRKNRICYLQEIFSNEMAKVDDSFFHRLEESFLVEEDKKHERHPIFGNIVDEVAYHEKYPTIYHLRKKLVDSTDKADLRLIYLALAHMIKFRGHFLIEGDLNPDNSDVDKLFIQLVQTYNQLFEENPINASGVDAKAILSARLSKSRRLENLIAQLPGEKKNGLFGNLIALSLGLTPNFKSNFDLAEDAKLQLSKDTYDDDLDNLLAQIGDQYADLFLAAKNLSDAILLSDILRVNTEITKAPLSASMIKRYDEHHQDLTLLKALVRQQLPEKYKEIFFDQSKNGYAGYIDGGASQEEFYKFIKPILEKMDGTEELLVKLNREDLLRKQRTFDNGSIPHQIHLGELHAILRRQEDFYPFLKDNREKIEKILTFRIPYYVGPLARGNSRFAWMTRKSEETITPWNFEEVVDKGASAQSFIERMTNFDKNLPNEKVLPKHSLLYEYFTVYNELTKVKYVTEGMRKPAFLSGEQKKAIVDLLFKTNRKVTVKQLKEDYFKKIECFDSVEISGVEDRFNASLGTYHDLLKIIKDKDFLDNEENEDILEDIVLTLTLFEDREMIEERLKTYAHLFDDKVMKQLKRRRYTGWGRLSRKLINGIRDKQSGKTILDFLKSDGFANRNFMQLIHDDSLTFKEDIQKAQVSGQGDSLHEHIANLAGSPAIKKGILQTVKVVDELVKVMGRHKPENIVIEMARENQTTQKGQKNSRERMKRIEEGIKELGSQILKEHPVENTQLQNEKLYLYYLQNGRDMYVDQELDINRLSDYDVDHIVPQSFLKDDSIDNKVLTRSDKARGKSDNVPSEEVVKKMKNYWRQLLNAKLITQRKFDNLTKAERGGLSELDKAGFIKRQLVETRQITKHVAQILDSRMNTKYDENDKLIREVKVITLKSKLVSDFRKDFQFYKVREINNYHHAHDAYLNAVVGTALIKKYPKLESEFVYGDYKVYDVRKMIAKSEQEIGKATAKYFFYSNIMNFFKTEITLANGEIRKRPLIETNGETGEIVWDKGRDFATVRKVLSMPQVNIVKKTEVQTGGFSKESILPKRNSDKLIARKKDWDPKKYGGFDSPTVAYSVLVVAKVEKGKSKKLKSVKELLGITIMERSSFEKNPIDFLEAKGYKEVKKDLIIKLPKYSLFELENGRKRMLASAGELQKGNELALPSKYVNFLYLASHYEKLKGSPEDNEQKQLFVEQHKHYLDEIIEQISEFSKRVILADANLDKVLSAYNKHRDKPIREQAENIIHLFTLTNLGAPAAFKYFDTTIDRKRYTSTKEVLDATLIHQSITGLYETRIDLSQLGGDGGPAPGSSGGTLNIEDEYRLHETSKGPDVPLGSTWLSDFPQAWAETGGMGLAVRQAPLIIPLKATSTPVSIKQYPMSQEARLGIKPHIQRLLDQGILVPCQSPWNTPLLPVKKPGTNDYRPVQDLREVNKRVEDIHPTVPNPYNLLSGLPPSHQWYTVLDLKDAFFCLRLHPTSQSLFAFEWRDPEMGISGQLTWTRLPQGFKNSPTLFNEALHRDLADFRIQHPDLILLQYVDDLLLAATSELDCQQGTRALLQTLGDLGYRASAKKAQICQKQVKYLGYLLKEGQRWLTEARKETVMGQPTPKTPRQLREFLGKAGFCRLFIPGFAEMAAPLYPLTKPGTLFEWGPDQQKAYQEIKQALLTAPALGLPDLTKPFELFVDEKQGYAKGVLTQKLGPWRRPVAYLSKKLDPVAAGWPPCLRMVAAIAVLTKDAGKLTMGQPLVILAPHAVEALVKQPPDRWLSNARMTHYQALLLDTDRVQFGPIVALNPATLLPLPEEGLQHDCLDILAEAHGTRPDLTDQPLPDADHTWYTDGSSFLQEGQRKAGAAVTTETEVVWAKALPAGTSAQRAELIALTQALKMAEGKKLNVYTDSRYAFATAHIHGEIYRRRGWLTSEGKEIKNKDEILALLKALFLPKRLSIIHCPGHQKGNRAEARGNRMADQAAREVATRETPETSTLLAGKRTADGSEFEKRTADGSEFESPKKKAKVE

SEQ ID NO: 2607 - protein, 2093 aa, synthetic construct
MPAAKRVKLDGGDKKYSIGLDIGTNSVGWAVITDEYKVPSKKFKVLGNTDRHSIKKNLIGALLFDSGETAEATRLKRTARRRYTRRKNRICYLQEIFSNEMAKVDDSFFHRLEESFLVEEDKKHERHPIFGNIVDEVAYHEKYPTIYHLRKKLVDSTDKADLRLIYLALAHMIKFRGHFLIEGDLNPDNSDVDKLFIQLVQTYNQLFEENPINASGVDAKAILSARLSKSRRLENLIAQLPGEKKNGLFGNLIALSLGLTPNFKSNFDLAEDAKLQLSKDTYDDDLDNLLAQIGDQYADLFLAAKNLSDAILLSDILRVNTEITKAPLSASMIKRYDEHHQDLTLLKALVRQQLPEKYKEIFFDQSKNGYAGYIDGGASQEEFYKFIKPILEKMDGTEELLVKLNREDLLRKQRTFDNGSIPHQIHLGELHAILRRQEDFYPFLKDNREKIEKILTFRIPYYVGPLARGNSRFAWMTRKSEETITPWNFEEVVDKGASAQSFIERMTNFDKNLPNEKVLPKHSLLYEYFTVYNELTKVKYVTEGMRKPAFLSGEQKKAIVDLLFKTNRKVTVKQLKEDYFKKIECFDSVEISGVEDRFNASLGTYHDLLKIIKDKDFLDNEENEDILEDIVLTLTLFEDREMIEERLKTYAHLFDDKVMKQLKRRRYTGWGRLSRKLINGIRDKQSGKTILDFLKSDGFANRNFMQLIHDDSLTFKEDIQKAQVSGQGDSLHEHIANLAGSPAIKKGILQTVKVVDELVKVMGRHKPENIVIEMARENQTTQKGQKNSRERMKRIEEGIKELGSQILKEHPVENTQLQNEKLYLYYLQNGRDMYVDQELDINRLSDYDVDHIVPQSFLKDDSIDNKVLTRSDKARGKSDNVPSEEVVKKMKNYWRQLLNAKLITQRKFDNLTKAERGGLSELDKAGFIKRQLVETRQITKHVAQILDSRMNTKYDENDKLIREVKVITLKSKLVSDFRKDFQFYKVREINNYHHAHDAYLNAVVGTALIKKYPKLESEFVYGDYKVYDVRKMIAKSEQEIGKATAKYFFYSNIMNFFKTEITLANGEIRKRPLIETNGETGEIVWDKGRDFATVRKVLSMPQVNIVKKTEVQTGGFSKESILPKRNSDKLIARKKDWDPKKYGGFDSPTVAYSVLVVAKVEKGKSKKLKSVKELLGITIMERSSFEKNPIDFLEAKGYKEVKKDLIIKLPKYSLFELENGRKRMLASAGELQKGNELALPSKYVNFLYLASHYEKLKGSPEDNEQKQLFVEQHKHYLDEIIEQISEFSKRVILADANLDKVLSAYNKHRDKPIREQAENIIHLFTLTNLGAPAAFKYFDTTIDRKRYTSTKEVLDATLIHQSITGLYETRIDLSQLGGDGGGGGEAAAKGGTLNIEDEYRLHETSKGPDVPLGSTWLSDFPQAWAETGGMGLAVRQAPLIIPLKATSTPVSIKQYPMSQEARLGIKPHIQRLLDQGILVPCQSPWNTPLLPVKKPGTNDYRPVQDLREVNKRVEDIHPTVPNPYNLLSGLPPSHQWYTVLDLKDAFFCLRLHPTSQSLFAFEWRDPEMGISGQLTWTRLPQGFKNSPTLFNEALHRDLADFRIQHPDLILLQYVDDLLLAATSELDCQQGTRALLQTLGDLGYRASAKKAQICQKQVKYLGYLLKEGQRWLTEARKETVMGQPTPKTPRQLREFLGKAGFCRLFIPGFAEMAAPLYPLTKPGTLFEWGPDQQKAYQEIKQALLTAPALGLPDLTKPFELFVDEKQGYAKGVLTQKLGPWRRPVAYLSKKLDPVAAGWPPCLRMVAAIAVLTKDAGKLTMGQPLVILAPHAVEALVKQPPDRWLSNARMTHYQALLLDTDRVQFGPIVALNPATLLPLPEEGLQHDCLDILAEAHGTRPDLTDQPLPDADHTWYTDGSSFLQEGQRKAGAAVTTETEVVWAKALPAGTSAQRAELIALTQALKMAEGKKLNVYTDSRYAFATAHIHGEIYRRRGWLTSEGKEIKNKDEILALLKALFLPKRLSIIHCPGHQKGNRAEARGNRMADQAAREVATRETPETSTLLAGKRTADGSEFEKRTADGSEFESPKKKAKVE

SEQ ID NO: 2608 - protein, 2096 aa, synthetic construct
MPAAKRVKLDGGDKKYSIGLDIGTNSVGWAVITDEYKVPSKKFKVLGNTDRHSIKKNLIGALLFDSGETAEATRLKRTARRRYTRRKNRICYLQEIFSNEMAKVDDSFFHRLEESFLVEEDKKHERHPIFGNIVDEVAYHEKYPTIYHLRKKLVDSTDKADLRLIYLALAHMIKFRGHFLIEGDLNPDNSDVDKLFIQLVQTYNQLFEENPINASGVDAKAILSARLSKSRRLENLIAQLPGEKKNGLFGNLIALSLGLTPNFKSNFDLAEDAKLQLSKDTYDDDLDNLLAQIGDQYADLFLAAKNLSDAILLSDILRVNTEITKAPLSASMIKRYDEHHQDLTLLKALVRQQLPEKYKEIFFDQSKNGYAGYIDGGASQEEFYKFIKPILEKMDGTEELLVKLNREDLLRKQRTFDNGSIPHQIHLGELHAILRRQEDFYPFLKDNREKIEKILTFRIPYYVGPLARGNSRFAWMTRKSEETITPWNFEEVVDKGASAQSFIERMTNFDKNLPNEKVLPKHSLLYEYFTVYNELTKVKYVTEGMRKPAFLSGEQKKAIVDLLFKTNRKVTVKQLKEDYFKKIECFDSVEISGVEDRFNASLGTYHDLLKIIKDKDFLDNEENEDILEDIVLTLTLFEDREMIEERLKTYAHLFDDKVMKQLKRRRYTGWGRLSRKLINGIRDKQSGKTILDFLKSDGFANRNFMQLIHDDSLTFKEDIQKAQVSGQGDSLHEHIANLAGSPAIKKGILQTVKVVDELVKVMGRHKPENIVIEMARENQTTQKGQKNSRERMKRIEEGIKELGSQILKEHPVENTQLQNEKLYLYYLQNGRDMYVDQELDINRLSDYDVDHIVPQSFLKDDSIDNKVLTRSDKARGKSDNVPSEEVVKKMKNYWRQLLNAKLITQRKFDNLTKAERGGLSELDKAGFIKRQLVETRQITKHVAQILDSRMNTKYDENDKLIREVKVITLKSKLVSDFRKDFQFYKVREINNYHHAHDAYLNAVVGTALIKKYPKLESEFVYGDYKVYDVRKMIAKSEQEIGKATAKYFFYSNIMNFFKTEITLANGEIRKRPLIETNGETGEIVWDKGRDFATVRKVLSMPQVNIVKKTEVQTGGFSKESILPKRNSDKLIARKKDWDPKKYGGFDSPTVAYSVLVVAKVEKGKSKKLKSVKELLGITIMERSSFEKNPIDFLEAKGYKEVKKDLIIKLPKYSLFELENGRKRMLASAGELQKGNELALPSKYVNFLYLASHYEKLKGSPEDNEQKQLFVEQHKHYLDEIIEQISEFSKRVILADANLDKVLSAYNKHRDKPIREQAENIIHLFTLTNLGAPAAFKYFDTTIDRKRYTSTKEVLDATLIHQSITGLYETRIDLSQLGGDGGGGSEAAAKGSSGGTLNIEDEYRLHETSKGPDVPLGSTWLSDFPQAWAETGGMGLAVRQAPLIIPLKATSTPVSIKQYPMSQEARLGIKPHIQRLLDQGILVPCQSPWNTPLLPVKKPGTNDYRPVQDLREVNKRVEDIHPTVPNPYNLLSGLPPSHQWYTVLDLKDAFFCLRLHPTSQSLFAFEWRDPEMGISGQLTWTRLPQGFKNSPTLFNEALHRDLADFRIQHPDLILLQYVDDLLLAATSELDCQQGTRALLQTLGDLGYRASAKKAQICQKQVKYLGYLLKEGQRWLTEARKETVMGQPTPKTPRQLREFLGKAGFCRLFIPGFAEMAAPLYPLTKPGTLFEWGPDQQKAYQEIKQALLTAPALGLPDLTKPFELFVDEKQGYAKGVLTQKLGPWRRPVAYLSKKLDPVAAGWPPCLRMVAAIAVLTKDAGKLTMGQPLVILAPHAVEALVKQPPDRWLSNARMTHYQALLLDTDRVQFGPIVALNPATLLPLPEEGLQHDCLDILAEAHGTRPDLTDQPLPDADHTWYTDGSSFLQEGQRKAGAAVTTETEVVWAKALPAGTSAQRAELIALTQALKMAEGKKLNVYTDSRYAFATAHIHGEIYRRRGWLTSEGKEIKNKDEILALLKALFLPKRLSIIHCPGHQKGNRAEARGNRMADQAAREVATRETPETSTLLAGKRTADGSEFEKRTADGSEFESPKKKAKVE

SEQ ID NO: 2609 - protein, 2118 aa, synthetic construct
MPAAKRVKLDGGDKKYSIGLDIGTNSVGWAVITDEYKVPSKKFKVLGNTDRHSIKKNLIGALLFDSGETAEATRLKRTARRRYTRRKNRICYLQEIFSNEMAKVDDSFFHRLEESFLVEEDKKHERHPIFGNIVDEVAYHEKYPTIYHLRKKLVDSTDKADLRLIYLALAHMIKFRGHFLIEGDLNPDNSDVDKLFIQLVQTYNQLFEENPINASGVDAKAILSARLSKSRRLENLIAQLPGEKKNGLFGNLIALSLGLTPNFKSNFDLAEDAKLQLSKDTYDDDLDNLLAQIGDQYADLFLAAKNLSDAILLSDILRVNTEITKAPLSASMIKRYDEHHQDLTLLKALVRQQLPEKYKEIFFDQSKNGYAGYIDGGASQEEFYKFIKPILEKMDGTEELLVKLNREDLLRKQRTFDNGSIPHQIHLGELHAILRRQEDFYPFLKDNREKIEKILTFRIPYYVGPLARGNSRFAWMTRKSEETITPWNFEEVVDKGASAQSFIERMTNFDKNLPNEKVLPKHSLLYEYFTVYNELTKVKYVTEGMRKPAFLSGEQKKAIVDLLFKTNRKVTVKQLKEDYFKKIECFDSVEISGVEDRFNASLGTYHDLLKIIKDKDFLDNEENEDILEDIVLTLTLFEDREMIEERLKTYAHLFDDKVMKQLKRRRYTGWGRLSRKLINGIRDKQSGKTILDFLKSDGFANRNFMQLIHDDSLTFKEDIQKAQVSGQGDSLHEHIANLAGSPAIKKGILQTVKVVDELVKVMGRHKPENIVIEMARENQTTQKGQKNSRERMKRIEEGIKELGSQILKEHPVENTQLQNEKLYLYYLQNGRDMYVDQELDINRLSDYDVDHIVPQSFLKDDSIDNKVLTRSDKARGKSDNVPSEEVVKKMKNYWRQLLNAKLITQRKFDNLTKAERGGLSELDKAGFIKRQLVETRQITKHVAQILDSRMNTKYDENDKLIREVKVITLKSKLVSDFRKDFQFYKVREINNYHHAHDAYLNAVVGTALIKKYPKLESEFVYGDYKVYDVRKMIAKSEQEIGKATAKYFFYSNIMNFFKTEITLANGEIRKRPLIETNGETGEIVWDKGRDFATVRKVLSMPQVNIVKKTEVQTGGFSKESILPKRNSDKLIARKKDWDPKKYGGFDSPTVAYSVLVVAKVEKGKSKKLKSVKELLGITIMERSSFEKNPIDFLEAKGYKEVKKDLIIKLPKYSLFELENGRKRMLASAGELQKGNELALPSKYVNFLYLASHYEKLKGSPEDNEQKQLFVEQHKHYLDEIIEQISEFSKRVILADANLDKVLSAYNKHRDKPIREQAENIIHLFTLTNLGAPAAFKYFDTTIDRKRYTSTKEVLDATLIHQSITGLYETRIDLSQLGGDGGSGGSSGGSSGSETPGTSESATPESSGGSSGGSSGGTLNIEDEYRLHETSKGPDVPLGSTWLSDFPQAWAETGGMGLAVRQAPLIIPLKATSTPVSIKQYPMSQEARLGIKPHIQRLLDQGILVPCQSPWNTPLLPVKKPGTNDYRPVQDLREVNKRVEDIHPTVPNPYNLLSGLPPSHQWYTVLDLKDAFFCLRLHPTSQSLFAFEWRDPEMGISGQLTWTRLPQGFKNSPTLFNEALHRDLADFRIQHPDLILLQYVDDLLLAATSELDCQQGTRALLQTLGDLGYRASAKKAQICQKQVKYLGYLLKEGQRWLTEARKETVMGQPTPKTPRQLREFLGKAGFCRLFIPGFAEMAAPLYPLTKPGTLFEWGPDQQKAYQEIKQALLTAPALGLPDLTKPFELFVDEKQGYAKGVLTQKLGPWRRPVAYLSKKLDPVAAGWPPCLRMVAAIAVLTKDAGKLTMGQPLVILAPHAVEALVKQPPDRWLSNARMTHYQALLLDTDRVQFGPIVALNPATLLPLPEEGLQHDCLDILAEAHGTRPDLTDQPLPDADHTWYTDGSSFLQEGQRKAGAAVTTETEVVWAKALPAGTSAQRAELIALTQALKMAEGKKLNVYTDSRYAFATAHIHGEIYRRRGWLTSEGKEIKNKDEILALLKALFLPKRLSIIHCPGHQKGNRAEARGNRMADQAAREVATRETPETSTLLAGKRTADGSEFEKRTADGSEFESPKKKAKVE

SEQ ID NO: 2610 - protein, 2125 aa, synthetic construct
MPAAKRVKLDGGDKKYSIGLDIGTNSVGWAVITDEYKVPSKKFKVLGNTDRHSIKKNLIGALLFDSGETAEATRLKRTARRRYTRRKNRICYLQEIFSNEMAKVDDSFFHRLEESFLVEEDKKHERHPIFGNIVDEVAYHEKYPTIYHLRKKLVDSTDKADLRLIYLALAHMIKFRGHFLIEGDLNPDNSDVDKLFIQLVQTYNQLFEENPINASGVDAKAILSARLSKSRRLENLIAQLPGEKKNGLFGNLIALSLGLTPNFKSNFDLAEDAKLQLSKDTYDDDLDNLLAQIGDQYADLFLAAKNLSDAILLSDILRVNTEITKAPLSASMIKRYDEHHQDLTLLKALVRQQLPEKYKEIFFDQSKNGYAGYIDGGASQEEFYKFIKPILEKMDGTEELLVKLNREDLLRKQRTFDNGSIPHQIHLGELHAILRRQEDFYPFLKDNREKIEKILTFRIPYYVGPLARGNSRFAWMTRKSEETITPWNFEEVVDKGASAQSFIERMTNFDKNLPNEKVLPKHSLLYEYFTVYNELTKVKYVTEGMRKPAFLSGEQKKAIVDLLFKTNRKVTVKQLKEDYFKKIECFDSVEISGVEDRFNASLGTYHDLLKIIKDKDFLDNEENEDILEDIVLTLTLFEDREMIEERLKTYAHLFDDKVMKQLKRRRYTGWGRLSRKLINGIRDKQSGKTILDFLKSDGFANRNFMQLIHDDSLTFKEDIQKAQVSGQGDSLHEHIANLAGSPAIKKGILQTVKVVDELVKVMGRHKPENIVIEMARENQTTQKGQKNSRERMKRIEEGIKELGSQILKEHPVENTQLQNEKLYLYYLQNGRDMYVDQELDINRLSDYDVDHIVPQSFLKDDSIDNKVLTRSDKARGKSDNVPSEEVVKKMKNYWRQLLNAKLITQRKFDNLTKAERGGLSELDKAGFIKRQLVETRQITKHVAQILDSRMNTKYDENDKLIREVKVITLKSKLVSDFRKDFQFYKVREINNYHHAHDAYLNAVVGTALIKKYPKLESEFVYGDYKVYDVRKMIAKSEQEIGKATAKYFFYSNIMNFFKTEITLANGEIRKRPLIETNGETGEIVWDKGRDFATVRKVLSMPQVNIVKKTEVQTGGFSKESILPKRNSDKLIARKKDWDPKKYGGFDSPTVAYSVLVVAKVEKGKSKKLKSVKELLGITIMERSSFEKNPIDFLEAKGYKEVKKDLIIKLPKYSLFELENGRKRMLASAGELQKGNELALPSKYVNFLYLASHYEKLKGSPEDNEQKQLFVEQHKHYLDEIIEQISEFSKRVILADANLDKVLSAYNKHRDKPIREQAENIIHLFTLTNLGAPAAFKYFDTTIDRKRYTSTKEVLDATLIHQSITGLYETRIDLSQLGGDGGEAAAKEAAAKEAAAKEAAAKGGTLNIEDEYRLHETSKEPDVSLGSTWLSDFPQAWAETGGMGLAVRQAPLIIPLKATSTPVSIKQYPMSQEARLGIKPHIQRLLDQGILVPCQSPWNTPLLPVKKPGTNDYRPVQDLREVNKRVEDIHPTVPNPYNLLSGLPPSHQWYTVLDLKDAFFCLRLHPTSQPLFAFEWRDPEMGISGQLTWTRLPQGFKNSPTLFNEALHRDLADFRIQHPDLILLQYVDDLLLAATSELDCQQGTRALLQTLGNLGYRASAKKAQICQKQVKYLGYLLKEGQRWLTEARKETVMGQPTPKTPRQLREFLGKAGFCRLFIPGFAEMAAPLYPLTKPGTLFNWGPDQQKAYQEIKQALLTAPALGLPDLTKPFELFVDEKQGYAKGVLTQKLGPWRRPVAYLSKKLDPVAAGWPPCLRMVAAIAVLTKDAGKLTMGQPLVILAPHAVEALVKQPPDRWLSNARMTHYQALLLDTDRVQFGPVVALNPATLLPLPEEGLQHNCLDILAEAHGTRPDLTDQPLPDADHTWYTDGSSLLQEGQRKAGAAVTTETEVIWAKALPAGTSAQRAELIALTQALKMAEGKKLNVYTDSRYAFATAHIHGEIYRRRGWLTSEGKEIKNKDEILALLKALFLPKRLSIIHCPGHQKGHSAEARGNRMADQAARKAAITETPDTSTLLIENSSPSGGSKRTADGSEFEAGKRTADGSEFEKRTADGSEFESPKKKAKVE

SEQ ID NO: 2611 - protein, 2151 aa, synthetic construct
MPAAKRVKLDGGDKKYSIGLDIGTNSVGWAVITDEYKVPSKKFKVLGNTDRHSIKKNLIGALLFDSGETAEATRLKRTARRRYTRRKNRICYLQEIFSNEMAKVDDSFFHRLEESFLVEEDKKHERHPIFGNIVDEVAYHEKYPTIYHLRKKLVDSTDKADLRLIYLALAHMIKFRGHFLIEGDLNPDNSDVDKLFIQLVQTYNQLFEENPINASGVDAKAILSARLSKSRRLENLIAQLPGEKKNGLFGNLIALSLGLTPNFKSNFDLAEDAKLQLSKDTYDDDLDNLLAQIGDQYADLFLAAKNLSDAILLSDILRVNTEITKAPLSASMIKRYDEHHQDLTLLKALVRQQLPEKYKEIFFDQSKNGYAGYIDGGASQEEFYKFIKPILEKMDGTEELLVKLNREDLLRKQRTFDNGSIPHQIHLGELHAILRRQEDFYPFLKDNREKIEKILTFRIPYYVGPLARGNSRFAWMTRKSEETITPWNFEEVVDKGASAQSFIERMTNFDKNLPNEKVLPKHSLLYEYFTVYNELTKVKYVTEGMRKPAFLSGEQKKAIVDLLFKTNRKVTVKQLKEDYFKKIECFDSVEISGVEDRFNASLGTYHDLLKIIKDKDFLDNEENEDILEDIVLTLTLFEDREMIEERLKTYAHLFDDKVMKQLKRRRYTGWGRLSRKLINGIRDKQSGKTILDFLKSDGFANRNFMQLIHDDSLTFKEDIQKAQVSGQGDSLHEHIANLAGSPAIKKGILQTVKVVDELVKVMGRHKPENIVIEMARENQTTQKGQKNSRERMKRIEEGIKELGSQILKEHPVENTQLQNEKLYLYYLQNGRDMYVDQELDINRLSDYDVDHIVPQSFLKDDSIDNKVLTRSDKARGKSDNVPSEEVVKKMKNYWRQLLNAKLITQRKFDNLTKAERGGLSELDKAGFIKRQLVETRQITKHVAQILDSRMNTKYDENDKLIREVKVITLKSKLVSDFRKDFQFYKVREINNYHHAHDAYLNAVVGTALIKKYPKLESEFVYGDYKVYDVRKMIAKSEQEIGKATAKYFFYSNIMNFFKTEITLANGEIRKRPLIETNGETGEIVWDKGRDFATVRKVLSMPQVNIVKKTEVQTGGFSKESILPKRNSDKLIARKKDWDPKKYGGFDSPTVAYSVLVVAKVEKGKSKKLKSVKELLGITIMERSSFEKNPIDFLEAKGYKEVKKDLIIKLPKYSLFELENGRKRMLASAGELQKGNELALPSKYVNFLYLASHYEKLKGSPEDNEQKQLFVEQHKHYLDEIIEQISEFSKRVILADANLDKVLSAYNKHRDKPIREQAENIIHLFTLTNLGAPAAFKYFDTTIDRKRYTSTKEVLDATLIHQSITGLYETRIDLSQLGGDGGAEAAAKEAAAKEAAAKEAAAKALEAEAAAKEAAAKEAAAKEAAAKAGGTLNIEDEYRLHETSKEPDVSLGSTWLSDFPQAWAETGGMGLAVRQAPLIIPLKATSTPVSIKQYPMSQEARLGIKPHIQRLLDQGILVPCQSPWNTPLLPVKKPGTNDYRPVQDLREVNKRVEDIHPTVPNPYNLLSGLPPSHQWYTVLDLKDAFFCLRLHPTSQPLFAFEWRDPEMGISGQLTWTRLPQGFKNSPTLFNEALHRDLADFRIQHPDLILLQYVDDLLLAATSELDCQQGTRALLQTLGNLGYRASAKKAQICQKQVKYLGYLLKEGQRWLTEARKETVMGQPTPKTPRQLREFLGKAGFCRLFIPGFAEMAAPLYPLTKPGTLFNWGPDQQKAYQEIKQALLTAPALGLPDLTKPFELFVDEKQGYAKGVLTQKLGPWRRPVAYLSKKLDPVAAGWPPCLRMVAAIAVLTKDAGKLTMGQPLVILAPHAVEALVKQPPDRWLSNARMTHYQALLLDTDRVQFGPVVALNPATLLPLPEEGLQHNCLDILAEAHGTRPDLTDQPLPDADHTWYTDGSSLLQEGQRKAGAAVTTETEVIWAKALPAGTSAQRAELIALTQALKMAEGKKLNVYTDSRYAFATAHIHGEIYRRRGWLTSEGKEIKNKDEILALLKALFLPKRLSIIHCPGHQKGHSAEARGNRMADQAARKAAITETPDTSTLLIENSSPSGGSKRTADGSEFEAGKRTADGSEFEKRTADGSEFESPKKKAKVE

SEQ ID NO: 2612 - protein, 2123 aa, synthetic construct
MPAAKRVKLDGGDKKYSIGLDIGTNSVGWAVITDEYKVPSKKFKVLGNTDRHSIKKNLIGALLFDSGETAEATRLKRTARRRYTRRKNRICYLQEIFSNEMAKVDDSFFHRLEESFLVEEDKKHERHPIFGNIVDEVAYHEKYPTIYHLRKKLVDSTDKADLRLIYLALAHMIKFRGHFLIEGDLNPDNSDVDKLFIQLVQTYNQLFEENPINASGVDAKAILSARLSKSRRLENLIAQLPGEKKNGLFGNLIALSLGLTPNFKSNFDLAEDAKLQLSKDTYDDDLDNLLAQIGDQYADLFLAAKNLSDAILLSDILRVNTEITKAPLSASMIKRYDEHHQDLTLLKALVRQQLPEKYKEIFFDQSKNGYAGYIDGGASQEEFYKFIKPILEKMDGTEELLVKLNREDLLRKQRTFDNGSIPHQIHLGELHAILRRQEDFYPFLKDNREKIEKILTFRIPYYVGPLARGNSRFAWMTRKSEETITPWNFEEVVDKGASAQSFIERMTNFDKNLPNEKVLPKHSLLYEYFTVYNELTKVKYVTEGMRKPAFLSGEQKKAIVDLLFKTNRKVTVKQLKEDYFKKIECFDSVEISGVEDRFNASLGTYHDLLKIIKDKDFLDNEENEDILEDIVLTLTLFEDREMIEERLKTYAHLFDDKVMKQLKRRRYTGWGRLSRKLINGIRDKQSGKTILDFLKSDGFANRNFMQLIHDDSLTFKEDIQKAQVSGQGDSLHEHIANLAGSPAIKKGILQTVKVVDELVKVMGRHKPENIVIEMARENQTTQKGQKNSRERMKRIEEGIKELGSQILKEHPVENTQLQNEKLYLYYLQNGRDMYVDQELDINRLSDYDVDHIVPQSFLKDDSIDNKVLTRSDKARGKSDNVPSEEVVKKMKNYWRQLLNAKLITQRKFDNLTKAERGGLSELDKAGFIKRQLVETRQITKHVAQILDSRMNTKYDENDKLIREVKVITLKSKLVSDFRKDFQFYKVREINNYHHAHDAYLNAVVGTALIKKYPKLESEFVYGDYKVYDVRKMIAKSEQEIGKATAKYFFYSNIMNFFKTEITLANGEIRKRPLIETNGETGEIVWDKGRDFATVRKVLSMPQVNIVKKTEVQTGGFSKESILPKRNSDKLIARKKDWDPKKYGGFDSPTVAYSVLVVAKVEKGKSKKLKSVKELLGITIMERSSFEKNPIDFLEAKGYKEVKKDLIIKLPKYSLFELENGRKRMLASAGELQKGNELALPSKYVNFLYLASHYEKLKGSPEDNEQKQLFVEQHKHYLDEIIEQISEFSKRVILADANLDKVLSAYNKHRDKPIREQAENIIHLFTLTNLGAPAAFKYFDTTIDRKRYTSTKEVLDATLIHQSITGLYETRIDLSQLGGDGGGSSGSSGSSGSSGSSGSSGGTLNIEDEYRLHETSKEPDVSLGSTWLSDFPQAWAETGGMGLAVRQAPLIIPLKATSTPVSIKQYPMSQEARLGIKPHIQRLLDQGILVPCQSPWNTPLLPVKKPGTNDYRPVQDLREVNKRVEDIHPTVPNPYNLLSGLPPSHQWYTVLDLKDAFFCLRLHPTSQPLFAFEWRDPEMGISGQLTWTRLPQGFKNSPTLFNEALHRDLADFRIQHPDLILLQYVDDLLLAATSELDCQQGTRALLQTLGNLGYRASAKKAQICQKQVKYLGYLLKEGQRWLTEARKETVMGQPTPKTPRQLREFLGKAGFCRLFIPGFAEMAAPLYPLTKPGTLFNWGPDQQKAYQEIKQALLTAPALGLPDLTKPFELFVDEKQGYAKGVLTQKLGPWRRPVAYLSKKLDPVAAGWPPCLRMVAAIAVLTKDAGKLTMGQPLVILAPHAVEALVKQPPDRWLSNARMTHYQALLLDTDRVQFGPVVALNPATLLPLPEEGLQHNCLDILAEAHGTRPDLTDQPLPDADHTWYTDGSSLLQEGQRKAGAAVTTETEVIWAKALPAGTSAQRAELIALTQALKMAEGKKLNVYTDSRYAFATAHIHGEIYRRRGWLTSEGKEIKNKDEILALLKALFLPKRLSIIHCPGHQKGHSAEARGNRMADQAARKAAITETPDTSTLLIENSSPSGGSKRTADGSEFEAGKRTADGSEFEKRTADGSEFESPKKKAKVE

SEQ ID NO: 2613 - protein, 2130 aa, synthetic construct
MPAAKRVKLDGGDKKYSIGLDIGTNSVGWAVITDEYKVPSKKFKVLGNTDRHSIKKNLIGALLFDSGETAEATRLKRTARRRYTRRKNRICYLQEIFSNEMAKVDDSFFHRLEESFLVEEDKKHERHPIFGNIVDEVAYHEKYPTIYHLRKKLVDSTDKADLRLIYLALAHMIKFRGHFLIEGDLNPDNSDVDKLFIQLVQTYNQLFEENPINASGVDAKAILSARLSKSRRLENLIAQLPGEKKNGLFGNLIALSLGLTPNFKSNFDLAEDAKLQLSKDTYDDDLDNLLAQIGDQYADLFLAAKNLSDAILLSDILRVNTEITKAPLSASMIKRYDEHHQDLTLLKALVRQQLPEKYKEIFFDQSKNGYAGYIDGGASQEEFYKFIKPILEKMDGTEELLVKLNREDLLRKQRTFDNGSIPHQIHLGELHAILRRQEDFYPFLKDNREKIEKILTFRIPYYVGPLARGNSRFAWMTRKSEETITPWNFEEVVDKGASAQSFIERMTNFDKNLPNEKVLPKHSLLYEYFTVYNELTKVKYVTEGMRKPAFLSGEQKKAIVDLLFKTNRKVTVKQLKEDYFKKIECFDSVEISGVEDRFNASLGTYHDLLKIIKDKDFLDNEENEDILEDIVLTLTLFEDREMIEERLKTYAHLFDDKVMKQLKRRRYTGWGRLSRKLINGIRDKQSGKTILDFLKSDGFANRNFMQLIHDDSLTFKEDIQKAQVSGQGDSLHEHIANLAGSPAIKKGILQTVKVVDELVKVMGRHKPENIVIEMARENQTTQKGQKNSRERMKRIEEGIKELGSQILKEHPVENTQLQNEKLYLYYLQNGRDMYVDQELDINRLSDYDVDHIVPQSFLKDDSIDNKVLTRSDKARGKSDNVPSEEVVKKMKNYWRQLLNAKLITQRKFDNLTKAERGGLSELDKAGFIKRQLVETRQITKHVAQILDSRMNTKYDENDKLIREVKVITLKSKLVSDFRKDFQFYKVREINNYHHAHDAYLNAVVGTALIKKYPKLESEFVYGDYKVYDVRKMIAKSEQEIGKATAKYFFYSNIMNFFKTEITLANGEIRKRPLIETNGETGEIVWDKGRDFATVRKVLSMPQVNIVKKTEVQTGGFSKESILPKRNSDKLIARKKDWDPKKYGGFDSPTVAYSVLVVAKVEKGKSKKLKSVKELLGITIMERSSFEKNPIDFLEAKGYKEVKKDLIIKLPKYSLFELENGRKRMLASAGELQKGNELALPSKYVNFLYLASHYEKLKGSPEDNEQKQLFVEQHKHYLDEIIEQISEFSKRVILADANLDKVLSAYNKHRDKPIREQAENIIHLFTLTNLGAPAAFKYFDTTIDRKRYTSTKEVLDATLIHQSITGLYETRIDLSQLGGDGGGGGGSGGGGSGGGGSGGGGSGGGGSGGTLNIEDEYRLHETSKEPDVSLGSTWLSDFPQAWAETGGMGLAVRQAPLIIPLKATSTPVSIKQYPMSQEARLGIKPHIQRLLDQGILVPCQSPWNTPLLPVKKPGTNDYRPVQDLREVNKRVEDIHPTVPNPYNLLSGLPPSHQWYTVLDLKDAFFCLRLHPTSQPLFAFEWRDPEMGISGQLTWTRLPQGFKNSPTLFNEALHRDLADFRIQHPDLILLQYVDDLLLAATSELDCQQGTRALLQTLGNLGYRASAKKAQICQKQVKYLGYLLKEGQRWLTEARKETVMGQPTPKTPRQLREFLGKAGFCRLFIPGFAEMAAPLYPLTKPGTLFNWGPDQQKAYQEIKQALLTAPALGLPDLTKPFELFVDEKQGYAKGVLTQKLGPWRRPVAYLSKKLDPVAAGWPPCLRMVAAIAVLTKDAGKLTMGQPLVILAPHAVEALVKQPPDRWLSNARMTHYQALLLDTDRVQFGPVVALNPATLLPLPEEGLQHNCLDILAEAHGTRPDLTDQPLPDADHTWYTDGSSLLQEGQRKAGAAVTTETEVIWAKALPAGTSAQRAELIALTQALKMAEGKKLNVYTDSRYAFATAHIHGEIYRRRGWLTSEGKEIKNKDEILALLKALFLPKRLSIIHCPGHQKGHSAEARGNRMADQAARKAAITETPDTSTLLIENSSPSGGSKRTADGSEFEAGKRTADGSEFEKRTADGSEFESPKKKAKVE

SEQ ID NO: 2614 - protein, 2116 aa, synthetic construct
MPAAKRVKLDGGDKKYSIGLDIGTNSVGWAVITDEYKVPSKKFKVLGNTDRHSIKKNLIGALLFDSGETAEATRLKRTARRRYTRRKNRICYLQEIFSNEMAKVDDSFFHRLEESFLVEEDKKHERHPIFGNIVDEVAYHEKYPTIYHLRKKLVDSTDKADLRLIYLALAHMIKFRGHFLIEGDLNPDNSDVDKLFIQLVQTYNQLFEENPINASGVDAKAILSARLSKSRRLENLIAQLPGEKKNGLFGNLIALSLGLTPNFKSNFDLAEDAKLQLSKDTYDDDLDNLLAQIGDQYADLFLAAKNLSDAILLSDILRVNTEITKAPLSASMIKRYDEHHQDLTLLKALVRQQLPEKYKEIFFDQSKNGYAGYIDGGASQEEFYKFIKPILEKMDGTEELLVKLNREDLLRKQRTFDNGSIPHQIHLGELHAILRRQEDFYPFLKDNREKIEKILTFRIPYYVGPLARGNSRFAWMTRKSEETITPWNFEEVVDKGASAQSFIERMTNFDKNLPNEKVLPKHSLLYEYFTVYNELTKVKYVTEGMRKPAFLSGEQKKAIVDLLFKTNRKVTVKQLKEDYFKKIECFDSVEISGVEDRFNASLGTYHDLLKIIKDKDFLDNEENEDILEDIVLTLTLFEDREMIEERLKTYAHLFDDKVMKQLKRRRYTGWGRLSRKLINGIRDKQSGKTILDFLKSDGFANRNFMQLIHDDSLTFKEDIQKAQVSGQGDSLHEHIANLAGSPAIKKGILQTVKVVDELVKVMGRHKPENIVIEMARENQTTQKGQKNSRERMKRIEEGIKELGSQILKEHPVENTQLQNEKLYLYYLQNGRDMYVDQELDINRLSDYDVDHIVPQSFLKDDSIDNKVLTRSDKARGKSDNVPSEEVVKKMKNYWRQLLNAKLITQRKFDNLTKAERGGLSELDKAGFIKRQLVETRQITKHVAQILDSRMNTKYDENDKLIREVKVITLKSKLVSDFRKDFQFYKVREINNYHHAHDAYLNAVVGTALIKKYPKLESEFVYGDYKVYDVRKMIAKSEQEIGKATAKYFFYSNIMNFFKTEITLANGEIRKRPLIETNGETGEIVWDKGRDFATVRKVLSMPQVNIVKKTEVQTGGFSKESILPKRNSDKLIARKKDWDPKKYGGFDSPTVAYSVLVVAKVEKGKSKKLKSVKELLGITIMERSSFEKNPIDFLEAKGYKEVKKDLIIKLPKYSLFELENGRKRMLASAGELQKGNELALPSKYVNFLYLASHYEKLKGSPEDNEQKQLFVEQHKHYLDEIIEQISEFSKRVILADANLDKVLSAYNKHRDKPIREQAENIIHLFTLTNLGAPAAFKYFDTTIDRKRYTSTKEVLDATLIHQSITGLYETRIDLSQLGGDGGEAAAKGGGPAPGGTLNIEDEYRLHETSKEPDVSLGSTWLSDFPQAWAETGGMGLAVRQAPLIIPLKATSTPVSIKQYPMSQEARLGIKPHIQRLLDQGILVPCQSPWNTPLLPVKKPGTNDYRPVQDLREVNKRVEDIHPTVPNPYNLLSGLPPSHQWYTVLDLKDAFFCLRLHPTSQPLFAFEWRDPEMGISGQLTWTRLPQGFKNSPTLFNEALHRDLADFRIQHPDLILLQYVDDLLLAATSELDCQQGTRALLQTLGNLGYRASAKKAQICQKQVKYLGYLLKEGQRWLTEARKETVMGQPTPKTPRQLREFLGKAGFCRLFIPGFAEMAAPLYPLTKPGTLFNWGPDQQKAYQEIKQALLTAPALGLPDLTKPFELFVDEKQGYAKGVLTQKLGPWRRPVAYLSKKLDPVAAGWPPCLRMVAAIAVLTKDAGKLTMGQPLVILAPHAVEALVKQPPDRWLSNARMTHYQALLLDTDRVQFGPVVALNPATLLPLPEEGLQHNCLDILAEAHGTRPDLTDQPLPDADHTWYTDGSSLLQEGQRKAGAAVTTETEVIWAKALPAGTSAQRAELIALTQALKMAEGKKLNVYTDSRYAFATAHIHGEIYRRRGWLTSEGKEIKNKDEILALLKALFLPKRLSIIHCPGHQKGHSAEARGNRMADQAARKAAITETPDTSTLLIENSSPSGGSKRTADGSEFEAGKRTADGSEFEKRTADGSEFESPKKKAKVE

SEQ ID NO: 2615 - protein, 2125 aa, synthetic construct
MPAAKRVKLDGGDKKYSIGLDIGTNSVGWAVITDEYKVPSKKFKVLGNTDRHSIKKNLIGALLFDSGETAEATRLKRTARRRYTRRKNRICYLQEIFSNEMAKVDDSFFHRLEESFLVEEDKKHERHPIFGNIVDEVAYHEKYPTIYHLRKKLVDSTDKADLRLIYLALAHMIKFRGHFLIEGDLNPDNSDVDKLFIQLVQTYNQLFEENPINASGVDAKAILSARLSKSRRLENLIAQLPGEKKNGLFGNLIALSLGLTPNFKSNFDLAEDAKLQLSKDTYDDDLDNLLAQIGDQYADLFLAAKNLSDAILLSDILRVNTEITKAPLSASMIKRYDEHHQDLTLLKALVRQQLPEKYKEIFFDQSKNGYAGYIDGGASQEEFYKFIKPILEKMDGTEELLVKLNREDLLRKQRTFDNGSIPHQIHLGELHAILRRQEDFYPFLKDNREKIEKILTFRIPYYVGPLARGNSRFAWMTRKSEETITPWNFEEVVDKGASAQSFIERMTNFDKNLPNEKVLPKHSLLYEYFTVYNELTKVKYVTEGMRKPAFLSGEQKKAIVDLLFKTNRKVTVKQLKEDYFKKIECFDSVEISGVEDRFNASLGTYHDLLKIIKDKDFLDNEENEDILEDIVLTLTLFEDREMIEERLKTYAHLFDDKVMKQLKRRRYTGWGRLSRKLINGIRDKQSGKTILDFLKSDGFANRNFMQLIHDDSLTFKEDIQKAQVSGQGDSLHEHIANLAGSPAIKKGILQTVKVVDELVKVMGRHKPENIVIEMARENQTTQKGQKNSRERMKRIEEGIKELGSQILKEHPVENTQLQNEKLYLYYLQNGRDMYVDQELDINRLSDYDVDHIVPQSFLKDDSIDNKVLTRSDKARGKSDNVPSEEVVKKMKNYWRQLLNAKLITQRKFDNLTKAERGGLSELDKAGFIKRQLVETRQITKHVAQILDSRMNTKYDENDKLIREVKVITLKSKLVSDFRKDFQFYKVREINNYHHAHDAYLNAVVGTALIKKYPKLESEFVYGDYKVYDVRKMIAKSEQEIGKATAKYFFYSNIMNFFKTEITLANGEIRKRPLIETNGETGEIVWDKGRDFATVRKVLSMPQVNIVKKTEVQTGGFSKESILPKRNSDKLIARKKDWDPKKYGGFDSPTVAYSVLVVAKVEKGKSKKLKSVKELLGITIMERSSFEKNPIDFLEAKGYKEVKKDLIIKLPKYSLFELENGRKRMLASAGELQKGNELALPSKYVNFLYLASHYEKLKGSPEDNEQKQLFVEQHKHYLDEIIEQISEFSKRVILADANLDKVLSAYNKHRDKPIREQAENIIHLFTLTNLGAPAAFKYFDTTIDRKRYTSTKEVLDATLIHQSITGLYETRIDLSQLGGDGGGGGGSGGGGSGGGGSGGGGSGGTLNIEDEYRLHETSKEPDVSLGSTWLSDFPQAWAETGGMGLAVRQAPLIIPLKATSTPVSIKQYPMSQEARLGIKPHIQRLLDQGILVPCQSPWNTPLLPVKKPGTNDYRPVQDLREVNKRVEDIHPTVPNPYNLLSGLPPSHQWYTVLDLKDAFFCLRLHPTSQPLFAFEWRDPEMGISGQLTWTRLPQGFKNSPTLFNEALHRDLADFRIQHPDLILLQYVDDLLLAATSELDCQQGTRALLQTLGNLGYRASAKKAQICQKQVKYLGYLLKEGQRWLTEARKETVMGQPTPKTPRQLREFLGKAGFCRLFIPGFAEMAAPLYPLTKPGTLFNWGPDQQKAYQEIKQALLTAPALGLPDLTKPFELFVDEKQGYAKGVLTQKLGPWRRPVAYLSKKLDPVAAGWPPCLRMVAAIAVLTKDAGKLTMGQPLVILAPHAVEALVKQPPDRWLSNARMTHYQALLLDTDRVQFGPVVALNPATLLPLPEEGLQHNCLDILAEAHGTRPDLTDQPLPDADHTWYTDGSSLLQEGQRKAGAAVTTETEVIWAKALPAGTSAQRAELIALTQALKMAEGKKLNVYTDSRYAFATAHIHGEIYRRRGWLTSEGKEIKNKDEILALLKALFLPKRLSIIHCPGHQKGHSAEARGNRMADQAARKAAITETPDTSTLLIENSSPSGGSKRTADGSEFEAGKRTADGSEFEKRTADGSEFESPKKKAKVE

SEQ ID NO: 2616 - protein, 2114 aa, synthetic construct
MPAAKRVKLDGGDKKYSIGLDIGTNSVGWAVITDEYKVPSKKFKVLGNTDRHSIKKNLIGALLFDSGETAEATRLKRTARRRYTRRKNRICYLQEIFSNEMAKVDDSFFHRLEESFLVEEDKKHERHPIFGNIVDEVAYHEKYPTIYHLRKKLVDSTDKADLRLIYLALAHMIKFRGHFLIEGDLNPDNSDVDKLFIQLVQTYNQLFEENPINASGVDAKAILSARLSKSRRLENLIAQLPGEKKNGLFGNLIALSLGLTPNFKSNFDLAEDAKLQLSKDTYDDDLDNLLAQIGDQYADLFLAAKNLSDAILLSDILRVNTEITKAPLSASMIKRYDEHHQDLTLLKALVRQQLPEKYKEIFFDQSKNGYAGYIDGGASQEEFYKFIKPILEKMDGTEELLVKLNREDLLRKQRTFDNGSIPHQIHLGELHAILRRQEDFYPFLKDNREKIEKILTFRIPYYVGPLARGNSRFAWMTRKSEETITPWNFEEVVDKGASAQSFIERMTNFDKNLPNEKVLPKHSLLYEYFTVYNELTKVKYVTEGMRKPAFLSGEQKKAIVDLLFKTNRKVTVKQLKEDYFKKIECFDSVEISGVEDRFNASLGTYHDLLKIIKDKDFLDNEENEDILEDIVLTLTLFEDREMIEERLKTYAHLFDDKVMKQLKRRRYTGWGRLSRKLINGIRDKQSGKTILDFLKSDGFANRNFMQLIHDDSLTFKEDIQKAQVSGQGDSLHEHIANLAGSPAIKKGILQTVKVVDELVKVMGRHKPENIVIEMARENQTTQKGQKNSRERMKRIEEGIKELGSQILKEHPVENTQLQNEKLYLYYLQNGRDMYVDQELDINRLSDYDVDHIVPQSFLKDDSIDNKVLTRSDKARGKSDNVPSEEVVKKMKNYWRQLLNAKLITQRKFDNLTKAERGGLSELDKAGFIKRQLVETRQITKHVAQILDSRMNTKYDENDKLIREVKVITLKSKLVSDFRKDFQFYKVREINNYHHAHDAYLNAVVGTALIKKYPKLESEFVYGDYKVYDVRKMIAKSEQEIGKATAKYFFYSNIMNFFKTEITLANGEIRKRPLIETNGETGEIVWDKGRDFATVRKVLSMPQVNIVKKTEVQTGGFSKESILPKRNSDKLIARKKDWDPKKYGGFDSPTVAYSVLVVAKVEKGKSKKLKSVKELLGITIMERSSFEKNPIDFLEAKGYKEVKKDLIIKLPKYSLFELENGRKRMLASAGELQKGNELALPSKYVNFLYLASHYEKLKGSPEDNEQKQLFVEQHKHYLDEIIEQISEFSKRVILADANLDKVLSAYNKHRDKPIREQAENIIHLFTLTNLGAPAAFKYFDTTIDRKRYTSTKEVLDATLIHQSITGLYETRIDLSQLGGDGGPAPGSSGGGGGTLNIEDEYRLHETSKEPDVSLGSTWLSDFPQAWAETGGMGLAVRQAPLIIPLKATSTPVSIKQYPMSQEARLGIKPHIQRLLDQGILVPCQSPWNTPLLPVKKPGTNDYRPVQDLREVNKRVEDIHPTVPNPYNLLSGLPPSHQWYTVLDLKDAFFCLRLHPTSQPLFAFEWRDPEMGISGQLTWTRLPQGFKNSPTLFNEALHRDLADFRIQHPDLILLQYVDDLLLAATSELDCQQGTRALLQTLGNLGYRASAKKAQICQKQVKYLGYLLKEGQRWLTEARKETVMGQPTPKTPRQLREFLGKAGFCRLFIPGFAEMAAPLYPLTKPGTLFNWGPDQQKAYQEIKQALLTAPALGLPDLTKPFELFVDEKQGYAKGVLTQKLGPWRRPVAYLSKKLDPVAAGWPPCLRMVAAIAVLTKDAGKLTMGQPLVILAPHAVEALVKQPPDRWLSNARMTHYQALLLDTDRVQFGPVVALNPATLLPLPEEGLQHNCLDILAEAHGTRPDLTDQPLPDADHTWYTDGSSLLQEGQRKAGAAVTTETEVIWAKALPAGTSAQRAELIALTQALKMAEGKKLNVYTDSRYAFATAHIHGEIYRRRGWLTSEGKEIKNKDEILALLKALFLPKRLSIIHCPGHQKGHSAEARGNRMADQAARKAAITETPDTSTLLIENSSPSGGSKRTADGSEFEAGKRTADGSEFEKRTADGSEFESPKKKAKVE

SEQ ID NO: 2617 - protein, 2114 aa, synthetic construct
MPAAKRVKLDGGDKKYSIGLDIGTNSVGWAVITDEYKVPSKKFKVLGNTDRHSIKKNLIGALLFDSGETAEATRLKRTARRRYTRRKNRICYLQEIFSNEMAKVDDSFFHRLEESFLVEEDKKHERHPIFGNIVDEVAYHEKYPTIYHLRKKLVDSTDKADLRLIYLALAHMIKFRGHFLIEGDLNPDNSDVDKLFIQLVQTYNQLFEENPINASGVDAKAILSARLSKSRRLENLIAQLPGEKKNGLFGNLIALSLGLTPNFKSNFDLAEDAKLQLSKDTYDDDLDNLLAQIGDQYADLFLAAKNLSDAILLSDILRVNTEITKAPLSASMIKRYDEHHQDLTLLKALVRQQLPEKYKEIFFDQSKNGYAGYIDGGASQEEFYKFIKPILEKMDGTEELLVKLNREDLLRKQRTFDNGSIPHQIHLGELHAILRRQEDFYPFLKDNREKIEKILTFRIPYYVGPLARGNSRFAWMTRKSEETITPWNFEEVVDKGASAQSFIERMTNFDKNLPNEKVLPKHSLLYEYFTVYNELTKVKYVTEGMRKPAFLSGEQKKAIVDLLFKTNRKVTVKQLKEDYFKKIECFDSVEISGVEDRFNASLGTYHDLLKIIKDKDFLDNEENEDILEDIVLTLTLFEDREMIEERLKTYAHLFDDKVMKQLKRRRYTGWGRLSRKLINGIRDKQSGKTILDFLKSDGFANRNFMQLIHDDSLTFKEDIQKAQVSGQGDSLHEHIANLAGSPAIKKGILQTVKVVDELVKVMGRHKPENIVIEMARENQTTQKGQKNSRERMKRIEEGIKELGSQILKEHPVENTQLQNEKLYLYYLQNGRDMYVDQELDINRLSDYDVDHIVPQSFLKDDSIDNKVLTRSDKARGKSDNVPSEEVVKKMKNYWRQLLNAKLITQRKFDNLTKAERGGLSELDKAGFIKRQLVETRQITKHVAQILDSRMNTKYDENDKLIREVKVITLKSKLVSDFRKDFQFYKVREINNYHHAHDAYLNAVVGTALIKKYPKLESEFVYGDYKVYDVRKMIAKSEQEIGKATAKYFFYSNIMNFFKTEITLANGEIRKRPLIETNGETGEIVWDKGRDFATVRKVLSMPQVNIVKKTEVQTGGFSKESILPKRNSDKLIARKKDWDPKKYGGFDSPTVAYSVLVVAKVEKGKSKKLKSVKELLGITIMERSSFEKNPIDFLEAKGYKEVKKDLIIKLPKYSLFELENGRKRMLASAGELQKGNELALPSKYVNFLYLASHYEKLKGSPEDNEQKQLFVEQHKHYLDEIIEQISEFSKRVILADANLDKVLSAYNKHRDKPIREQAENIIHLFTLTNLGAPAAFKYFDTTIDRKRYTSTKEVLDATLIHQSITGLYETRIDLSQLGGDGGGSSGGGGGSGGTLNIEDEYRLHETSKEPDVSLGSTWLSDFPQAWAETGGMGLAVRQAPLIIPLKATSTPVSIKQYPMSQEARLGIKPHIQRLLDQGILVPCQSPWNTPLLPVKKPGTNDYRPVQDLREVNKRVEDIHPTVPNPYNLLSGLPPSHQWYTVLDLKDAFFCLRLHPTSQPLFAFEWRDPEMGISGQLTWTRLPQGFKNSPTLFNEALHRDLADFRIQHPDLILLQYVDDLLLAATSELDCQQGTRALLQTLGNLGYRASAKKAQICQKQVKYLGYLLKEGQRWLTEARKETVMGQPTPKTPRQLREFLGKAGFCRLFIPGFAEMAAPLYPLTKPGTLFNWGPDQQKAYQEIKQALLTAPALGLPDLTKPFELFVDEKQGYAKGVLTQKLGPWRRPVAYLSKKLDPVAAGWPPCLRMVAAIAVLTKDAGKLTMGQPLVILAPHAVEALVKQPPDRWLSNARMTHYQALLLDTDRVQFGPVVALNPATLLPLPEEGLQHNCLDILAEAHGTRPDLTDQPLPDADHTWYTDGSSLLQEGQRKAGAAVTTETEVIWAKALPAGTSAQRAELIALTQALKMAEGKKLNVYTDSRYAFATAHIHGEIYRRRGWLTSEGKEIKNKDEILALLKALFLPKRLSIIHCPGHQKGHSAEARGNRMADQAARKAAITETPDTSTLLIENSSPSGGSKRTADGSEFEAGKRTADGSEFEKRTADGSEFESPKKKAKVE

SEQ ID NO: 2618 - protein, 2114 aa, synthetic construct
MPAAKRVKLDGGDKKYSIGLDIGTNSVGWAVITDEYKVPSKKFKVLGNTDRHSIKKNLIGALLFDSGETAEATRLKRTARRRYTRRKNRICYLQEIFSNEMAKVDDSFFHRLEESFLVEEDKKHERHPIFGNIVDEVAYHEKYPTIYHLRKKLVDSTDKADLRLIYLALAHMIKFRGHFLIEGDLNPDNSDVDKLFIQLVQTYNQLFEENPINASGVDAKAILSARLSKSRRLENLIAQLPGEKKNGLFGNLIALSLGLTPNFKSNFDLAEDAKLQLSKDTYDDDLDNLLAQIGDQYADLFLAAKNLSDAILLSDILRVNTEITKAPLSASMIKRYDEHHQDLTLLKALVRQQLPEKYKEIFFDQSKNGYAGYIDGGASQEEFYKFIKPILEKMDGTEELLVKLNREDLLRKQRTFDNGSIPHQIHLGELHAILRRQEDFYPFLKDNREKIEKILTFRIPYYVGPLARGNSRFAWMTRKSEETITPWNFEEVVDKGASAQSFIERMTNFDKNLPNEKVLPKHSLLYEYFTVYNELTKVKYVTEGMRKPAFLSGEQKKAIVDLLFKTNRKVTVKQLKEDYFKKIECFDSVEISGVEDRFNASLGTYHDLLKIIKDKDFLDNEENEDILEDIVLTLTLFEDREMIEERLKTYAHLFDDKVMKQLKRRRYTGWGRLSRKLINGIRDKQSGKTILDFLKSDGFANRNFMQLIHDDSLTFKEDIQKAQVSGQGDSLHEHIANLAGSPAIKKGILQTVKVVDELVKVMGRHKPENIVIEMARENQTTQKGQKNSRERMKRIEEGIKELGSQILKEHPVENTQLQNEKLYLYYLQNGRDMYVDQELDINRLSDYDVDHIVPQSFLKDDSIDNKVLTRSDKARGKSDNVPSEEVVKKMKNYWRQLLNAKLITQRKFDNLTKAERGGLSELDKAGFIKRQLVETRQITKHVAQILDSRMNTKYDENDKLIREVKVITLKSKLVSDFRKDFQFYKVREINNYHHAHDAYLNAVVGTALIKKYPKLESEFVYGDYKVYDVRKMIAKSEQEIGKATAKYFFYSNIMNFFKTEITLANGEIRKRPLIETNGETGEIVWDKGRDFATVRKVLSMPQVNIVKKTEVQTGGFSKESILPKRNSDKLIARKKDWDPKKYGGFDSPTVAYSVLVVAKVEKGKSKKLKSVKELLGITIMERSSFEKNPIDFLEAKGYKEVKKDLIIKLPKYSLFELENGRKRMLASAGELQKGNELALPSKYVNFLYLASHYEKLKGSPEDNEQKQLFVEQHKHYLDEIIEQISEFSKRVILADANLDKVLSAYNKHRDKPIREQAENIIHLFTLTNLGAPAAFKYFDTTIDRKRYTSTKEVLDATLIHQSITGLYETRIDLSQLGGDGGGGGPAPGGSGGTLNIEDEYRLHETSKEPDVSLGSTWLSDFPQAWAETGGMGLAVRQAPLIIPLKATSTPVSIKQYPMSQEARLGIKPHIQRLLDQGILVPCQSPWNTPLLPVKKPGTNDYRPVQDLREVNKRVEDIHPTVPNPYNLLSGLPPSHQWYTVLDLKDAFFCLRLHPTSQPLFAFEWRDPEMGISGQLTWTRLPQGFKNSPTLFNEALHRDLADFRIQHPDLILLQYVDDLLLAATSELDCQQGTRALLQTLGNLGYRASAKKAQICQKQVKYLGYLLKEGQRWLTEARKETVMGQPTPKTPRQLREFLGKAGFCRLFIPGFAEMAAPLYPLTKPGTLFNWGPDQQKAYQEIKQALLTAPALGLPDLTKPFELFVDEKQGYAKGVLTQKLGPWRRPVAYLSKKLDPVAAGWPPCLRMVAAIAVLTKDAGKLTMGQPLVILAPHAVEALVKQPPDRWLSNARMTHYQALLLDTDRVQFGPVVALNPATLLPLPEEGLQHNCLDILAEAHGTRPDLTDQPLPDADHTWYTDGSSLLQEGQRKAGAAVTTETEVIWAKALPAGTSAQRAELIALTQALKMAEGKKLNVYTDSRYAFATAHIHGEIYRRRGWLTSEGKEIKNKDEILALLKALFLPKRLSIIHCPGHQKGHSAEARGNRMADQAARKAAITETPDTSTLLIENSSPSGGSKRTADGSEFEAGKRTADGSEFEKRTADGSEFESPKKKAKVE

SEQ ID NO: 2619 - protein, 2116 aa, synthetic construct
MPAAKRVKLDGGDKKYSIGLDIGTNSVGWAVITDEYKVPSKKFKVLGNTDRHSIKKNLIGALLFDSGETAEATRLKRTARRRYTRRKNRICYLQEIFSNEMAKVDDSFFHRLEESFLVEEDKKHERHPIFGNIVDEVAYHEKYPTIYHLRKKLVDSTDKADLRLIYLALAHMIKFRGHFLIEGDLNPDNSDVDKLFIQLVQTYNQLFEENPINASGVDAKAILSARLSKSRRLENLIAQLPGEKKNGLFGNLIALSLGLTPNFKSNFDLAEDAKLQLSKDTYDDDLDNLLAQIGDQYADLFLAAKNLSDAILLSDILRVNTEITKAPLSASMIKRYDEHHQDLTLLKALVRQQLPEKYKEIFFDQSKNGYAGYIDGGASQEEFYKFIKPILEKMDGTEELLVKLNREDLLRKQRTFDNGSIPHQIHLGELHAILRRQEDFYPFLKDNREKIEKILTFRIPYYVGPLARGNSRFAWMTRKSEETITPWNFEEVVDKGASAQSFIERMTNFDKNLPNEKVLPKHSLLYEYFTVYNELTKVKYVTEGMRKPAFLSGEQKKAIVDLLFKTNRKVTVKQLKEDYFKKIECFDSVEISGVEDRFNASLGTYHDLLKIIKDKDFLDNEENEDILEDIVLTLTLFEDREMIEERLKTYAHLFDDKVMKQLKRRRYTGWGRLSRKLINGIRDKQSGKTILDFLKSDGFANRNFMQLIHDDSLTFKEDIQKAQVSGQGDSLHEHIANLAGSPAIKKGILQTVKVVDELVKVMGRHKPENIVIEMARENQTTQKGQKNSRERMKRIEEGIKELGSQILKEHPVENTQLQNEKLYLYYLQNGRDMYVDQELDINRLSDYDVDHIVPQSFLKDDSIDNKVLTRSDKARGKSDNVPSEEVVKKMKNYWRQLLNAKLITQRKFDNLTKAERGGLSELDKAGFIKRQLVETRQITKHVAQILDSRMNTKYDENDKLIREVKVITLKSKLVSDFRKDFQFYKVREINNYHHAHDAYLNAVVGTALIKKYPKLESEFVYGDYKVYDVRKMIAKSEQEIGKATAKYFFYSNIMNFFKTEITLANGEIRKRPLIETNGETGEIVWDKGRDFATVRKVLSMPQVNIVKKTEVQTGGFSKESILPKRNSDKLIARKKDWDPKKYGGFDSPTVAYSVLVVAKVEKGKSKKLKSVKELLGITIMERSSFEKNPIDFLEAKGYKEVKKDLIIKLPKYSLFELENGRKRMLASAGELQKGNELALPSKYVNFLYLASHYEKLKGSPEDNEQKQLFVEQHKHYLDEIIEQISEFSKRVILADANLDKVLSAYNKHRDKPIREQAENIIHLFTLTNLGAPAAFKYFDTTIDRKRYTSTKEVLDATLIHQSITGLYETRIDLSQLGGDGGPAPAPAPAPAPGGTLNIEDEYRLHETSKEPDVSLGSTWLSDFPQAWAETGGMGLAVRQAPLIIPLKATSTPVSIKQYPMSQEARLGIKPHIQRLLDQGILVPCQSPWNTPLLPVKKPGTNDYRPVQDLREVNKRVEDIHPTVPNPYNLLSGLPPSHQWYTVLDLKDAFFCLRLHPTSQPLFAFEWRDPEMGISGQLTWTRLPQGFKNSPTLFNEALHRDLADFRIQHPDLILLQYVDDLLLAATSELDCQQGTRALLQTLGNLGYRASAKKAQICQKQVKYLGYLLKEGQRWLTEARKETVMGQPTPKTPRQLREFLGKAGFCRLFIPGFAEMAAPLYPLTKPGTLFNWGPDQQKAYQEIKQALLTAPALGLPDLTKPFELFVDEKQGYAKGVLTQKLGPWRRPVAYLSKKLDPVAAGWPPCLRMVAAIAVLTKDAGKLTMGQPLVILAPHAVEALVKQPPDRWLSNARMTHYQALLLDTDRVQFGPVVALNPATLLPLPEEGLQHNCLDILAEAHGTRPDLTDQPLPDADHTWYTDGSSLLQEGQRKAGAAVTTETEVIWAKALPAGTSAQRAELIALTQALKMAEGKKLNVYTDSRYAFATAHIHGEIYRRRGWLTSEGKEIKNKDEILALLKALFLPKRLSIIHCPGHQKGHSAEARGNRMADQAARKAAITETPDTSTLLIENSSPSGGSKRTADGSEFEAGKRTADGSEFEKRTADGSEFESPKKKAKVE

SEQ ID NO: 2620 - protein, 2110 aa, synthetic construct
MPAAKRVKLDGGDKKYSIGLDIGTNSVGWAVITDEYKVPSKKFKVLGNTDRHSIKKNLIGALLFDSGETAEATRLKRTARRRYTRRKNRICYLQEIFSNEMAKVDDSFFHRLEESFLVEEDKKHERHPIFGNIVDEVAYHEKYPTIYHLRKKLVDSTDKADLRLIYLALAHMIKFRGHFLIEGDLNPDNSDVDKLFIQLVQTYNQLFEENPINASGVDAKAILSARLSKSRRLENLIAQLPGEKKNGLFGNLIALSLGLTPNFKSNFDLAEDAKLQLSKDTYDDDLDNLLAQIGDQYADLFLAAKNLSDAILLSDILRVNTEITKAPLSASMIKRYDEHHQDLTLLKALVRQQLPEKYKEIFFDQSKNGYAGYIDGGASQEEFYKFIKPILEKMDGTEELLVKLNREDLLRKQRTFDNGSIPHQIHLGELHAILRRQEDFYPFLKDNREKIEKILTFRIPYYVGPLARGNSRFAWMTRKSEETITPWNFEEVVDKGASAQSFIERMTNFDKNLPNEKVLPKHSLLYEYFTVYNELTKVKYVTEGMRKPAFLSGEQKKAIVDLLFKTNRKVTVKQLKEDYFKKIECFDSVEISGVEDRFNASLGTYHDLLKIIKDKDFLDNEENEDILEDIVLTLTLFEDREMIEERLKTYAHLFDDKVMKQLKRRRYTGWGRLSRKLINGIRDKQSGKTILDFLKSDGFANRNFMQLIHDDSLTFKEDIQKAQVSGQGDSLHEHIANLAGSPAIKKGILQTVKVVDELVKVMGRHKPENIVIEMARENQTTQKGQKNSRERMKRIEEGIKELGSQILKEHPVENTQLQNEKLYLYYLQNGRDMYVDQELDINRLSDYDVDHIVPQSFLKDDSIDNKVLTRSDKARGKSDNVPSEEVVKKMKNYWRQLLNAKLITQRKFDNLTKAERGGLSELDKAGFIKRQLVETRQITKHVAQILDSRMNTKYDENDKLIREVKVITLKSKLVSDFRKDFQFYKVREINNYHHAHDAYLNAVVGTALIKKYPKLESEFVYGDYKVYDVRKMIAKSEQEIGKATAKYFFYSNIMNFFKTEITLANGEIRKRPLIETNGETGEIVWDKGRDFATVRKVLSMPQVNIVKKTEVQTGGFSKESILPKRNSDKLIARKKDWDPKKYGGFDSPTVAYSVLVVAKVEKGKSKKLKSVKELLGITIMERSSFEKNPIDFLEAKGYKEVKKDLIIKLPKYSLFELENGRKRMLASAGELQKGNELALPSKYVNFLYLASHYEKLKGSPEDNEQKQLFVEQHKHYLDEIIEQISEFSKRVILADANLDKVLSAYNKHRDKPIREQAENIIHLFTLTNLGAPAAFKYFDTTIDRKRYTSTKEVLDATLIHQSITGLYETRIDLSQLGGDGGEAAAKGGTLNIEDEYRLHETSKEPDVSLGSTWLSDFPQAWAETGGMGLAVRQAPLIIPLKATSTPVSIKQYPMSQEARLGIKPHIQRLLDQGILVPCQSPWNTPLLPVKKPGTNDYRPVQDLREVNKRVEDIHPTVPNPYNLLSGLPPSHQWYTVLDLKDAFFCLRLHPTSQPLFAFEWRDPEMGISGQLTWTRLPQGFKNSPTLFNEALHRDLADFRIQHPDLILLQYVDDLLLAATSELDCQQGTRALLQTLGNLGYRASAKKAQICQKQVKYLGYLLKEGQRWLTEARKETVMGQPTPKTPRQLREFLGKAGFCRLFIPGFAEMAAPLYPLTKPGTLFNWGPDQQKAYQEIKQALLTAPALGLPDLTKPFELFVDEKQGYAKGVLTQKLGPWRRPVAYLSKKLDPVAAGWPPCLRMVAAIAVLTKDAGKLTMGQPLVILAPHAVEALVKQPPDRWLSNARMTHYQALLLDTDRVQFGPVVALNPATLLPLPEEGLQHNCLDILAEAHGTRPDLTDQPLPDADHTWYTDGSSLLQEGQRKAGAAVTTETEVIWAKALPAGTSAQRAELIALTQALKMAEGKKLNVYTDSRYAFATAHIHGEIYRRRGWLTSEGKEIKNKDEILALLKALFLPKRLSIIHCPGHQKGHSAEARGNRMADQAARKAAITETPDTSTLLIENSSPSGGSKRTADGSEFEAGKRTADGSEFEKRTADGSEFESPKKKAKVE

SEQ ID NO: 2621 - protein, 2111 aa, synthetic construct
MPAAKRVKLDGGDKKYSIGLDIGTNSVGWAVITDEYKVPSKKFKVLGNTDRHSIKKNLIGALLFDSGETAEATRLKRTARRRYTRRKNRICYLQEIFSNEMAKVDDSFFHRLEESFLVEEDKKHERHPIFGNIVDEVAYHEKYPTIYHLRKKLVDSTDKADLRLIYLALAHMIKFRGHFLIEGDLNPDNSDVDKLFIQLVQTYNQLFEENPINASGVDAKAILSARLSKSRRLENLIAQLPGEKKNGLFGNLIALSLGLTPNFKSNFDLAEDAKLQLSKDTYDDDLDNLLAQIGDQYADLFLAAKNLSDAILLSDILRVNTEITKAPLSASMIKRYDEHHQDLTLLKALVRQQLPEKYKEIFFDQSKNGYAGYIDGGASQEEFYKFIKPILEKMDGTEELLVKLNREDLLRKQRTFDNGSIPHQIHLGELHAILRRQEDFYPFLKDNREKIEKILTFRIPYYVGPLARGNSRFAWMTRKSEETITPWNFEEVVDKGASAQSFIERMTNFDKNLPNEKVLPKHSLLYEYFTVYNELTKVKYVTEGMRKPAFLSGEQKKAIVDLLFKTNRKVTVKQLKEDYFKKIECFDSVEISGVEDRFNASLGTYHDLLKIIKDKDFLDNEENEDILEDIVLTLTLFEDREMIEERLKTYAHLFDDKVMKQLKRRRYTGWGRLSRKLINGIRDKQSGKTILDFLKSDGFANRNFMQLIHDDSLTFKEDIQKAQVSGQGDSLHEHIANLAGSPAIKKGILQTVKVVDELVKVMGRHKPENIVIEMARENQTTQKGQKNSRERMKRIEEGIKELGSQILKEHPVENTQLQNEKLYLYYLQNGRDMYVDQELDINRLSDYDVDHIVPQSFLKDDSIDNKVLTRSDKARGKSDNVPSEEVVKKMKNYWRQLLNAKLITQRKFDNLTKAERGGLSELDKAGFIKRQLVETRQITKHVAQILDSRMNTKYDENDKLIREVKVITLKSKLVSDFRKDFQFYKVREINNYHHAHDAYLNAVVGTALIKKYPKLESEFVYGDYKVYDVRKMIAKSEQEIGKATAKYFFYSNIMNFFKTEITLANGEIRKRPLIETNGETGEIVWDKGRDFATVRKVLSMPQVNIVKKTEVQTGGFSKESILPKRNSDKLIARKKDWDPKKYGGFDSPTVAYSVLVVAKVEKGKSKKLKSVKELLGITIMERSSFEKNPIDFLEAKGYKEVKKDLIIKLPKYSLFELENGRKRMLASAGELQKGNELALPSKYVNFLYLASHYEKLKGSPEDNEQKQLFVEQHKHYLDEIIEQISEFSKRVILADANLDKVLSAYNKHRDKPIREQAENIIHLFTLTNLGAPAAFKYFDTTIDRKRYTSTKEVLDATLIHQSITGLYETRIDLSQLGGDGGGGGGSSGGTLNIEDEYRLHETSKEPDVSLGSTWLSDFPQAWAETGGMGLAVRQAPLIIPLKATSTPVSIKQYPMSQEARLGIKPHIQRLLDQGILVPCQSPWNTPLLPVKKPGTNDYRPVQDLREVNKRVEDIHPTVPNPYNLLSGLPPSHQWYTVLDLKDAFFCLRLHPTSQPLFAFEWRDPEMGISGQLTWTRLPQGFKNSPTLFNEALHRDLADFRIQHPDLILLQYVDDLLLAATSELDCQQGTRALLQTLGNLGYRASAKKAQICQKQVKYLGYLLKEGQRWLTEARKETVMGQPTPKTPRQLREFLGKAGFCRLFIPGFAEMAAPLYPLTKPGTLFNWGPDQQKAYQEIKQALLTAPALGLPDLTKPFELFVDEKQGYAKGVLTQKLGPWRRPVAYLSKKLDPVAAGWPPCLRMVAAIAVLTKDAGKLTMGQPLVILAPHAVEALVKQPPDRWLSNARMTHYQALLLDTDRVQFGPVVALNPATLLPLPEEGLQHNCLDILAEAHGTRPDLTDQPLPDADHTWYTDGSSLLQEGQRKAGAAVTTETEVIWAKALPAGTSAQRAELIALTQALKMAEGKKLNVYTDSRYAFATAHIHGEIYRRRGWLTSEGKEIKNKDEILALLKALFLPKRLSIIHCPGHQKGHSAEARGNRMADQAARKAAITETPDTSTLLIENSSPSGGSKRTADGSEFEAGKRTADGSEFEKRTADGSEFESPKKKAKVE

SEQ ID NO: 2622 - protein, 2114 aa, synthetic construct
MPAAKRVKLDGGDKKYSIGLDIGTNSVGWAVITDEYKVPSKKFKVLGNTDRHSIKKNLIGALLFDSGETAEATRLKRTARRRYTRRKNRICYLQEIFSNEMAKVDDSFFHRLEESFLVEEDKKHERHPIFGNIVDEVAYHEKYPTIYHLRKKLVDSTDKADLRLIYLALAHMIKFRGHFLIEGDLNPDNSDVDKLFIQLVQTYNQLFEENPINASGVDAKAILSARLSKSRRLENLIAQLPGEKKNGLFGNLIALSLGLTPNFKSNFDLAEDAKLQLSKDTYDDDLDNLLAQIGDQYADLFLAAKNLSDAILLSDILRVNTEITKAPLSASMIKRYDEHHQDLTLLKALVRQQLPEKYKEIFFDQSKNGYAGYIDGGASQEEFYKFIKPILEKMDGTEELLVKLNREDLLRKQRTFDNGSIPHQIHLGELHAILRRQEDFYPFLKDNREKIEKILTFRIPYYVGPLARGNSRFAWMTRKSEETITPWNFEEVVDKGASAQSFIERMTNFDKNLPNEKVLPKHSLLYEYFTVYNELTKVKYVTEGMRKPAFLSGEQKKAIVDLLFKTNRKVTVKQLKEDYFKKIECFDSVEISGVEDRFNASLGTYHDLLKIIKDKDFLDNEENEDILEDIVLTLTLFEDREMIEERLKTYAHLFDDKVMKQLKRRRYTGWGRLSRKLINGIRDKQSGKTILDFLKSDGFANRNFMQLIHDDSLTFKEDIQKAQVSGQGDSLHEHIANLAGSPAIKKGILQTVKVVDELVKVMGRHKPENIVIEMARENQTTQKGQKNSRERMKRIEEGIKELGSQILKEHPVENTQLQNEKLYLYYLQNGRDMYVDQELDINRLSDYDVDHIVPQSFLKDDSIDNKVLTRSDKARGKSDNVPSEEVVKKMKNYWRQLLNAKLITQRKFDNLTKAERGGLSELDKAGFIKRQLVETRQITKHVAQILDSRMNTKYDENDKLIREVKVITLKSKLVSDFRKDFQFYKVREINNYHHAHDAYLNAVVGTALIKKYPKLESEFVYGDYKVYDVRKMIAKSEQEIGKATAKYFFYSNIMNFFKTEITLANGEIRKRPLIETNGETGEIVWDKGRDFATVRKVLSMPQVNIVKKTEVQTGGFSKESILPKRNSDKLIARKKDWDPKKYGGFDSPTVAYSVLVVAKVEKGKSKKLKSVKELLGITIMERSSFEKNPIDFLEAKGYKEVKKDLIIKLPKYSLFELENGRKRMLASAGELQKGNELALPSKYVNFLYLASHYEKLKGSPEDNEQKQLFVEQHKHYLDEIIEQISEFSKRVILADANLDKVLSAYNKHRDKPIREQAENIIHLFTLTNLGAPAAFKYFDTTIDRKRYTSTKEVLDATLIHQSITGLYETRIDLSQLGGDGGGGSGGGPAPGGTLNIEDEYRLHETSKEPDVSLGSTWLSDFPQAWAETGGMGLAVRQAPLIIPLKATSTPVSIKQYPMSQEARLGIKPHIQRLLDQGILVPCQSPWNTPLLPVKKPGTNDYRPVQDLREVNKRVEDIHPTVPNPYNLLSGLPPSHQWYTVLDLKDAFFCLRLHPTSQPLFAFEWRDPEMGISGQLTWTRLPQGFKNSPTLFNEALHRDLADFRIQHPDLILLQYVDDLLLAATSELDCQQGTRALLQTLGNLGYRASAKKAQICQKQVKYLGYLLKEGQRWLTEARKETVMGQPTPKTPRQLREFLGKAGFCRLFIPGFAEMAAPLYPLTKPGTLFNWGPDQQKAYQEIKQALLTAPALGLPDLTKPFELFVDEKQGYAKGVLTQKLGPWRRPVAYLSKKLDPVAAGWPPCLRMVAAIAVLTKDAGKLTMGQPLVILAPHAVEALVKQPPDRWLSNARMTHYQALLLDTDRVQFGPVVALNPATLLPLPEEGLQHNCLDILAEAHGTRPDLTDQPLPDADHTWYTDGSSLLQEGQRKAGAAVTTETEVIWAKALPAGTSAQRAELIALTQALKMAEGKKLNVYTDSRYAFATAHIHGEIYRRRGWLTSEGKEIKNKDEILALLKALFLPKRLSIIHCPGHQKGHSAEARGNRMADQAARKAAITETPDTSTLLIENSSPSGGSKRTADGSEFEAGKRTADGSEFEKRTADGSEFESPKKKAKVE

SEQ ID NO: 2623 - protein, 2120 aa, synthetic construct
MPAAKRVKLDGGDKKYSIGLDIGTNSVGWAVITDEYKVPSKKFKVLGNTDRHSIKKNLIGALLFDSGETAEATRLKRTARRRYTRRKNRICYLQEIFSNEMAKVDDSFFHRLEESFLVEEDKKHERHPIFGNIVDEVAYHEKYPTIYHLRKKLVDSTDKADLRLIYLALAHMIKFRGHFLIEGDLNPDNSDVDKLFIQLVQTYNQLFEENPINASGVDAKAILSARLSKSRRLENLIAQLPGEKKNGLFGNLIALSLGLTPNFKSNFDLAEDAKLQLSKDTYDDDLDNLLAQIGDQYADLFLAAKNLSDAILLSDILRVNTEITKAPLSASMIKRYDEHHQDLTLLKALVRQQLPEKYKEIFFDQSKNGYAGYIDGGASQEEFYKFIKPILEKMDGTEELLVKLNREDLLRKQRTFDNGSIPHQIHLGELHAILRRQEDFYPFLKDNREKIEKILTFRIPYYVGPLARGNSRFAWMTRKSEETITPWNFEEVVDKGASAQSFIERMTNFDKNLPNEKVLPKHSLLYEYFTVYNELTKVKYVTEGMRKPAFLSGEQKKAIVDLLFKTNRKVTVKQLKEDYFKKIECFDSVEISGVEDRFNASLGTYHDLLKIIKDKDFLDNEENEDILEDIVLTLTLFEDREMIEERLKTYAHLFDDKVMKQLKRRRYTGWGRLSRKLINGIRDKQSGKTILDFLKSDGFANRNFMQLIHDDSLTFKEDIQKAQVSGQGDSLHEHIANLAGSPAIKKGILQTVKVVDELVKVMGRHKPENIVIEMARENQTTQKGQKNSRERMKRIEEGIKELGSQILKEHPVENTQLQNEKLYLYYLQNGRDMYVDQELDINRLSDYDVDHIVPQSFLKDDSIDNKVLTRSDKARGKSDNVPSEEVVKKMKNYWRQLLNAKLITQRKFDNLTKAERGGLSELDKAGFIKRQLVETRQITKHVAQILDSRMNTKYDENDKLIREVKVITLKSKLVSDFRKDFQFYKVREINNYHHAHDAYLNAVVGTALIKKYPKLESEFVYGDYKVYDVRKMIAKSEQEIGKATAKYFFYSNIMNFFKTEITLANGEIRKRPLIETNGETGEIVWDKGRDFATVRKVLSMPQVNIVKKTEVQTGGFSKESILPKRNSDKLIARKKDWDPKKYGGFDSPTVAYSVLVVAKVEKGKSKKLKSVKELLGITIMERSSFEKNPIDFLEAKGYKEVKKDLIIKLPKYSLFELENGRKRMLASAGELQKGNELALPSKYVNFLYLASHYEKLKGSPEDNEQKQLFVEQHKHYLDEIIEQISEFSKRVILADANLDKVLSAYNKHRDKPIREQAENIIHLFTLTNLGAPAAFKYFDTTIDRKRYTSTKEVLDATLIHQSITGLYETRIDLSQLGGDGGEAAAKGGGGSEAAAKGGTLNIEDEYRLHETSKEPDVSLGSTWLSDFPQAWAETGGMGLAVRQAPLIIPLKATSTPVSIKQYPMSQEARLGIKPHIQRLLDQGILVPCQSPWNTPLLPVKKPGTNDYRPVQDLREVNKRVEDIHPTVPNPYNLLSGLPPSHQWYTVLDLKDAFFCLRLHPTSQPLFAFEWRDPEMGISGQLTWTRLPQGFKNSPTLFNEALHRDLADFRIQHPDLILLQYVDDLLLAATSELDCQQGTRALLQTLGNLGYRASAKKAQICQKQVKYLGYLLKEGQRWLTEARKETVMGQPTPKTPRQLREFLGKAGFCRLFIPGFAEMAAPLYPLTKPGTLFNWGPDQQKAYQEIKQALLTAPALGLPDLTKPFELFVDEKQGYAKGVLTQKLGPWRRPVAYLSKKLDPVAAGWPPCLRMVAAIAVLTKDAGKLTMGQPLVILAPHAVEALVKQPPDRWLSNARMTHYQALLLDTDRVQFGPVVALNPATLLPLPEEGLQHNCLDILAEAHGTRPDLTDQPLPDADHTWYTDGSSLLQEGQRKAGAAVTTETEVIWAKALPAGTSAQRAELIALTQALKMAEGKKLNVYTDSRYAFATAHIHGEIYRRRGWLTSEGKEIKNKDEILALLKALFLPKRLSIIHCPGHQKGHSAEARGNRMADQAARKAAITETPDTSTLLIENSSPSGGSKRTADGSEFEAGKRTADGSEFEKRTADGSEFESPKKKAKVE

SEQ ID NO: 2624 - protein, 2108 aa, synthetic construct
MPAAKRVKLDGGDKKYSIGLDIGTNSVGWAVITDEYKVPSKKFKVLGNTDRHSIKKNLIGALLFDSGETAEATRLKRTARRRYTRRKNRICYLQEIFSNEMAKVDDSFFHRLEESFLVEEDKKHERHPIFGNIVDEVAYHEKYPTIYHLRKKLVDSTDKADLRLIYLALAHMIKFRGHFLIEGDLNPDNSDVDKLFIQLVQTYNQLFEENPINASGVDAKAILSARLSKSRRLENLIAQLPGEKKNGLFGNLIALSLGLTPNFKSNFDLAEDAKLQLSKDTYDDDLDNLLAQIGDQYADLFLAAKNLSDAILLSDILRVNTEITKAPLSASMIKRYDEHHQDLTLLKALVRQQLPEKYKEIFFDQSKNGYAGYIDGGASQEEFYKFIKPILEKMDGTEELLVKLNREDLLRKQRTFDNGSIPHQIHLGELHAILRRQEDFYPFLKDNREKIEKILTFRIPYYVGPLARGNSRFAWMTRKSEETITPWNFEEVVDKGASAQSFIERMTNFDKNLPNEKVLPKHSLLYEYFTVYNELTKVKYVTEGMRKPAFLSGEQKKAIVDLLFKTNRKVTVKQLKEDYFKKIECFDSVEISGVEDRFNASLGTYHDLLKIIKDKDFLDNEENEDILEDIVLTLTLFEDREMIEERLKTYAHLFDDKVMKQLKRRRYTGWGRLSRKLINGIRDKQSGKTILDFLKSDGFANRNFMQLIHDDSLTFKEDIQKAQVSGQGDSLHEHIANLAGSPAIKKGILQTVKVVDELVKVMGRHKPENIVIEMARENQTTQKGQKNSRERMKRIEEGIKELGSQILKEHPVENTQLQNEKLYLYYLQNGRDMYVDQELDINRLSDYDVDHIVPQSFLKDDSIDNKVLTRSDKARGKSDNVPSEEVVKKMKNYWRQLLNAKLITQRKFDNLTKAERGGLSELDKAGFIKRQLVETRQITKHVAQILDSRMNTKYDENDKLIREVKVITLKSKLVSDFRKDFQFYKVREINNYHHAHDAYLNAVVGTALIKKYPKLESEFVYGDYKVYDVRKMIAKSEQEIGKATAKYFFYSNIMNFFKTEITLANGEIRKRPLIETNGETGEIVWDKGRDFATVRKVLSMPQVNIVKKTEVQTGGFSKESILPKRNSDKLIARKKDWDPKKYGGFDSPTVAYSVLVVAKVEKGKSKKLKSVKELLGITIMERSSFEKNPIDFLEAKGYKEVKKDLIIKLPKYSLFELENGRKRMLASAGELQKGNELALPSKYVNFLYLASHYEKLKGSPEDNEQKQLFVEQHKHYLDEIIEQISEFSKRVILADANLDKVLSAYNKHRDKPIREQAENIIHLFTLTNLGAPAAFKYFDTTIDRKRYTSTKEVLDATLIHQSITGLYETRIDLSQLGGDGGPAPGGTLNIEDEYRLHETSKEPDVSLGSTWLSDFPQAWAETGGMGLAVRQAPLIIPLKATSTPVSIKQYPMSQEARLGIKPHIQRLLDQGILVPCQSPWNTPLLPVKKPGTNDYRPVQDLREVNKRVEDIHPTVPNPYNLLSGLPPSHQWYTVLDLKDAFFCLRLHPTSQPLFAFEWRDPEMGISGQLTWTRLPQGFKNSPTLFNEALHRDLADFRIQHPDLILLQYVDDLLLAATSELDCQQGTRALLQTLGNLGYRASAKKAQICQKQVKYLGYLLKEGQRWLTEARKETVMGQPTPKTPRQLREFLGKAGFCRLFIPGFAEMAAPLYPLTKPGTLFNWGPDQQKAYQEIKQALLTAPALGLPDLTKPFELFVDEKQGYAKGVLTQKLGPWRRPVAYLSKKLDPVAAGWPPCLRMVAAIAVLTKDAGKLTMGQPLVILAPHAVEALVKQPPDRWLSNARMTHYQALLLDTDRVQFGPVVALNPATLLPLPEEGLQHNCLDILAEAHGTRPDLTDQPLPDADHTWYTDGSSLLQEGQRKAGAAVTTETEVIWAKALPAGTSAQRAELIALTQALKMAEGKKLNVYTDSRYAFATAHIHGEIYRRRGWLTSEGKEIKNKDEILALLKALFLPKRLSIIHCPGHQKGHSAEARGNRMADQAARKAAITETPDTSTLLIENSSPSGGSKRTADGSEFEAGKRTADGSEFEKRTADGSEFESPKKKAKVE

SEQ ID NO: 2625 - protein, 2113 aa, synthetic construct
MPAAKRVKLDGGDKKYSIGLDIGTNSVGWAVITDEYKVPSKKFKVLGNTDRHSIKKNLIGALLFDSGETAEATRLKRTARRRYTRRKNRICYLQEIFSNEMAKVDDSFFHRLEESFLVEEDKKHERHPIFGNIVDEVAYHEKYPTIYHLRKKLVDSTDKADLRLIYLALAHMIKFRGHFLIEGDLNPDNSDVDKLFIQLVQTYNQLFEENPINASGVDAKAILSARLSKSRRLENLIAQLPGEKKNGLFGNLIALSLGLTPNFKSNFDLAEDAKLQLSKDTYDDDLDNLLAQIGDQYADLFLAAKNLSDAILLSDILRVNTEITKAPLSASMIKRYDEHHQDLTLLKALVRQQLPEKYKEIFFDQSKNGYAGYIDGGASQEEFYKFIKPILEKMDGTEELLVKLNREDLLRKQRTFDNGSIPHQIHLGELHAILRRQEDFYPFLKDNREKIEKILTFRIPYYVGPLARGNSRFAWMTRKSEETITPWNFEEVVDKGASAQSFIERMTNFDKNLPNEKVLPKHSLLYEYFTVYNELTKVKYVTEGMRKPAFLSGEQKKAIVDLLFKTNRKVTVKQLKEDYFKKIECFDSVEISGVEDRFNASLGTYHDLLKIIKDKDFLDNEENEDILEDIVLTLTLFEDREMIEERLKTYAHLFDDKVMKQLKRRRYTGWGRLSRKLINGIRDKQSGKTILDFLKSDGFANRNFMQLIHDDSLTFKEDIQKAQVSGQGDSLHEHIANLAGSPAIKKGILQTVKVVDELVKVMGRHKPENIVIEMARENQTTQKGQKNSRERMKRIEEGIKELGSQILKEHPVENTQLQNEKLYLYYLQNGRDMYVDQELDINRLSDYDVDHIVPQSFLKDDSIDNKVLTRSDKARGKSDNVPSEEVVKKMKNYWRQLLNAKLITQRKFDNLTKAERGGLSELDKAGFIKRQLVETRQITKHVAQILDSRMNTKYDENDKLIREVKVITLKSKLVSDFRKDFQFYKVREINNYHHAHDAYLNAVVGTALIKKYPKLESEFVYGDYKVYDVRKMIAKSEQEIGKATAKYFFYSNIMNFFKTEITLANGEIRKRPLIETNGETGEIVWDKGRDFATVRKVLSMPQVNIVKKTEVQTGGFSKESILPKRNSDKLIARKKDWDPKKYGGFDSPTVAYSVLVVAKVEKGKSKKLKSVKELLGITIMERSSFEKNPIDFLEAKGYKEVKKDLIIKLPKYSLFELENGRKRMLASAGELQKGNELALPSKYVNFLYLASHYEKLKGSPEDNEQKQLFVEQHKHYLDEIIEQISEFSKRVILADANLDKVLSAYNKHRDKPIREQAENIIHLFTLTNLGAPAAFKYFDTTIDRKRYTSTKEVLDATLIHQSITGLYETRIDLSQLGGDGGEAAAKGSSGGTLNIEDEYRLHETSKEPDVSLGSTWLSDFPQAWAETGGMGLAVRQAPLIIPLKATSTPVSIKQYPMSQEARLGIKPHIQRLLDQGILVPCQSPWNTPLLPVKKPGTNDYRPVQDLREVNKRVEDIHPTVPNPYNLLSGLPPSHQWYTVLDLKDAFFCLRLHPTSQPLFAFEWRDPEMGISGQLTWTRLPQGFKNSPTLFNEALHRDLADFRIQHPDLILLQYVDDLLLAATSELDCQQGTRALLQTLGNLGYRASAKKAQICQKQVKYLGYLLKEGQRWLTEARKETVMGQPTPKTPRQLREFLGKAGFCRLFIPGFAEMAAPLYPLTKPGTLFNWGPDQQKAYQEIKQALLTAPALGLPDLTKPFELFVDEKQGYAKGVLTQKLGPWRRPVAYLSKKLDPVAAGWPPCLRMVAAIAVLTKDAGKLTMGQPLVILAPHAVEALVKQPPDRWLSNARMTHYQALLLDTDRVQFGPVVALNPATLLPLPEEGLQHNCLDILAEAHGTRPDLTDQPLPDADHTWYTDGSSLLQEGQRKAGAAVTTETEVIWAKALPAGTSAQRAELIALTQALKMAEGKKLNVYTDSRYAFATAHIHGEIYRRRGWLTSEGKEIKNKDEILALLKALFLPKRLSIIHCPGHQKGHSAEARGNRMADQAARKAAITETPDTSTLLIENSSPSGGSKRTADGSEFEAGKRTADGSEFEKRTADGSEFESPKKKAKVE

SEQ ID NO: 2626 - protein, 2113 aa, synthetic construct
MPAAKRVKLDGGDKKYSIGLDIGTNSVGWAVITDEYKVPSKKFKVLGNTDRHSIKKNLIGALLFDSGETAEATRLKRTARRRYTRRKNRICYLQEIFSNEMAKVDDSFFHRLEESFLVEEDKKHERHPIFGNIVDEVAYHEKYPTIYHLRKKLVDSTDKADLRLIYLALAHMIKFRGHFLIEGDLNPDNSDVDKLFIQLVQTYNQLFEENPINASGVDAKAILSARLSKSRRLENLIAQLPGEKKNGLFGNLIALSLGLTPNFKSNFDLAEDAKLQLSKDTYDDDLDNLLAQIGDQYADLFLAAKNLSDAILLSDILRVNTEITKAPLSASMIKRYDEHHQDLTLLKALVRQQLPEKYKEIFFDQSKNGYAGYIDGGASQEEFYKFIKPILEKMDGTEELLVKLNREDLLRKQRTFDNGSIPHQIHLGELHAILRRQEDFYPFLKDNREKIEKILTFRIPYYVGPLARGNSRFAWMTRKSEETITPWNFEEVVDKGASAQSFIERMTNFDKNLPNEKVLPKHSLLYEYFTVYNELTKVKYVTEGMRKPAFLSGEQKKAIVDLLFKTNRKVTVKQLKEDYFKKIECFDSVEISGVEDRFNASLGTYHDLLKIIKDKDFLDNEENEDILEDIVLTLTLFEDREMIEERLKTYAHLFDDKVMKQLKRRRYTGWGRLSRKLINGIRDKQSGKTILDFLKSDGFANRNFMQLIHDDSLTFKEDIQKAQVSGQGDSLHEHIANLAGSPAIKKGILQTVKVVDELVKVMGRHKPENIVIEMARENQTTQKGQKNSRERMKRIEEGIKELGSQILKEHPVENTQLQNEKLYLYYLQNGRDMYVDQELDINRLSDYDVDHIVPQSFLKDDSIDNKVLTRSDKARGKSDNVPSEEVVKKMKNYWRQLLNAKLITQRKFDNLTKAERGGLSELDKAGFIKRQLVETRQITKHVAQILDSRMNTKYDENDKLIREVKVITLKSKLVSDFRKDFQFYKVREINNYHHAHDAYLNAVVGTALIKKYPKLESEFVYGDYKVYDVRKMIAKSEQEIGKATAKYFFYSNIMNFFKTEITLANGEIRKRPLIETNGETGEIVWDKGRDFATVRKVLSMPQVNIVKKTEVQTGGFSKESILPKRNSDKLIARKKDWDPKKYGGFDSPTVAYSVLVVAKVEKGKSKKLKSVKELLGITIMERSSFEKNPIDFLEAKGYKEVKKDLIIKLPKYSLFELENGRKRMLASAGELQKGNELALPSKYVNFLYLASHYEKLKGSPEDNEQKQLFVEQHKHYLDEIIEQISEFSKRVILADANLDKVLSAYNKHRDKPIREQAENIIHLFTLTNLGAPAAFKYFDTTIDRKRYTSTKEVLDATLIHQSITGLYETRIDLSQLGGDGGGGGGGGGGGGTLNIEDEYRLHETSKEPDVSLGSTWLSDFPQAWAETGGMGLAVRQAPLIIPLKATSTPVSIKQYPMSQEARLGIKPHIQRLLDQGILVPCQSPWNTPLLPVKKPGTNDYRPVQDLREVNKRVEDIHPTVPNPYNLLSGLPPSHQWYTVLDLKDAFFCLRLHPTSQPLFAFEWRDPEMGISGQLTWTRLPQGFKNSPTLFNEALHRDLADFRIQHPDLILLQYVDDLLLAATSELDCQQGTRALLQTLGNLGYRASAKKAQICQKQVKYLGYLLKEGQRWLTEARKETVMGQPTPKTPRQLREFLGKAGFCRLFIPGFAEMAAPLYPLTKPGTLFNWGPDQQKAYQEIKQALLTAPALGLPDLTKPFELFVDEKQGYAKGVLTQKLGPWRRPVAYLSKKLDPVAAGWPPCLRMVAAIAVLTKDAGKLTMGQPLVILAPHAVEALVKQPPDRWLSNARMTHYQALLLDTDRVQFGPVVALNPATLLPLPEEGLQHNCLDILAEAHGTRPDLTDQPLPDADHTWYTDGSSLLQEGQRKAGAAVTTETEVIWAKALPAGTSAQRAELIALTQALKMAEGKKLNVYTDSRYAFATAHIHGEIYRRRGWLTSEGKEIKNKDEILALLKALFLPKRLSIIHCPGHQKGHSAEARGNRMADQAARKAAITETPDTSTLLIENSSPSGGSKRTADGSEFEAGKRTADGSEFEKRTADGSEFESPKKKAKVE

SEQ ID NO: 2627 - protein, 2120 aa, synthetic construct
MPAAKRVKLDGGDKKYSIGLDIGTNSVGWAVITDEYKVPSKKFKVLGNTDRHSIKKNLIGALLFDSGETAEATRLKRTARRRYTRRKNRICYLQEIFSNEMAKVDDSFFHRLEESFLVEEDKKHERHPIFGNIVDEVAYHEKYPTIYHLRKKLVDSTDKADLRLIYLALAHMIKFRGHFLIEGDLNPDNSDVDKLFIQLVQTYNQLFEENPINASGVDAKAILSARLSKSRRLENLIAQLPGEKKNGLFGNLIALSLGLTPNFKSNFDLAEDAKLQLSKDTYDDDLDNLLAQIGDQYADLFLAAKNLSDAILLSDILRVNTEITKAPLSASMIKRYDEHHQDLTLLKALVRQQLPEKYKEIFFDQSKNGYAGYIDGGASQEEFYKFIKPILEKMDGTEELLVKLNREDLLRKQRTFDNGSIPHQIHLGELHAILRRQEDFYPFLKDNREKIEKILTFRIPYYVGPLARGNSRFAWMTRKSEETITPWNFEEVVDKGASAQSFIERMTNFDKNLPNEKVLPKHSLLYEYFTVYNELTKVKYVTEGMRKPAFLSGEQKKAIVDLLFKTNRKVTVKQLKEDYFKKIECFDSVEISGVEDRFNASLGTYHDLLKIIKDKDFLDNEENEDILEDIVLTLTLFEDREMIEERLKTYAHLFDDKVMKQLKRRRYTGWGRLSRKLINGIRDKQSGKTILDFLKSDGFANRNFMQLIHDDSLTFKEDIQKAQVSGQGDSLHEHIANLAGSPAIKKGILQTVKVVDELVKVMGRHKPENIVIEMARENQTTQKGQKNSRERMKRIEEGIKELGSQILKEHPVENTQLQNEKLYLYYLQNGRDMYVDQELDINRLSDYDVDHIVPQSFLKDDSIDNKVLTRSDKARGKSDNVPSEEVVKKMKNYWRQLLNAKLITQRKFDNLTKAERGGLSELDKAGFIKRQLVETRQITKHVAQILDSRMNTKYDENDKLIREVKVITLKSKLVSDFRKDFQFYKVREINNYHHAHDAYLNAVVGTALIKKYPKLESEFVYGDYKVYDVRKMIAKSEQEIGKATAKYFFYSNIMNFFKTEITLANGEIRKRPLIETNGETGEIVWDKGRDFATVRKVLSMPQVNIVKKTEVQTGGFSKESILPKRNSDKLIARKKDWDPKKYGGFDSPTVAYSVLVVAKVEKGKSKKLKSVKELLGITIMERSSFEKNPIDFLEAKGYKEVKKDLIIKLPKYSLFELENGRKRMLASAGELQKGNELALPSKYVNFLYLASHYEKLKGSPEDNEQKQLFVEQHKHYLDEIIEQISEFSKRVILADANLDKVLSAYNKHRDKPIREQAENIIHLFTLTNLGAPAAFKYFDTTIDRKRYTSTKEVLDATLIHQSITGLYETRIDLSQLGGDGGEAAAKEAAAKEAAAKGGTLNIEDEYRLHETSKEPDVSLGSTWLSDFPQAWAETGGMGLAVRQAPLIIPLKATSTPVSIKQYPMSQEARLGIKPHIQRLLDQGILVPCQSPWNTPLLPVKKPGTNDYRPVQDLREVNKRVEDIHPTVPNPYNLLSGLPPSHQWYTVLDLKDAFFCLRLHPTSQPLFAFEWRDPEMGISGQLTWTRLPQGFKNSPTLFNEALHRDLADFRIQHPDLILLQYVDDLLLAATSELDCQQGTRALLQTLGNLGYRASAKKAQICQKQVKYLGYLLKEGQRWLTEARKETVMGQPTPKTPRQLREFLGKAGFCRLFIPGFAEMAAPLYPLTKPGTLFNWGPDQQKAYQEIKQALLTAPALGLPDLTKPFELFVDEKQGYAKGVLTQKLGPWRRPVAYLSKKLDPVAAGWPPCLRMVAAIAVLTKDAGKLTMGQPLVILAPHAVEALVKQPPDRWLSNARMTHYQALLLDTDRVQFGPVVALNPATLLPLPEEGLQHNCLDILAEAHGTRPDLTDQPLPDADHTWYTDGSSLLQEGQRKAGAAVTTETEVIWAKALPAGTSAQRAELIALTQALKMAEGKKLNVYTDSRYAFATAHIHGEIYRRRGWLTSEGKEIKNKDEILALLKALFLPKRLSIIHCPGHQKGHSAEARGNRMADQAARKAAITETPDTSTLLIENSSPSGGSKRTADGSEFEAGKRTADGSEFEKRTADGSEFESPKKKAKVE

SEQ ID NO: 2628 - protein, 2116 aa, synthetic construct
MPAAKRVKLDGGDKKYSIGLDIGTNSVGWAVITDEYKVPSKKFKVLGNTDRHSIKKNLIGALLFDSGETAEATRLKRTARRRYTRRKNRICYLQEIFSNEMAKVDDSFFHRLEESFLVEEDKKHERHPIFGNIVDEVAYHEKYPTIYHLRKKLVDSTDKADLRLIYLALAHMIKFRGHFLIEGDLNPDNSDVDKLFIQLVQTYNQLFEENPINASGVDAKAILSARLSKSRRLENLIAQLPGEKKNGLFGNLIALSLGLTPNFKSNFDLAEDAKLQLSKDTYDDDLDNLLAQIGDQYADLFLAAKNLSDAILLSDILRVNTEITKAPLSASMIKRYDEHHQDLTLLKALVRQQLPEKYKEIFFDQSKNGYAGYIDGGASQEEFYKFIKPILEKMDGTEELLVKLNREDLLRKQRTFDNGSIPHQIHLGELHAILRRQEDFYPFLKDNREKIEKILTFRIPYYVGPLARGNSRFAWMTRKSEETITPWNFEEVVDKGASAQSFIERMTNFDKNLPNEKVLPKHSLLYEYFTVYNELTKVKYVTEGMRKPAFLSGEQKKAIVDLLFKTNRKVTVKQLKEDYFKKIECFDSVEISGVEDRFNASLGTYHDLLKIIKDKDFLDNEENEDILEDIVLTLTLFEDREMIEERLKTYAHLFDDKVMKQLKRRRYTGWGRLSRKLINGIRDKQSGKTILDFLKSDGFANRNFMQLIHDDSLTFKEDIQKAQVSGQGDSLHEHIANLAGSPAIKKGILQTVKVVDELVKVMGRHKPENIVIEMARENQTTQKGQKNSRERMKRIEEGIKELGSQILKEHPVENTQLQNEKLYLYYLQNGRDMYVDQELDINRLSDYDVDHIVPQSFLKDDSIDNKVLTRSDKARGKSDNVPSEEVVKKMKNYWRQLLNAKLITQRKFDNLTKAERGGLSELDKAGFIKRQLVETRQITKHVAQILDSRMNTKYDENDKLIREVKVITLKSKLVSDFRKDFQFYKVREINNYHHAHDAYLNAVVGTALIKKYPKLESEFVYGDYKVYDVRKMIAKSEQEIGKATAKYFFYSNIMNFFKTEITLANGEIRKRPLIETNGETGEIVWDKGRDFATVRKVLSMPQVNIVKKTEVQTGGFSKESILPKRNSDKLIARKKDWDPKKYGGFDSPTVAYSVLVVAKVEKGKSKKLKSVKELLGITIMERSSFEKNPIDFLEAKGYKEVKKDLIIKLPKYSLFELENGRKRMLASAGELQKGNELALPSKYVNFLYLASHYEKLKGSPEDNEQKQLFVEQHKHYLDEIIEQISEFSKRVILADANLDKVLSAYNKHRDKPIREQAENIIHLFTLTNLGAPAAFKYFDTTIDRKRYTSTKEVLDATLIHQSITGLYETRIDLSQLGGDGGEAAAKPAPGSSGGTLNIEDEYRLHETSKEPDVSLGSTWLSDFPQAWAETGGMGLAVRQAPLIIPLKATSTPVSIKQYPMSQEARLGIKPHIQRLLDQGILVPCQSPWNTPLLPVKKPGTNDYRPVQDLREVNKRVEDIHPTVPNPYNLLSGLPPSHQWYTVLDLKDAFFCLRLHPTSQPLFAFEWRDPEMGISGQLTWTRLPQGFKNSPTLFNEALHRDLADFRIQHPDLILLQYVDDLLLAATSELDCQQGTRALLQTLGNLGYRASAKKAQICQKQVKYLGYLLKEGQRWLTEARKETVMGQPTPKTPRQLREFLGKAGFCRLFIPGFAEMAAPLYPLTKPGTLFNWGPDQQKAYQEIKQALLTAPALGLPDLTKPFELFVDEKQGYAKGVLTQKLGPWRRPVAYLSKKLDPVAAGWPPCLRMVAAIAVLTKDAGKLTMGQPLVILAPHAVEALVKQPPDRWLSNARMTHYQALLLDTDRVQFGPVVALNPATLLPLPEEGLQHNCLDILAEAHGTRPDLTDQPLPDADHTWYTDGSSLLQEGQRKAGAAVTTETEVIWAKALPAGTSAQRAELIALTQALKMAEGKKLNVYTDSRYAFATAHIHGEIYRRRGWLTSEGKEIKNKDEILALLKALFLPKRLSIIHCPGHQKGHSAEARGNRMADQAARKAAITETPDTSTLLIENSSPSGGSKRTADGSEFEAGKRTADGSEFEKRTADGSEFESPKKKAKVE

SEQ ID NO: 2629 - protein, 2116 aa, synthetic construct
MPAAKRVKLDGGDKKYSIGLDIGTNSVGWAVITDEYKVPSKKFKVLGNTDRHSIKKNLIGALLFDSGETAEATRLKRTARRRYTRRKNRICYLQEIFSNEMAKVDDSFFHRLEESFLVEEDKKHERHPIFGNIVDEVAYHEKYPTIYHLRKKLVDSTDKADLRLIYLALAHMIKFRGHFLIEGDLNPDNSDVDKLFIQLVQTYNQLFEENPINASGVDAKAILSARLSKSRRLENLIAQLPGEKKNGLFGNLIALSLGLTPNFKSNFDLAEDAKLQLSKDTYDDDLDNLLAQIGDQYADLFLAAKNLSDAILLSDILRVNTEITKAPLSASMIKRYDEHHQDLTLLKALVRQQLPEKYKEIFFDQSKNGYAGYIDGGASQEEFYKFIKPILEKMDGTEELLVKLNREDLLRKQRTFDNGSIPHQIHLGELHAILRRQEDFYPFLKDNREKIEKILTFRIPYYVGPLARGNSRFAWMTRKSEETITPWNFEEVVDKGASAQSFIERMTNFDKNLPNEKVLPKHSLLYEYFTVYNELTKVKYVTEGMRKPAFLSGEQKKAIVDLLFKTNRKVTVKQLKEDYFKKIECFDSVEISGVEDRFNASLGTYHDLLKIIKDKDFLDNEENEDILEDIVLTLTLFEDREMIEERLKTYAHLFDDKVMKQLKRRRYTGWGRLSRKLINGIRDKQSGKTILDFLKSDGFANRNFMQLIHDDSLTFKEDIQKAQVSGQGDSLHEHIANLAGSPAIKKGILQTVKVVDELVKVMGRHKPENIVIEMARENQTTQKGQKNSRERMKRIEEGIKELGSQILKEHPVENTQLQNEKLYLYYLQNGRDMYVDQELDINRLSDYDVDHIVPQSFLKDDSIDNKVLTRSDKARGKSDNVPSEEVVKKMKNYWRQLLNAKLITQRKFDNLTKAERGGLSELDKAGFIKRQLVETRQITKHVAQILDSRMNTKYDENDKLIREVKVITLKSKLVSDFRKDFQFYKVREINNYHHAHDAYLNAVVGTALIKKYPKLESEFVYGDYKVYDVRKMIAKSEQEIGKATAKYFFYSNIMNFFKTEITLANGEIRKRPLIETNGETGEIVWDKGRDFATVRKVLSMPQVNIVKKTEVQTGGFSKESILPKRNSDKLIARKKDWDPKKYGGFDSPTVAYSVLVVAKVEKGKSKKLKSVKELLGITIMERSSFEKNPIDFLEAKGYKEVKKDLIIKLPKYSLFELENGRKRMLASAGELQKGNELALPSKYVNFLYLASHYEKLKGSPEDNEQKQLFVEQHKHYLDEIIEQISEFSKRVILADANLDKVLSAYNKHRDKPIREQAENIIHLFTLTNLGAPAAFKYFDTTIDRKRYTSTKEVLDATLIHQSITGLYETRIDLSQLGGDGGGGSEAAAKGGGGGTLNIEDEYRLHETSKEPDVSLGSTWLSDFPQAWAETGGMGLAVRQAPLIIPLKATSTPVSIKQYPMSQEARLGIKPHIQRLLDQGILVPCQSPWNTPLLPVKKPGTNDYRPVQDLREVNKRVEDIHPTVPNPYNLLSGLPPSHQWYTVLDLKDAFFCLRLHPTSQPLFAFEWRDPEMGISGQLTWTRLPQGFKNSPTLFNEALHRDLADFRIQHPDLILLQYVDDLLLAATSELDCQQGTRALLQTLGNLGYRASAKKAQICQKQVKYLGYLLKEGQRWLTEARKETVMGQPTPKTPRQLREFLGKAGFCRLFIPGFAEMAAPLYPLTKPGTLFNWGPDQQKAYQEIKQALLTAPALGLPDLTKPFELFVDEKQGYAKGVLTQKLGPWRRPVAYLSKKLDPVAAGWPPCLRMVAAIAVLTKDAGKLTMGQPLVILAPHAVEALVKQPPDRWLSNARMTHYQALLLDTDRVQFGPVVALNPATLLPLPEEGLQHNCLDILAEAHGTRPDLTDQPLPDADHTWYTDGSSLLQEGQRKAGAAVTTETEVIWAKALPAGTSAQRAELIALTQALKMAEGKKLNVYTDSRYAFATAHIHGEIYRRRGWLTSEGKEIKNKDEILALLKALFLPKRLSIIHCPGHQKGHSAEARGNRMADQAARKAAITETPDTSTLLIENSSPSGGSKRTADGSEFEAGKRTADGSEFEKRTADGSEFESPKKKAKVE

SEQ ID NO: 2630 - protein, 2135 aa, synthetic construct
MPAAKRVKLDGGDKKYSIGLDIGTNSVGWAVITDEYKVPSKKFKVLGNTDRHSIKKNLIGALLFDSGETAEATRLKRTARRRYTRRKNRICYLQEIFSNEMAKVDDSFFHRLEESFLVEEDKKHERHPIFGNIVDEVAYHEKYPTIYHLRKKLVDSTDKADLRLIYLALAHMIKFRGHFLIEGDLNPDNSDVDKLFIQLVQTYNQLFEENPINASGVDAKAILSARLSKSRRLENLIAQLPGEKKNGLFGNLIALSLGLTPNFKSNFDLAEDAKLQLSKDTYDDDLDNLLAQIGDQYADLFLAAKNLSDAILLSDILRVNTEITKAPLSASMIKRYDEHHQDLTLLKALVRQQLPEKYKEIFFDQSKNGYAGYIDGGASQEEFYKFIKPILEKMDGTEELLVKLNREDLLRKQRTFDNGSIPHQIHLGELHAILRRQEDFYPFLKDNREKIEKILTFRIPYYVGPLARGNSRFAWMTRKSEETITPWNFEEVVDKGASAQSFIERMTNFDKNLPNEKVLPKHSLLYEYFTVYNELTKVKYVTEGMRKPAFLSGEQKKAIVDLLFKTNRKVTVKQLKEDYFKKIECFDSVEISGVEDRFNASLGTYHDLLKIIKDKDFLDNEENEDILEDIVLTLTLFEDREMIEERLKTYAHLFDDKVMKQLKRRRYTGWGRLSRKLINGIRDKQSGKTILDFLKSDGFANRNFMQLIHDDSLTFKEDIQKAQVSGQGDSLHEHIANLAGSPAIKKGILQTVKVVDELVKVMGRHKPENIVIEMARENQTTQKGQKNSRERMKRIEEGIKELGSQILKEHPVENTQLQNEKLYLYYLQNGRDMYVDQELDINRLSDYDVDHIVPQSFLKDDSIDNKVLTRSDKARGKSDNVPSEEVVKKMKNYWRQLLNAKLITQRKFDNLTKAERGGLSELDKAGFIKRQLVETRQITKHVAQILDSRMNTKYDENDKLIREVKVITLKSKLVSDFRKDFQFYKVREINNYHHAHDAYLNAVVGTALIKKYPKLESEFVYGDYKVYDVRKMIAKSEQEIGKATAKYFFYSNIMNFFKTEITLANGEIRKRPLIETNGETGEIVWDKGRDFATVRKVLSMPQVNIVKKTEVQTGGFSKESILPKRNSDKLIARKKDWDPKKYGGFDSPTVAYSVLVVAKVEKGKSKKLKSVKELLGITIMERSSFEKNPIDFLEAKGYKEVKKDLIIKLPKYSLFELENGRKRMLASAGELQKGNELALPSKYVNFLYLASHYEKLKGSPEDNEQKQLFVEQHKHYLDEIIEQISEFSKRVILADANLDKVLSAYNKHRDKPIREQAENIIHLFTLTNLGAPAAFKYFDTTIDRKRYTSTKEVLDATLIHQSITGLYETRIDLSQLGGDGGEAAAKEAAAKEAAAKEAAAKEAAAKEAAAKGGTLNIEDEYRLHETSKEPDVSLGSTWLSDFPQAWAETGGMGLAVRQAPLIIPLKATSTPVSIKQYPMSQEARLGIKPHIQRLLDQGILVPCQSPWNTPLLPVKKPGTNDYRPVQDLREVNKRVEDIHPTVPNPYNLLSGLPPSHQWYTVLDLKDAFFCLRLHPTSQPLFAFEWRDPEMGISGQLTWTRLPQGFKNSPTLFNEALHRDLADFRIQHPDLILLQYVDDLLLAATSELDCQQGTRALLQTLGNLGYRASAKKAQICQKQVKYLGYLLKEGQRWLTEARKETVMGQPTPKTPRQLREFLGKAGFCRLFIPGFAEMAAPLYPLTKPGTLFNWGPDQQKAYQEIKQALLTAPALGLPDLTKPFELFVDEKQGYAKGVLTQKLGPWRRPVAYLSKKLDPVAAGWPPCLRMVAAIAVLTKDAGKLTMGQPLVILAPHAVEALVKQPPDRWLSNARMTHYQALLLDTDRVQFGPVVALNPATLLPLPEEGLQHNCLDILAEAHGTRPDLTDQPLPDADHTWYTDGSSLLQEGQRKAGAAVTTETEVIWAKALPAGTSAQRAELIALTQALKMAEGKKLNVYTDSRYAFATAHIHGEIYRRRGWLTSEGKEIKNKDEILALLKALFLPKRLSIIHCPGHQKGHSAEARGNRMADQAARKAAITETPDTSTLLIENSSPSGGSKRTADGSEFEAGKRTADGSEFEKRTADGSEFESPKKKAKVE

SEQ ID NO: 2631 - protein, 2108 aa, synthetic construct
MPAAKRVKLDGGDKKYSIGLDIGTNSVGWAVITDEYKVPSKKFKVLGNTDRHSIKKNLIGALLFDSGETAEATRLKRTARRRYTRRKNRICYLQEIFSNEMAKVDDSFFHRLEESFLVEEDKKHERHPIFGNIVDEVAYHEKYPTIYHLRKKLVDSTDKADLRLIYLALAHMIKFRGHFLIEGDLNPDNSDVDKLFIQLVQTYNQLFEENPINASGVDAKAILSARLSKSRRLENLIAQLPGEKKNGLFGNLIALSLGLTPNFKSNFDLAEDAKLQLSKDTYDDDLDNLLAQIGDQYADLFLAAKNLSDAILLSDILRVNTEITKAPLSASMIKRYDEHHQDLTLLKALVRQQLPEKYKEIFFDQSKNGYAGYIDGGASQEEFYKFIKPILEKMDGTEELLVKLNREDLLRKQRTFDNGSIPHQIHLGELHAILRRQEDFYPFLKDNREKIEKILTFRIPYYVGPLARGNSRFAWMTRKSEETITPWNFEEVVDKGASAQSFIERMTNFDKNLPNEKVLPKHSLLYEYFTVYNELTKVKYVTEGMRKPAFLSGEQKKAIVDLLFKTNRKVTVKQLKEDYFKKIECFDSVEISGVEDRFNASLGTYHDLLKIIKDKDFLDNEENEDILEDIVLTLTLFEDREMIEERLKTYAHLFDDKVMKQLKRRRYTGWGRLSRKLINGIRDKQSGKTILDFLKSDGFANRNFMQLIHDDSLTFKEDIQKAQVSGQGDSLHEHIANLAGSPAIKKGILQTVKVVDELVKVMGRHKPENIVIEMARENQTTQKGQKNSRERMKRIEEGIKELGSQILKEHPVENTQLQNEKLYLYYLQNGRDMYVDQELDINRLSDYDVDHIVPQSFLKDDSIDNKVLTRSDKARGKSDNVPSEEVVKKMKNYWRQLLNAKLITQRKFDNLTKAERGGLSELDKAGFIKRQLVETRQITKHVAQILDSRMNTKYDENDKLIREVKVITLKSKLVSDFRKDFQFYKVREINNYHHAHDAYLNAVVGTALIKKYPKLESEFVYGDYKVYDVRKMIAKSEQEIGKATAKYFFYSNIMNFFKTEITLANGEIRKRPLIETNGETGEIVWDKGRDFATVRKVLSMPQVNIVKKTEVQTGGFSKESILPKRNSDKLIARKKDWDPKKYGGFDSPTVAYSVLVVAKVEKGKSKKLKSVKELLGITIMERSSFEKNPIDFLEAKGYKEVKKDLIIKLPKYSLFELENGRKRMLASAGELQKGNELALPSKYVNFLYLASHYEKLKGSPEDNEQKQLFVEQHKHYLDEIIEQISEFSKRVILADANLDKVLSAYNKHRDKPIREQAENIIHLFTLTNLGAPAAFKYFDTTIDRKRYTSTKEVLDATLIHQSITGLYETRIDLSQLGGDGGGGSGGTLNIEDEYRLHETSKEPDVSLGSTWLSDFPQAWAETGGMGLAVRQAPLIIPLKATSTPVSIKQYPMSQEARLGIKPHIQRLLDQGILVPCQSPWNTPLLPVKKPGTNDYRPVQDLREVNKRVEDIHPTVPNPYNLLSGLPPSHQWYTVLDLKDAFFCLRLHPTSQPLFAFEWRDPEMGISGQLTWTRLPQGFKNSPTLFNEALHRDLADFRIQHPDLILLQYVDDLLLAATSELDCQQGTRALLQTLGNLGYRASAKKAQICQKQVKYLGYLLKEGQRWLTEARKETVMGQPTPKTPRQLREFLGKAGFCRLFIPGFAEMAAPLYPLTKPGTLFNWGPDQQKAYQEIKQALLTAPALGLPDLTKPFELFVDEKQGYAKGVLTQKLGPWRRPVAYLSKKLDPVAAGWPPCLRMVAAIAVLTKDAGKLTMGQPLVILAPHAVEALVKQPPDRWLSNARMTHYQALLLDTDRVQFGPVVALNPATLLPLPEEGLQHNCLDILAEAHGTRPDLTDQPLPDADHTWYTDGSSLLQEGQRKAGAAVTTETEVIWAKALPAGTSAQRAELIALTQALKMAEGKKLNVYTDSRYAFATAHIHGEIYRRRGWLTSEGKEIKNKDEILALLKALFLPKRLSIIHCPGHQKGHSAEARGNRMADQAARKAAITETPDTSTLLIENSSPSGGSKRTADGSEFEAGKRTADGSEFEKRTADGSEFESPKKKAKVE

SEQ ID NO: 2632 - protein, 2114 aa, synthetic construct
MPAAKRVKLDGGDKKYSIGLDIGTNSVGWAVITDEYKVPSKKFKVLGNTDRHSIKKNLIGALLFDSGETAEATRLKRTARRRYTRRKNRICYLQEIFSNEMAKVDDSFFHRLEESFLVEEDKKHERHPIFGNIVDEVAYHEKYPTIYHLRKKLVDSTDKADLRLIYLALAHMIKFRGHFLIEGDLNPDNSDVDKLFIQLVQTYNQLFEENPINASGVDAKAILSARLSKSRRLENLIAQLPGEKKNGLFGNLIALSLGLTPNFKSNFDLAEDAKLQLSKDTYDDDLDNLLAQIGDQYADLFLAAKNLSDAILLSDILRVNTEITKAPLSASMIKRYDEHHQDLTLLKALVRQQLPEKYKEIFFDQSKNGYAGYIDGGASQEEFYKFIKPILEKMDGTEELLVKLNREDLLRKQRTFDNGSIPHQIHLGELHAILRRQEDFYPFLKDNREKIEKILTFRIPYYVGPLARGNSRFAWMTRKSEETITPWNFEEVVDKGASAQSFIERMTNFDKNLPNEKVLPKHSLLYEYFTVYNELTKVKYVTEGMRKPAFLSGEQKKAIVDLLFKTNRKVTVKQLKEDYFKKIECFDSVEISGVEDRFNASLGTYHDLLKIIKDKDFLDNEENEDILEDIVLTLTLFEDREMIEERLKTYAHLFDDKVMKQLKRRRYTGWGRLSRKLINGIRDKQSGKTILDFLKSDGFANRNFMQLIHDDSLTFKEDIQKAQVSGQGDSLHEHIANLAGSPAIKKGILQTVKVVDELVKVMGRHKPENIVIEMARENQTTQKGQKNSRERMKRIEEGIKELGSQILKEHPVENTQLQNEKLYLYYLQNGRDMYVDQELDINRLSDYDVDHIVPQSFLKDDSIDNKVLTRSDKARGKSDNVPSEEVVKKMKNYWRQLLNAKLITQRKFDNLTKAERGGLSELDKAGFIKRQLVETRQITKHVAQILDSRMNTKYDENDKLIREVKVITLKSKLVSDFRKDFQFYKVREINNYHHAHDAYLNAVVGTALIKKYPKLESEFVYGDYKVYDVRKMIAKSEQEIGKATAKYFFYSNIMNFFKTEITLANGEIRKRPLIETNGETGEIVWDKGRDFATVRKVLSMPQVNIVKKTEVQTGGFSKESILPKRNSDKLIARKKDWDPKKYGGFDSPTVAYSVLVVAKVEKGKSKKLKSVKELLGITIMERSSFEKNPIDFLEAKGYKEVKKDLIIKLPKYSLFELENGRKRMLASAGELQKGNELALPSKYVNFLYLASHYEKLKGSPEDNEQKQLFVEQHKHYLDEIIEQISEFSKRVILADANLDKVLSAYNKHRDKPIREQAENIIHLFTLTNLGAPAAFKYFDTTIDRKRYTSTKEVLDATLIHQSITGLYETRIDLSQLGGDGGGGGGSSGGSGGTLNIEDEYRLHETSKEPDVSLGSTWLSDFPQAWAETGGMGLAVRQAPLIIPLKATSTPVSIKQYPMSQEARLGIKPHIQRLLDQGILVPCQSPWNTPLLPVKKPGTNDYRPVQDLREVNKRVEDIHPTVPNPYNLLSGLPPSHQWYTVLDLKDAFFCLRLHPTSQPLFAFEWRDPEMGISGQLTWTRLPQGFKNSPTLFNEALHRDLADFRIQHPDLILLQYVDDLLLAATSELDCQQGTRALLQTLGNLGYRASAKKAQICQKQVKYLGYLLKEGQRWLTEARKETVMGQPTPKTPRQLREFLGKAGFCRLFIPGFAEMAAPLYPLTKPGTLFNWGPDQQKAYQEIKQALLTAPALGLPDLTKPFELFVDEKQGYAKGVLTQKLGPWRRPVAYLSKKLDPVAAGWPPCLRMVAAIAVLTKDAGKLTMGQPLVILAPHAVEALVKQPPDRWLSNARMTHYQALLLDTDRVQFGPVVALNPATLLPLPEEGLQHNCLDILAEAHGTRPDLTDQPLPDADHTWYTDGSSLLQEGQRKAGAAVTTETEVIWAKALPAGTSAQRAELIALTQALKMAEGKKLNVYTDSRYAFATAHIHGEIYRRRGWLTSEGKEIKNKDEILALLKALFLPKRLSIIHCPGHQKGHSAEARGNRMADQAARKAAITETPDTSTLLIENSSPSGGSKRTADGSEFEAGKRTADGSEFEKRTADGSEFESPKKKAKVE

SEQ ID NO: 2633 - protein, 2114 aa, synthetic construct
MPAAKRVKLDGGDKKYSIGLDIGTNSVGWAVITDEYKVPSKKFKVLGNTDRHSIKKNLIGALLFDSGETAEATRLKRTARRRYTRRKNRICYLQEIFSNEMAKVDDSFFHRLEESFLVEEDKKHERHPIFGNIVDEVAYHEKYPTIYHLRKKLVDSTDKADLRLIYLALAHMIKFRGHFLIEGDLNPDNSDVDKLFIQLVQTYNQLFEENPINASGVDAKAILSARLSKSRRLENLIAQLPGEKKNGLFGNLIALSLGLTPNFKSNFDLAEDAKLQLSKDTYDDDLDNLLAQIGDQYADLFLAAKNLSDAILLSDILRVNTEITKAPLSASMIKRYDEHHQDLTLLKALVRQQLPEKYKEIFFDQSKNGYAGYIDGGASQEEFYKFIKPILEKMDGTEELLVKLNREDLLRKQRTFDNGSIPHQIHLGELHAILRRQEDFYPFLKDNREKIEKILTFRIPYYVGPLARGNSRFAWMTRKSEETITPWNFEEVVDKGASAQSFIERMTNFDKNLPNEKVLPKHSLLYEYFTVYNELTKVKYVTEGMRKPAFLSGEQKKAIVDLLFKTNRKVTVKQLKEDYFKKIECFDSVEISGVEDRFNASLGTYHDLLKIIKDKDFLDNEENEDILEDIVLTLTLFEDREMIEERLKTYAHLFDDKVMKQLKRRRYTGWGRLSRKLINGIRDKQSGKTILDFLKSDGFANRNFMQLIHDDSLTFKEDIQKAQVSGQGDSLHEHIANLAGSPAIKKGILQTVKVVDELVKVMGRHKPENIVIEMARENQTTQKGQKNSRERMKRIEEGIKELGSQILKEHPVENTQLQNEKLYLYYLQNGRDMYVDQELDINRLSDYDVDHIVPQSFLKDDSIDNKVLTRSDKARGKSDNVPSEEVVKKMKNYWRQLLNAKLITQRKFDNLTKAERGGLSELDKAGFIKRQLVETRQITKHVAQILDSRMNTKYDENDKLIREVKVITLKSKLVSDFRKDFQFYKVREINNYHHAHDAYLNAVVGTALIKKYPKLESEFVYGDYKVYDVRKMIAKSEQEIGKATAKYFFYSNIMNFFKTEITLANGEIRKRPLIETNGETGEIVWDKGRDFATVRKVLSMPQVNIVKKTEVQTGGFSKESILPKRNSDKLIARKKDWDPKKYGGFDSPTVAYSVLVVAKVEKGKSKKLKSVKELLGITIMERSSFEKNPIDFLEAKGYKEVKKDLIIKLPKYSLFELENGRKRMLASAGELQKGNELALPSKYVNFLYLASHYEKLKGSPEDNEQKQLFVEQHKHYLDEIIEQISEFSKRVILADANLDKVLSAYNKHRDKPIREQAENIIHLFTLTNLGAPAAFKYFDTTIDRKRYTSTKEVLDATLIHQSITGLYETRIDLSQLGGDGGGSSPAPGGGGGTLNIEDEYRLHETSKEPDVSLGSTWLSDFPQAWAETGGMGLAVRQAPLIIPLKATSTPVSIKQYPMSQEARLGIKPHIQRLLDQGILVPCQSPWNTPLLPVKKPGTNDYRPVQDLREVNKRVEDIHPTVPNPYNLLSGLPPSHQWYTVLDLKDAFFCLRLHPTSQPLFAFEWRDPEMGISGQLTWTRLPQGFKNSPTLFNEALHRDLADFRIQHPDLILLQYVDDLLLAATSELDCQQGTRALLQTLGNLGYRASAKKAQICQKQVKYLGYLLKEGQRWLTEARKETVMGQPTPKTPRQLREFLGKAGFCRLFIPGFAEMAAPLYPLTKPGTLFNWGPDQQKAYQEIKQALLTAPALGLPDLTKPFELFVDEKQGYAKGVLTQKLGPWRRPVAYLSKKLDPVAAGWPPCLRMVAAIAVLTKDAGKLTMGQPLVILAPHAVEALVKQPPDRWLSNARMTHYQALLLDTDRVQFGPVVALNPATLLPLPEEGLQHNCLDILAEAHGTRPDLTDQPLPDADHTWYTDGSSLLQEGQRKAGAAVTTETEVIWAKALPAGTSAQRAELIALTQALKMAEGKKLNVYTDSRYAFATAHIHGEIYRRRGWLTSEGKEIKNKDEILALLKALFLPKRLSIIHCPGHQKGHSAEARGNRMADQAARKAAITETPDTSTLLIENSSPSGGSKRTADGSEFEAGKRTADGSEFEKRTADGSEFESPKKKAKVE

SEQ ID NO: 2634 - protein, 2114 aa, synthetic construct
MPAAKRVKLDGGDKKYSIGLDIGTNSVGWAVITDEYKVPSKKFKVLGNTDRHSIKKNLIGALLFDSGETAEATRLKRTARRRYTRRKNRICYLQEIFSNEMAKVDDSFFHRLEESFLVEEDKKHERHPIFGNIVDEVAYHEKYPTIYHLRKKLVDSTDKADLRLIYLALAHMIKFRGHFLIEGDLNPDNSDVDKLFIQLVQTYNQLFEENPINASGVDAKAILSARLSKSRRLENLIAQLPGEKKNGLFGNLIALSLGLTPNFKSNFDLAEDAKLQLSKDTYDDDLDNLLAQIGDQYADLFLAAKNLSDAILLSDILRVNTEITKAPLSASMIKRYDEHHQDLTLLKALVRQQLPEKYKEIFFDQSKNGYAGYIDGGASQEEFYKFIKPILEKMDGTEELLVKLNREDLLRKQRTFDNGSIPHQIHLGELHAILRRQEDFYPFLKDNREKIEKILTFRIPYYVGPLARGNSRFAWMTRKSEETITPWNFEEVVDKGASAQSFIERMTNFDKNLPNEKVLPKHSLLYEYFTVYNELTKVKYVTEGMRKPAFLSGEQKKAIVDLLFKTNRKVTVKQLKEDYFKKIECFDSVEISGVEDRFNASLGTYHDLLKIIKDKDFLDNEENEDILEDIVLTLTLFEDREMIEERLKTYAHLFDDKVMKQLKRRRYTGWGRLSRKLINGIRDKQSGKTILDFLKSDGFANRNFMQLIHDDSLTFKEDIQKAQVSGQGDSLHEHIANLAGSPAIKKGILQTVKVVDELVKVMGRHKPENIVIEMARENQTTQKGQKNSRERMKRIEEGIKELGSQILKEHPVENTQLQNEKLYLYYLQNGRDMYVDQELDINRLSDYDVDHIVPQSFLKDDSIDNKVLTRSDKARGKSDNVPSEEVVKKMKNYWRQLLNAKLITQRKFDNLTKAERGGLSELDKAGFIKRQLVETRQITKHVAQILDSRMNTKYDENDKLIREVKVITLKSKLVSDFRKDFQFYKVREINNYHHAHDAYLNAVVGTALIKKYPKLESEFVYGDYKVYDVRKMIAKSEQEIGKATAKYFFYSNIMNFFKTEITLANGEIRKRPLIETNGETGEIVWDKGRDFATVRKVLSMPQVNIVKKTEVQTGGFSKESILPKRNSDKLIARKKDWDPKKYGGFDSPTVAYSVLVVAKVEKGKSKKLKSVKELLGITIMERSSFEKNPIDFLEAKGYKEVKKDLIIKLPKYSLFELENGRKRMLASAGELQKGNELALPSKYVNFLYLASHYEKLKGSPEDNEQKQLFVEQHKHYLDEIIEQISEFSKRVILADANLDKVLSAYNKHRDKPIREQAENIIHLFTLTNLGAPAAFKYFDTTIDRKRYTSTKEVLDATLIHQSITGLYETRIDLSQLGGDGGGSSGSSGSSGGTLNIEDEYRLHETSKEPDVSLGSTWLSDFPQAWAETGGMGLAVRQAPLIIPLKATSTPVSIKQYPMSQEARLGIKPHIQRLLDQGILVPCQSPWNTPLLPVKKPGTNDYRPVQDLREVNKRVEDIHPTVPNPYNLLSGLPPSHQWYTVLDLKDAFFCLRLHPTSQPLFAFEWRDPEMGISGQLTWTRLPQGFKNSPTLFNEALHRDLADFRIQHPDLILLQYVDDLLLAATSELDCQQGTRALLQTLGNLGYRASAKKAQICQKQVKYLGYLLKEGQRWLTEARKETVMGQPTPKTPRQLREFLGKAGFCRLFIPGFAEMAAPLYPLTKPGTLFNWGPDQQKAYQEIKQALLTAPALGLPDLTKPFELFVDEKQGYAKGVLTQKLGPWRRPVAYLSKKLDPVAAGWPPCLRMVAAIAVLTKDAGKLTMGQPLVILAPHAVEALVKQPPDRWLSNARMTHYQALLLDTDRVQFGPVVALNPATLLPLPEEGLQHNCLDILAEAHGTRPDLTDQPLPDADHTWYTDGSSLLQEGQRKAGAAVTTETEVIWAKALPAGTSAQRAELIALTQALKMAEGKKLNVYTDSRYAFATAHIHGEIYRRRGWLTSEGKEIKNKDEILALLKALFLPKRLSIIHCPGHQKGHSAEARGNRMADQAARKAAITETPDTSTLLIENSSPSGGSKRTADGSEFEAGKRTADGSEFEKRTADGSEFESPKKKAKVE

SEQ ID NO: 2635 - protein, 2112 aa, synthetic construct
MPAAKRVKLDGGDKKYSIGLDIGTNSVGWAVITDEYKVPSKKFKVLGNTDRHSIKKNLIGALLFDSGETAEATRLKRTARRRYTRRKNRICYLQEIFSNEMAKVDDSFFHRLEESFLVEEDKKHERHPIFGNIVDEVAYHEKYPTIYHLRKKLVDSTDKADLRLIYLALAHMIKFRGHFLIEGDLNPDNSDVDKLFIQLVQTYNQLFEENPINASGVDAKAILSARLSKSRRLENLIAQLPGEKKNGLFGNLIALSLGLTPNFKSNFDLAEDAKLQLSKDTYDDDLDNLLAQIGDQYADLFLAAKNLSDAILLSDILRVNTEITKAPLSASMIKRYDEHHQDLTLLKALVRQQLPEKYKEIFFDQSKNGYAGYIDGGASQEEFYKFIKPILEKMDGTEELLVKLNREDLLRKQRTFDNGSIPHQIHLGELHAILRRQEDFYPFLKDNREKIEKILTFRIPYYVGPLARGNSRFAWMTRKSEETITPWNFEEVVDKGASAQSFIERMTNFDKNLPNEKVLPKHSLLYEYFTVYNELTKVKYVTEGMRKPAFLSGEQKKAIVDLLFKTNRKVTVKQLKEDYFKKIECFDSVEISGVEDRFNASLGTYHDLLKIIKDKDFLDNEENEDILEDIVLTLTLFEDREMIEERLKTYAHLFDDKVMKQLKRRRYTGWGRLSRKLINGIRDKQSGKTILDFLKSDGFANRNFMQLIHDDSLTFKEDIQKAQVSGQGDSLHEHIANLAGSPAIKKGILQTVKVVDELVKVMGRHKPENIVIEMARENQTTQKGQKNSRERMKRIEEGIKELGSQILKEHPVENTQLQNEKLYLYYLQNGRDMYVDQELDINRLSDYDVDHIVPQSFLKDDSIDNKVLTRSDKARGKSDNVPSEEVVKKMKNYWRQLLNAKLITQRKFDNLTKAERGGLSELDKAGFIKRQLVETRQITKHVAQILDSRMNTKYDENDKLIREVKVITLKSKLVSDFRKDFQFYKVREINNYHHAHDAYLNAVVGTALIKKYPKLESEFVYGDYKVYDVRKMIAKSEQEIGKATAKYFFYSNIMNFFKTEITLANGEIRKRPLIETNGETGEIVWDKGRDFATVRKVLSMPQVNIVKKTEVQTGGFSKESILPKRNSDKLIARKKDWDPKKYGGFDSPTVAYSVLVVAKVEKGKSKKLKSVKELLGITIMERSSFEKNPIDFLEAKGYKEVKKDLIIKLPKYSLFELENGRKRMLASAGELQKGNELALPSKYVNFLYLASHYEKLKGSPEDNEQKQLFVEQHKHYLDEIIEQISEFSKRVILADANLDKVLSAYNKHRDKPIREQAENIIHLFTLTNLGAPAAFKYFDTTIDRKRYTSTKEVLDATLIHQSITGLYETRIDLSQLGGDGGGGGGGGGGGTLNIEDEYRLHETSKEPDVSLGSTWLSDFPQAWAETGGMGLAVRQAPLIIPLKATSTPVSIKQYPMSQEARLGIKPHIQRLLDQGILVPCQSPWNTPLLPVKKPGTNDYRPVQDLREVNKRVEDIHPTVPNPYNLLSGLPPSHQWYTVLDLKDAFFCLRLHPTSQPLFAFEWRDPEMGISGQLTWTRLPQGFKNSPTLFNEALHRDLADFRIQHPDLILLQYVDDLLLAATSELDCQQGTRALLQTLGNLGYRASAKKAQICQKQVKYLGYLLKEGQRWLTEARKETVMGQPTPKTPRQLREFLGKAGFCRLFIPGFAEMAAPLYPLTKPGTLFNWGPDQQKAYQEIKQALLTAPALGLPDLTKPFELFVDEKQGYAKGVLTQKLGPWRRPVAYLSKKLDPVAAGWPPCLRMVAAIAVLTKDAGKLTMGQPLVILAPHAVEALVKQPPDRWLSNARMTHYQALLLDTDRVQFGPVVALNPATLLPLPEEGLQHNCLDILAEAHGTRPDLTDQPLPDADHTWYTDGSSLLQEGQRKAGAAVTTETEVIWAKALPAGTSAQRAELIALTQALKMAEGKKLNVYTDSRYAFATAHIHGEIYRRRGWLTSEGKEIKNKDEILALLKALFLPKRLSIIHCPGHQKGHSAEARGNRMADQAARKAAITETPDTSTLLIENSSPSGGSKRTADGSEFEAGKRTADGSEFEKRTADGSEFESPKKKAKVE

SEQ ID NO: 2636 - protein, 2120 aa, synthetic construct
MPAAKRVKLDGGDKKYSIGLDIGTNSVGWAVITDEYKVPSKKFKVLGNTDRHSIKKNLIGALLFDSGETAEATRLKRTARRRYTRRKNRICYLQEIFSNEMAKVDDSFFHRLEESFLVEEDKKHERHPIFGNIVDEVAYHEKYPTIYHLRKKLVDSTDKADLRLIYLALAHMIKFRGHFLIEGDLNPDNSDVDKLFIQLVQTYNQLFEENPINASGVDAKAILSARLSKSRRLENLIAQLPGEKKNGLFGNLIALSLGLTPNFKSNFDLAEDAKLQLSKDTYDDDLDNLLAQIGDQYADLFLAAKNLSDAILLSDILRVNTEITKAPLSASMIKRYDEHHQDLTLLKALVRQQLPEKYKEIFFDQSKNGYAGYIDGGASQEEFYKFIKPILEKMDGTEELLVKLNREDLLRKQRTFDNGSIPHQIHLGELHAILRRQEDFYPFLKDNREKIEKILTFRIPYYVGPLARGNSRFAWMTRKSEETITPWNFEEVVDKGASAQSFIERMTNFDKNLPNEKVLPKHSLLYEYFTVYNELTKVKYVTEGMRKPAFLSGEQKKAIVDLLFKTNRKVTVKQLKEDYFKKIECFDSVEISGVEDRFNASLGTYHDLLKIIKDKDFLDNEENEDILEDIVLTLTLFEDREMIEERLKTYAHLFDDKVMKQLKRRRYTGWGRLSRKLINGIRDKQSGKTILDFLKSDGFANRNFMQLIHDDSLTFKEDIQKAQVSGQGDSLHEHIANLAGSPAIKKGILQTVKVVDELVKVMGRHKPENIVIEMARENQTTQKGQKNSRERMKRIEEGIKELGSQILKEHPVENTQLQNEKLYLYYLQNGRDMYVDQELDINRLSDYDVDHIVPQSFLKDDSIDNKVLTRSDKARGKSDNVPSEEVVKKMKNYWRQLLNAKLITQRKFDNLTKAERGGLSELDKAGFIKRQLVETRQITKHVAQILDSRMNTKYDENDKLIREVKVITLKSKLVSDFRKDFQFYKVREINNYHHAHDAYLNAVVGTALIKKYPKLESEFVYGDYKVYDVRKMIAKSEQEIGKATAKYFFYSNIMNFFKTEITLANGEIRKRPLIETNGETGEIVWDKGRDFATVRKVLSMPQVNIVKKTEVQTGGFSKESILPKRNSDKLIARKKDWDPKKYGGFDSPTVAYSVLVVAKVEKGKSKKLKSVKELLGITIMERSSFEKNPIDFLEAKGYKEVKKDLIIKLPKYSLFELENGRKRMLASAGELQKGNELALPSKYVNFLYLASHYEKLKGSPEDNEQKQLFVEQHKHYLDEIIEQISEFSKRVILADANLDKVLSAYNKHRDKPIREQAENIIHLFTLTNLGAPAAFKYFDTTIDRKRYTSTKEVLDATLIHQSITGLYETRIDLSQLGGDGGGGGGSEAAAKGGGGSGGTLNIEDEYRLHETSKEPDVSLGSTWLSDFPQAWAETGGMGLAVRQAPLIIPLKATSTPVSIKQYPMSQEARLGIKPHIQRLLDQGILVPCQSPWNTPLLPVKKPGTNDYRPVQDLREVNKRVEDIHPTVPNPYNLLSGLPPSHQWYTVLDLKDAFFCLRLHPTSQPLFAFEWRDPEMGISGQLTWTRLPQGFKNSPTLFNEALHRDLADFRIQHPDLILLQYVDDLLLAATSELDCQQGTRALLQTLGNLGYRASAKKAQICQKQVKYLGYLLKEGQRWLTEARKETVMGQPTPKTPRQLREFLGKAGFCRLFIPGFAEMAAPLYPLTKPGTLFNWGPDQQKAYQEIKQALLTAPALGLPDLTKPFELFVDEKQGYAKGVLTQKLGPWRRPVAYLSKKLDPVAAGWPPCLRMVAAIAVLTKDAGKLTMGQPLVILAPHAVEALVKQPPDRWLSNARMTHYQALLLDTDRVQFGPVVALNPATLLPLPEEGLQHNCLDILAEAHGTRPDLTDQPLPDADHTWYTDGSSLLQEGQRKAGAAVTTETEVIWAKALPAGTSAQRAELIALTQALKMAEGKKLNVYTDSRYAFATAHIHGEIYRRRGWLTSEGKEIKNKDEILALLKALFLPKRLSIIHCPGHQKGHSAEARGNRMADQAARKAAITETPDTSTLLIENSSPSGGSKRTADGSEFEAGKRTADGSEFEKRTADGSEFESPKKKAKVE

SEQ ID NO: 2637 - protein, 2116 aa, synthetic construct
MPAAKRVKLDGGDKKYSIGLDIGTNSVGWAVITDEYKVPSKKFKVLGNTDRHSIKKNLIGALLFDSGETAEATRLKRTARRRYTRRKNRICYLQEIFSNEMAKVDDSFFHRLEESFLVEEDKKHERHPIFGNIVDEVAYHEKYPTIYHLRKKLVDSTDKADLRLIYLALAHMIKFRGHFLIEGDLNPDNSDVDKLFIQLVQTYNQLFEENPINASGVDAKAILSARLSKSRRLENLIAQLPGEKKNGLFGNLIALSLGLTPNFKSNFDLAEDAKLQLSKDTYDDDLDNLLAQIGDQYADLFLAAKNLSDAILLSDILRVNTEITKAPLSASMIKRYDEHHQDLTLLKALVRQQLPEKYKEIFFDQSKNGYAGYIDGGASQEEFYKFIKPILEKMDGTEELLVKLNREDLLRKQRTFDNGSIPHQIHLGELHAILRRQEDFYPFLKDNREKIEKILTFRIPYYVGPLARGNSRFAWMTRKSEETITPWNFEEVVDKGASAQSFIERMTNFDKNLPNEKVLPKHSLLYEYFTVYNELTKVKYVTEGMRKPAFLSGEQKKAIVDLLFKTNRKVTVKQLKEDYFKKIECFDSVEISGVEDRFNASLGTYHDLLKIIKDKDFLDNEENEDILEDIVLTLTLFEDREMIEERLKTYAHLFDDKVMKQLKRRRYTGWGRLSRKLINGIRDKQSGKTILDFLKSDGFANRNFMQLIHDDSLTFKEDIQKAQVSGQGDSLHEHIANLAGSPAIKKGILQTVKVVDELVKVMGRHKPENIVIEMARENQTTQKGQKNSRERMKRIEEGIKELGSQILKEHPVENTQLQNEKLYLYYLQNGRDMYVDQELDINRLSDYDVDHIVPQSFLKDDSIDNKVLTRSDKARGKSDNVPSEEVVKKMKNYWRQLLNAKLITQRKFDNLTKAERGGLSELDKAGFIKRQLVETRQITKHVAQILDSRMNTKYDENDKLIREVKVITLKSKLVSDFRKDFQFYKVREINNYHHAHDAYLNAVVGTALIKKYPKLESEFVYGDYKVYDVRKMIAKSEQEIGKATAKYFFYSNIMNFFKTEITLANGEIRKRPLIETNGETGEIVWDKGRDFATVRKVLSMPQVNIVKKTEVQTGGFSKESILPKRNSDKLIARKKDWDPKKYGGFDSPTVAYSVLVVAKVEKGKSKKLKSVKELLGITIMERSSFEKNPIDFLEAKGYKEVKKDLIIKLPKYSLFELENGRKRMLASAGELQKGNELALPSKYVNFLYLASHYEKLKGSPEDNEQKQLFVEQHKHYLDEIIEQISEFSKRVILADANLDKVLSAYNKHRDKPIREQAENIIHLFTLTNLGAPAAFKYFDTTIDRKRYTSTKEVLDATLIHQSITGLYETRIDLSQLGGDGGEAAAKGGSGGGGGTLNIEDEYRLHETSKEPDVSLGSTWLSDFPQAWAETGGMGLAVRQAPLIIPLKATSTPVSIKQYPMSQEARLGIKPHIQRLLDQGILVPCQSPWNTPLLPVKKPGTNDYRPVQDLREVNKRVEDIHPTVPNPYNLLSGLPPSHQWYTVLDLKDAFFCLRLHPTSQPLFAFEWRDPEMGISGQLTWTRLPQGFKNSPTLFNEALHRDLADFRIQHPDLILLQYVDDLLLAATSELDCQQGTRALLQTLGNLGYRASAKKAQICQKQVKYLGYLLKEGQRWLTEARKETVMGQPTPKTPRQLREFLGKAGFCRLFIPGFAEMAAPLYPLTKPGTLFNWGPDQQKAYQEIKQALLTAPALGLPDLTKPFELFVDEKQGYAKGVLTQKLGPWRRPVAYLSKKLDPVAAGWPPCLRMVAAIAVLTKDAGKLTMGQPLVILAPHAVEALVKQPPDRWLSNARMTHYQALLLDTDRVQFGPVVALNPATLLPLPEEGLQHNCLDILAEAHGTRPDLTDQPLPDADHTWYTDGSSLLQEGQRKAGAAVTTETEVIWAKALPAGTSAQRAELIALTQALKMAEGKKLNVYTDSRYAFATAHIHGEIYRRRGWLTSEGKEIKNKDEILALLKALFLPKRLSIIHCPGHQKGHSAEARGNRMADQAARKAAITETPDTSTLLIENSSPSGGSKRTADGSEFEAGKRTADGSEFEKRTADGSEFESPKKKAKVE

SEQ ID NO: 2638 - protein, 2116 aa, synthetic construct
MPAAKRVKLDGGDKKYSIGLDIGTNSVGWAVITDEYKVPSKKFKVLGNTDRHSIKKNLIGALLFDSGETAEATRLKRTARRRYTRRKNRICYLQEIFSNEMAKVDDSFFHRLEESFLVEEDKKHERHPIFGNIVDEVAYHEKYPTIYHLRKKLVDSTDKADLRLIYLALAHMIKFRGHFLIEGDLNPDNSDVDKLFIQLVQTYNQLFEENPINASGVDAKAILSARLSKSRRLENLIAQLPGEKKNGLFGNLIALSLGLTPNFKSNFDLAEDAKLQLSKDTYDDDLDNLLAQIGDQYADLFLAAKNLSDAILLSDILRVNTEITKAPLSASMIKRYDEHHQDLTLLKALVRQQLPEKYKEIFFDQSKNGYAGYIDGGASQEEFYKFIKPILEKMDGTEELLVKLNREDLLRKQRTFDNGSIPHQIHLGELHAILRRQEDFYPFLKDNREKIEKILTFRIPYYVGPLARGNSRFAWMTRKSEETITPWNFEEVVDKGASAQSFIERMTNFDKNLPNEKVLPKHSLLYEYFTVYNELTKVKYVTEGMRKPAFLSGEQKKAIVDLLFKTNRKVTVKQLKEDYFKKIECFDSVEISGVEDRFNASLGTYHDLLKIIKDKDFLDNEENEDILEDIVLTLTLFEDREMIEERLKTYAHLFDDKVMKQLKRRRYTGWGRLSRKLINGIRDKQSGKTILDFLKSDGFANRNFMQLIHDDSLTFKEDIQKAQVSGQGDSLHEHIANLAGSPAIKKGILQTVKVVDELVKVMGRHKPENIVIEMARENQTTQKGQKNSRERMKRIEEGIKELGSQILKEHPVENTQLQNEKLYLYYLQNGRDMYVDQELDINRLSDYDVDHIVPQSFLKDDSIDNKVLTRSDKARGKSDNVPSEEVVKKMKNYWRQLLNAKLITQRKFDNLTKAERGGLSELDKAGFIKRQLVETRQITKHVAQILDSRMNTKYDENDKLIREVKVITLKSKLVSDFRKDFQFYKVREINNYHHAHDAYLNAVVGTALIKKYPKLESEFVYGDYKVYDVRKMIAKSEQEIGKATAKYFFYSNIMNFFKTEITLANGEIRKRPLIETNGETGEIVWDKGRDFATVRKVLSMPQVNIVKKTEVQTGGFSKESILPKRNSDKLIARKKDWDPKKYGGFDSPTVAYSVLVVAKVEKGKSKKLKSVKELLGITIMERSSFEKNPIDFLEAKGYKEVKKDLIIKLPKYSLFELENGRKRMLASAGELQKGNELALPSKYVNFLYLASHYEKLKGSPEDNEQKQLFVEQHKHYLDEIIEQISEFSKRVILADANLDKVLSAYNKHRDKPIREQAENIIHLFTLTNLGAPAAFKYFDTTIDRKRYTSTKEVLDATLIHQSITGLYETRIDLSQLGGDGGGGGEAAAKGGSGGTLNIEDEYRLHETSKEPDVSLGSTWLSDFPQAWAETGGMGLAVRQAPLIIPLKATSTPVSIKQYPMSQEARLGIKPHIQRLLDQGILVPCQSPWNTPLLPVKKPGTNDYRPVQDLREVNKRVEDIHPTVPNPYNLLSGLPPSHQWYTVLDLKDAFFCLRLHPTSQPLFAFEWRDPEMGISGQLTWTRLPQGFKNSPTLFNEALHRDLADFRIQHPDLILLQYVDDLLLAATSELDCQQGTRALLQTLGNLGYRASAKKAQICQKQVKYLGYLLKEGQRWLTEARKETVMGQPTPKTPRQLREFLGKAGFCRLFIPGFAEMAAPLYPLTKPGTLFNWGPDQQKAYQEIKQALLTAPALGLPDLTKPFELFVDEKQGYAKGVLTQKLGPWRRPVAYLSKKLDPVAAGWPPCLRMVAAIAVLTKDAGKLTMGQPLVILAPHAVEALVKQPPDRWLSNARMTHYQALLLDTDRVQFGPVVALNPATLLPLPEEGLQHNCLDILAEAHGTRPDLTDQPLPDADHTWYTDGSSLLQEGQRKAGAAVTTETEVIWAKALPAGTSAQRAELIALTQALKMAEGKKLNVYTDSRYAFATAHIHGEIYRRRGWLTSEGKEIKNKDEILALLKALFLPKRLSIIHCPGHQKGHSAEARGNRMADQAARKAAITETPDTSTLLIENSSPSGGSKRTADGSEFEAGKRTADGSEFEKRTADGSEFESPKKKAKVE

SEQ ID NO: 2639 - protein, 2115 aa, synthetic construct
MPAAKRVKLDGGDKKYSIGLDIGTNSVGWAVITDEYKVPSKKFKVLGNTDRHSIKKNLIGALLFDSGETAEATRLKRTARRRYTRRKNRICYLQEIFSNEMAKVDDSFFHRLEESFLVEEDKKHERHPIFGNIVDEVAYHEKYPTIYHLRKKLVDSTDKADLRLIYLALAHMIKFRGHFLIEGDLNPDNSDVDKLFIQLVQTYNQLFEENPINASGVDAKAILSARLSKSRRLENLIAQLPGEKKNGLFGNLIALSLGLTPNFKSNFDLAEDAKLQLSKDTYDDDLDNLLAQIGDQYADLFLAAKNLSDAILLSDILRVNTEITKAPLSASMIKRYDEHHQDLTLLKALVRQQLPEKYKEIFFDQSKNGYAGYIDGGASQEEFYKFIKPILEKMDGTEELLVKLNREDLLRKQRTFDNGSIPHQIHLGELHAILRRQEDFYPFLKDNREKIEKILTFRIPYYVGPLARGNSRFAWMTRKSEETITPWNFEEVVDKGASAQSFIERMTNFDKNLPNEKVLPKHSLLYEYFTVYNELTKVKYVTEGMRKPAFLSGEQKKAIVDLLFKTNRKVTVKQLKEDYFKKIECFDSVEISGVEDRFNASLGTYHDLLKIIKDKDFLDNEENEDILEDIVLTLTLFEDREMIEERLKTYAHLFDDKVMKQLKRRRYTGWGRLSRKLINGIRDKQSGKTILDFLKSDGFANRNFMQLIHDDSLTFKEDIQKAQVSGQGDSLHEHIANLAGSPAIKKGILQTVKVVDELVKVMGRHKPENIVIEMARENQTTQKGQKNSRERMKRIEEGIKELGSQILKEHPVENTQLQNEKLYLYYLQNGRDMYVDQELDINRLSDYDVDHIVPQSFLKDDSIDNKVLTRSDKARGKSDNVPSEEVVKKMKNYWRQLLNAKLITQRKFDNLTKAERGGLSELDKAGFIKRQLVETRQITKHVAQILDSRMNTKYDENDKLIREVKVITLKSKLVSDFRKDFQFYKVREINNYHHAHDAYLNAVVGTALIKKYPKLESEFVYGDYKVYDVRKMIAKSEQEIGKATAKYFFYSNIMNFFKTEITLANGEIRKRPLIETNGETGEIVWDKGRDFATVRKVLSMPQVNIVKKTEVQTGGFSKESILPKRNSDKLIARKKDWDPKKYGGFDSPTVAYSVLVVAKVEKGKSKKLKSVKELLGITIMERSSFEKNPIDFLEAKGYKEVKKDLIIKLPKYSLFELENGRKRMLASAGELQKGNELALPSKYVNFLYLASHYEKLKGSPEDNEQKQLFVEQHKHYLDEIIEQISEFSKRVILADANLDKVLSAYNKHRDKPIREQAENIIHLFTLTNLGAPAAFKYFDTTIDRKRYTSTKEVLDATLIHQSITGLYETRIDLSQLGGDGGGGGGSGGGGSGGTLNIEDEYRLHETSKEPDVSLGSTWLSDFPQAWAETGGMGLAVRQAPLIIPLKATSTPVSIKQYPMSQEARLGIKPHIQRLLDQGILVPCQSPWNTPLLPVKKPGTNDYRPVQDLREVNKRVEDIHPTVPNPYNLLSGLPPSHQWYTVLDLKDAFFCLRLHPTSQPLFAFEWRDPEMGISGQLTWTRLPQGFKNSPTLFNEALHRDLADFRIQHPDLILLQYVDDLLLAATSELDCQQGTRALLQTLGNLGYRASAKKAQICQKQVKYLGYLLKEGQRWLTEARKETVMGQPTPKTPRQLREFLGKAGFCRLFIPGFAEMAAPLYPLTKPGTLFNWGPDQQKAYQEIKQALLTAPALGLPDLTKPFELFVDEKQGYAKGVLTQKLGPWRRPVAYLSKKLDPVAAGWPPCLRMVAAIAVLTKDAGKLTMGQPLVILAPHAVEALVKQPPDRWLSNARMTHYQALLLDTDRVQFGPVVALNPATLLPLPEEGLQHNCLDILAEAHGTRPDLTDQPLPDADHTWYTDGSSLLQEGQRKAGAAVTTETEVIWAKALPAGTSAQRAELIALTQALKMAEGKKLNVYTDSRYAFATAHIHGEIYRRRGWLTSEGKEIKNKDEILALLKALFLPKRLSIIHCPGHQKGHSAEARGNRMADQAARKAAITETPDTSTLLIENSSPSGGSKRTADGSEFEAGKRTADGSEFEKRTADGSEFESPKKKAKVE

SEQ ID NO: 2640 - protein, 2116 aa, synthetic construct
MPAAKRVKLDGGDKKYSIGLDIGTNSVGWAVITDEYKVPSKKFKVLGNTDRHSIKKNLIGALLFDSGETAEATRLKRTARRRYTRRKNRICYLQEIFSNEMAKVDDSFFHRLEESFLVEEDKKHERHPIFGNIVDEVAYHEKYPTIYHLRKKLVDSTDKADLRLIYLALAHMIKFRGHFLIEGDLNPDNSDVDKLFIQLVQTYNQLFEENPINASGVDAKAILSARLSKSRRLENLIAQLPGEKKNGLFGNLIALSLGLTPNFKSNFDLAEDAKLQLSKDTYDDDLDNLLAQIGDQYADLFLAAKNLSDAILLSDILRVNTEITKAPLSASMIKRYDEHHQDLTLLKALVRQQLPEKYKEIFFDQSKNGYAGYIDGGASQEEFYKFIKPILEKMDGTEELLVKLNREDLLRKQRTFDNGSIPHQIHLGELHAILRRQEDFYPFLKDNREKIEKILTFRIPYYVGPLARGNSRFAWMTRKSEETITPWNFEEVVDKGASAQSFIERMTNFDKNLPNEKVLPKHSLLYEYFTVYNELTKVKYVTEGMRKPAFLSGEQKKAIVDLLFKTNRKVTVKQLKEDYFKKIECFDSVEISGVEDRFNASLGTYHDLLKIIKDKDFLDNEENEDILEDIVLTLTLFEDREMIEERLKTYAHLFDDKVMKQLKRRRYTGWGRLSRKLINGIRDKQSGKTILDFLKSDGFANRNFMQLIHDDSLTFKEDIQKAQVSGQGDSLHEHIANLAGSPAIKKGILQTVKVVDELVKVMGRHKPENIVIEMARENQTTQKGQKNSRERMKRIEEGIKELGSQILKEHPVENTQLQNEKLYLYYLQNGRDMYVDQELDINRLSDYDVDHIVPQSFLKDDSIDNKVLTRSDKARGKSDNVPSEEVVKKMKNYWRQLLNAKLITQRKFDNLTKAERGGLSELDKAGFIKRQLVETRQITKHVAQILDSRMNTKYDENDKLIREVKVITLKSKLVSDFRKDFQFYKVREINNYHHAHDAYLNAVVGTALIKKYPKLESEFVYGDYKVYDVRKMIAKSEQEIGKATAKYFFYSNIMNFFKTEITLANGEIRKRPLIETNGETGEIVWDKGRDFATVRKVLSMPQVNIVKKTEVQTGGFSKESILPKRNSDKLIARKKDWDPKKYGGFDSPTVAYSVLVVAKVEKGKSKKLKSVKELLGITIMERSSFEKNPIDFLEAKGYKEVKKDLIIKLPKYSLFELENGRKRMLASAGELQKGNELALPSKYVNFLYLASHYEKLKGSPEDNEQKQLFVEQHKHYLDEIIEQISEFSKRVILADANLDKVLSAYNKHRDKPIREQAENIIHLFTLTNLGAPAAFKYFDTTIDRKRYTSTKEVLDATLIHQSITGLYETRIDLSQLGGDGGPAPGGSEAAAKGGTLNIEDEYRLHETSKEPDVSLGSTWLSDFPQAWAETGGMGLAVRQAPLIIPLKATSTPVSIKQYPMSQEARLGIKPHIQRLLDQGILVPCQSPWNTPLLPVKKPGTNDYRPVQDLREVNKRVEDIHPTVPNPYNLLSGLPPSHQWYTVLDLKDAFFCLRLHPTSQPLFAFEWRDPEMGISGQLTWTRLPQGFKNSPTLFNEALHRDLADFRIQHPDLILLQYVDDLLLAATSELDCQQGTRALLQTLGNLGYRASAKKAQICQKQVKYLGYLLKEGQRWLTEARKETVMGQPTPKTPRQLREFLGKAGFCRLFIPGFAEMAAPLYPLTKPGTLFNWGPDQQKAYQEIKQALLTAPALGLPDLTKPFELFVDEKQGYAKGVLTQKLGPWRRPVAYLSKKLDPVAAGWPPCLRMVAAIAVLTKDAGKLTMGQPLVILAPHAVEALVKQPPDRWLSNARMTHYQALLLDTDRVQFGPVVALNPATLLPLPEEGLQHNCLDILAEAHGTRPDLTDQPLPDADHTWYTDGSSLLQEGQRKAGAAVTTETEVIWAKALPAGTSAQRAELIALTQALKMAEGKKLNVYTDSRYAFATAHIHGEIYRRRGWLTSEGKEIKNKDEILALLKALFLPKRLSIIHCPGHQKGHSAEARGNRMADQAARKAAITETPDTSTLLIENSSPSGGSKRTADGSEFEAGKRTADGSEFEKRTADGSEFESPKKKAKVE

SEQ ID NO: 2641 - protein, 2116 aa, synthetic construct
MPAAKRVKLDGGDKKYSIGLDIGTNSVGWAVITDEYKVPSKKFKVLGNTDRHSIKKNLIGALLFDSGETAEATRLKRTARRRYTRRKNRICYLQEIFSNEMAKVDDSFFHRLEESFLVEEDKKHERHPIFGNIVDEVAYHEKYPTIYHLRKKLVDSTDKADLRLIYLALAHMIKFRGHFLIEGDLNPDNSDVDKLFIQLVQTYNQLFEENPINASGVDAKAILSARLSKSRRLENLIAQLPGEKKNGLFGNLIALSLGLTPNFKSNFDLAEDAKLQLSKDTYDDDLDNLLAQIGDQYADLFLAAKNLSDAILLSDILRVNTEITKAPLSASMIKRYDEHHQDLTLLKALVRQQLPEKYKEIFFDQSKNGYAGYIDGGASQEEFYKFIKPILEKMDGTEELLVKLNREDLLRKQRTFDNGSIPHQIHLGELHAILRRQEDFYPFLKDNREKIEKILTFRIPYYVGPLARGNSRFAWMTRKSEETITPWNFEEVVDKGASAQSFIERMTNFDKNLPNEKVLPKHSLLYEYFTVYNELTKVKYVTEGMRKPAFLSGEQKKAIVDLLFKTNRKVTVKQLKEDYFKKIECFDSVEISGVEDRFNASLGTYHDLLKIIKDKDFLDNEENEDILEDIVLTLTLFEDREMIEERLKTYAHLFDDKVMKQLKRRRYTGWGRLSRKLINGIRDKQSGKTILDFLKSDGFANRNFMQLIHDDSLTFKEDIQKAQVSGQGDSLHEHIANLAGSPAIKKGILQTVKVVDELVKVMGRHKPENIVIEMARENQTTQKGQKNSRERMKRIEEGIKELGSQILKEHPVENTQLQNEKLYLYYLQNGRDMYVDQELDINRLSDYDVDHIVPQSFLKDDSIDNKVLTRSDKARGKSDNVPSEEVVKKMKNYWRQLLNAKLITQRKFDNLTKAERGGLSELDKAGFIKRQLVETRQITKHVAQILDSRMNTKYDENDKLIREVKVITLKSKLVSDFRKDFQFYKVREINNYHHAHDAYLNAVVGTALIKKYPKLESEFVYGDYKVYDVRKMIAKSEQEIGKATAKYFFYSNIMNFFKTEITLANGEIRKRPLIETNGETGEIVWDKGRDFATVRKVLSMPQVNIVKKTEVQTGGFSKESILPKRNSDKLIARKKDWDPKKYGGFDSPTVAYSVLVVAKVEKGKSKKLKSVKELLGITIMERSSFEKNPIDFLEAKGYKEVKKDLIIKLPKYSLFELENGRKRMLASAGELQKGNELALPSKYVNFLYLASHYEKLKGSPEDNEQKQLFVEQHKHYLDEIIEQISEFSKRVILADANLDKVLSAYNKHRDKPIREQAENIIHLFTLTNLGAPAAFKYFDTTIDRKRYTSTKEVLDATLIHQSITGLYETRIDLSQLGGDGGGSSEAAAKPAPGGTLNIEDEYRLHETSKEPDVSLGSTWLSDFPQAWAETGGMGLAVRQAPLIIPLKATSTPVSIKQYPMSQEARLGIKPHIQRLLDQGILVPCQSPWNTPLLPVKKPGTNDYRPVQDLREVNKRVEDIHPTVPNPYNLLSGLPPSHQWYTVLDLKDAFFCLRLHPTSQPLFAFEWRDPEMGISGQLTWTRLPQGFKNSPTLFNEALHRDLADFRIQHPDLILLQYVDDLLLAATSELDCQQGTRALLQTLGNLGYRASAKKAQICQKQVKYLGYLLKEGQRWLTEARKETVMGQPTPKTPRQLREFLGKAGFCRLFIPGFAEMAAPLYPLTKPGTLFNWGPDQQKAYQEIKQALLTAPALGLPDLTKPFELFVDEKQGYAKGVLTQKLGPWRRPVAYLSKKLDPVAAGWPPCLRMVAAIAVLTKDAGKLTMGQPLVILAPHAVEALVKQPPDRWLSNARMTHYQALLLDTDRVQFGPVVALNPATLLPLPEEGLQHNCLDILAEAHGTRPDLTDQPLPDADHTWYTDGSSLLQEGQRKAGAAVTTETEVIWAKALPAGTSAQRAELIALTQALKMAEGKKLNVYTDSRYAFATAHIHGEIYRRRGWLTSEGKEIKNKDEILALLKALFLPKRLSIIHCPGHQKGHSAEARGNRMADQAARKAAITETPDTSTLLIENSSPSGGSKRTADGSEFEAGKRTADGSEFEKRTADGSEFESPKKKAKVE

SEQ ID NO: 2642 - protein, 2111 aa, synthetic construct
MPAAKRVKLDGGDKKYSIGLDIGTNSVGWAVITDEYKVPSKKFKVLGNTDRHSIKKNLIGALLFDSGETAEATRLKRTARRRYTRRKNRICYLQEIFSNEMAKVDDSFFHRLEESFLVEEDKKHERHPIFGNIVDEVAYHEKYPTIYHLRKKLVDSTDKADLRLIYLALAHMIKFRGHFLIEGDLNPDNSDVDKLFIQLVQTYNQLFEENPINASGVDAKAILSARLSKSRRLENLIAQLPGEKKNGLFGNLIALSLGLTPNFKSNFDLAEDAKLQLSKDTYDDDLDNLLAQIGDQYADLFLAAKNLSDAILLSDILRVNTEITKAPLSASMIKRYDEHHQDLTLLKALVRQQLPEKYKEIFFDQSKNGYAGYIDGGASQEEFYKFIKPILEKMDGTEELLVKLNREDLLRKQRTFDNGSIPHQIHLGELHAILRRQEDFYPFLKDNREKIEKILTFRIPYYVGPLARGNSRFAWMTRKSEETITPWNFEEVVDKGASAQSFIERMTNFDKNLPNEKVLPKHSLLYEYFTVYNELTKVKYVTEGMRKPAFLSGEQKKAIVDLLFKTNRKVTVKQLKEDYFKKIECFDSVEISGVEDRFNASLGTYHDLLKIIKDKDFLDNEENEDILEDIVLTLTLFEDREMIEERLKTYAHLFDDKVMKQLKRRRYTGWGRLSRKLINGIRDKQSGKTILDFLKSDGFANRNFMQLIHDDSLTFKEDIQKAQVSGQGDSLHEHIANLAGSPAIKKGILQTVKVVDELVKVMGRHKPENIVIEMARENQTTQKGQKNSRERMKRIEEGIKELGSQILKEHPVENTQLQNEKLYLYYLQNGRDMYVDQELDINRLSDYDVDHIVPQSFLKDDSIDNKVLTRSDKARGKSDNVPSEEVVKKMKNYWRQLLNAKLITQRKFDNLTKAERGGLSELDKAGFIKRQLVETRQITKHVAQILDSRMNTKYDENDKLIREVKVITLKSKLVSDFRKDFQFYKVREINNYHHAHDAYLNAVVGTALIKKYPKLESEFVYGDYKVYDVRKMIAKSEQEIGKATAKYFFYSNIMNFFKTEITLANGEIRKRPLIETNGETGEIVWDKGRDFATVRKVLSMPQVNIVKKTEVQTGGFSKESILPKRNSDKLIARKKDWDPKKYGGFDSPTVAYSVLVVAKVEKGKSKKLKSVKELLGITIMERSSFEKNPIDFLEAKGYKEVKKDLIIKLPKYSLFELENGRKRMLASAGELQKGNELALPSKYVNFLYLASHYEKLKGSPEDNEQKQLFVEQHKHYLDEIIEQISEFSKRVILADANLDKVLSAYNKHRDKPIREQAENIIHLFTLTNLGAPAAFKYFDTTIDRKRYTSTKEVLDATLIHQSITGLYETRIDLSQLGGDGGGGGGGGGGTLNIEDEYRLHETSKEPDVSLGSTWLSDFPQAWAETGGMGLAVRQAPLIIPLKATSTPVSIKQYPMSQEARLGIKPHIQRLLDQGILVPCQSPWNTPLLPVKKPGTNDYRPVQDLREVNKRVEDIHPTVPNPYNLLSGLPPSHQWYTVLDLKDAFFCLRLHPTSQPLFAFEWRDPEMGISGQLTWTRLPQGFKNSPTLFNEALHRDLADFRIQHPDLILLQYVDDLLLAATSELDCQQGTRALLQTLGNLGYRASAKKAQICQKQVKYLGYLLKEGQRWLTEARKETVMGQPTPKTPRQLREFLGKAGFCRLFIPGFAEMAAPLYPLTKPGTLFNWGPDQQKAYQEIKQALLTAPALGLPDLTKPFELFVDEKQGYAKGVLTQKLGPWRRPVAYLSKKLDPVAAGWPPCLRMVAAIAVLTKDAGKLTMGQPLVILAPHAVEALVKQPPDRWLSNARMTHYQALLLDTDRVQFGPVVALNPATLLPLPEEGLQHNCLDILAEAHGTRPDLTDQPLPDADHTWYTDGSSLLQEGQRKAGAAVTTETEVIWAKALPAGTSAQRAELIALTQALKMAEGKKLNVYTDSRYAFATAHIHGEIYRRRGWLTSEGKEIKNKDEILALLKALFLPKRLSIIHCPGHQKGHSAEARGNRMADQAARKAAITETPDTSTLLIENSSPSGGSKRTADGSEFEAGKRTADGSEFEKRTADGSEFESPKKKAKVE

SEQ ID NO: 2643 - protein, 2111 aa, synthetic construct
MPAAKRVKLDGGDKKYSIGLDIGTNSVGWAVITDEYKVPSKKFKVLGNTDRHSIKKNLIGALLFDSGETAEATRLKRTARRRYTRRKNRICYLQEIFSNEMAKVDDSFFHRLEESFLVEEDKKHERHPIFGNIVDEVAYHEKYPTIYHLRKKLVDSTDKADLRLIYLALAHMIKFRGHFLIEGDLNPDNSDVDKLFIQLVQTYNQLFEENPINASGVDAKAILSARLSKSRRLENLIAQLPGEKKNGLFGNLIALSLGLTPNFKSNFDLAEDAKLQLSKDTYDDDLDNLLAQIGDQYADLFLAAKNLSDAILLSDILRVNTEITKAPLSASMIKRYDEHHQDLTLLKALVRQQLPEKYKEIFFDQSKNGYAGYIDGGASQEEFYKFIKPILEKMDGTEELLVKLNREDLLRKQRTFDNGSIPHQIHLGELHAILRRQEDFYPFLKDNREKIEKILTFRIPYYVGPLARGNSRFAWMTRKSEETITPWNFEEVVDKGASAQSFIERMTNFDKNLPNEKVLPKHSLLYEYFTVYNELTKVKYVTEGMRKPAFLSGEQKKAIVDLLFKTNRKVTVKQLKEDYFKKIECFDSVEISGVEDRFNASLGTYHDLLKIIKDKDFLDNEENEDILEDIVLTLTLFEDREMIEERLKTYAHLFDDKVMKQLKRRRYTGWGRLSRKLINGIRDKQSGKTILDFLKSDGFANRNFMQLIHDDSLTFKEDIQKAQVSGQGDSLHEHIANLAGSPAIKKGILQTVKVVDELVKVMGRHKPENIVIEMARENQTTQKGQKNSRERMKRIEEGIKELGSQILKEHPVENTQLQNEKLYLYYLQNGRDMYVDQELDINRLSDYDVDHIVPQSFLKDDSIDNKVLTRSDKARGKSDNVPSEEVVKKMKNYWRQLLNAKLITQRKFDNLTKAERGGLSELDKAGFIKRQLVETRQITKHVAQILDSRMNTKYDENDKLIREVKVITLKSKLVSDFRKDFQFYKVREINNYHHAHDAYLNAVVGTALIKKYPKLESEFVYGDYKVYDVRKMIAKSEQEIGKATAKYFFYSNIMNFFKTEITLANGEIRKRPLIETNGETGEIVWDKGRDFATVRKVLSMPQVNIVKKTEVQTGGFSKESILPKRNSDKLIARKKDWDPKKYGGFDSPTVAYSVLVVAKVEKGKSKKLKSVKELLGITIMERSSFEKNPIDFLEAKGYKEVKKDLIIKLPKYSLFELENGRKRMLASAGELQKGNELALPSKYVNFLYLASHYEKLKGSPEDNEQKQLFVEQHKHYLDEIIEQISEFSKRVILADANLDKVLSAYNKHRDKPIREQAENIIHLFTLTNLGAPAAFKYFDTTIDRKRYTSTKEVLDATLIHQSITGLYETRIDLSQLGGDGGPAPGGSGGTLNIEDEYRLHETSKEPDVSLGSTWLSDFPQAWAETGGMGLAVRQAPLIIPLKATSTPVSIKQYPMSQEARLGIKPHIQRLLDQGILVPCQSPWNTPLLPVKKPGTNDYRPVQDLREVNKRVEDIHPTVPNPYNLLSGLPPSHQWYTVLDLKDAFFCLRLHPTSQPLFAFEWRDPEMGISGQLTWTRLPQGFKNSPTLFNEALHRDLADFRIQHPDLILLQYVDDLLLAATSELDCQQGTRALLQTLGNLGYRASAKKAQICQKQVKYLGYLLKEGQRWLTEARKETVMGQPTPKTPRQLREFLGKAGFCRLFIPGFAEMAAPLYPLTKPGTLFNWGPDQQKAYQEIKQALLTAPALGLPDLTKPFELFVDEKQGYAKGVLTQKLGPWRRPVAYLSKKLDPVAAGWPPCLRMVAAIAVLTKDAGKLTMGQPLVILAPHAVEALVKQPPDRWLSNARMTHYQALLLDTDRVQFGPVVALNPATLLPLPEEGLQHNCLDILAEAHGTRPDLTDQPLPDADHTWYTDGSSLLQEGQRKAGAAVTTETEVIWAKALPAGTSAQRAELIALTQALKMAEGKKLNVYTDSRYAFATAHIHGEIYRRRGWLTSEGKEIKNKDEILALLKALFLPKRLSIIHCPGHQKGHSAEARGNRMADQAARKAAITETPDTSTLLIENSSPSGGSKRTADGSEFEAGKRTADGSEFEKRTADGSEFESPKKKAKVE

SEQ ID NO: 2644 - protein, 2135 aa, synthetic construct
MPAAKRVKLDGGDKKYSIGLDIGTNSVGWAVITDEYKVPSKKFKVLGNTDRHSIKKNLIGALLFDSGETAEATRLKRTARRRYTRRKNRICYLQEIFSNEMAKVDDSFFHRLEESFLVEEDKKHERHPIFGNIVDEVAYHEKYPTIYHLRKKLVDSTDKADLRLIYLALAHMIKFRGHFLIEGDLNPDNSDVDKLFIQLVQTYNQLFEENPINASGVDAKAILSARLSKSRRLENLIAQLPGEKKNGLFGNLIALSLGLTPNFKSNFDLAEDAKLQLSKDTYDDDLDNLLAQIGDQYADLFLAAKNLSDAILLSDILRVNTEITKAPLSASMIKRYDEHHQDLTLLKALVRQQLPEKYKEIFFDQSKNGYAGYIDGGASQEEFYKFIKPILEKMDGTEELLVKLNREDLLRKQRTFDNGSIPHQIHLGELHAILRRQEDFYPFLKDNREKIEKILTFRIPYYVGPLARGNSRFAWMTRKSEETITPWNFEEVVDKGASAQSFIERMTNFDKNLPNEKVLPKHSLLYEYFTVYNELTKVKYVTEGMRKPAFLSGEQKKAIVDLLFKTNRKVTVKQLKEDYFKKIECFDSVEISGVEDRFNASLGTYHDLLKIIKDKDFLDNEENEDILEDIVLTLTLFEDREMIEERLKTYAHLFDDKVMKQLKRRRYTGWGRLSRKLINGIRDKQSGKTILDFLKSDGFANRNFMQLIHDDSLTFKEDIQKAQVSGQGDSLHEHIANLAGSPAIKKGILQTVKVVDELVKVMGRHKPENIVIEMARENQTTQKGQKNSRERMKRIEEGIKELGSQILKEHPVENTQLQNEKLYLYYLQNGRDMYVDQELDINRLSDYDVDHIVPQSFLKDDSIDNKVLTRSDKARGKSDNVPSEEVVKKMKNYWRQLLNAKLITQRKFDNLTKAERGGLSELDKAGFIKRQLVETRQITKHVAQILDSRMNTKYDENDKLIREVKVITLKSKLVSDFRKDFQFYKVREINNYHHAHDAYLNAVVGTALIKKYPKLESEFVYGDYKVYDVRKMIAKSEQEIGKATAKYFFYSNIMNFFKTEITLANGEIRKRPLIETNGETGEIVWDKGRDFATVRKVLSMPQVNIVKKTEVQTGGFSKESILPKRNSDKLIARKKDWDPKKYGGFDSPTVAYSVLVVAKVEKGKSKKLKSVKELLGITIMERSSFEKNPIDFLEAKGYKEVKKDLIIKLPKYSLFELENGRKRMLASAGELQKGNELALPSKYVNFLYLASHYEKLKGSPEDNEQKQLFVEQHKHYLDEIIEQISEFSKRVILADANLDKVLSAYNKHRDKPIREQAENIIHLFTLTNLGAPAAFKYFDTTIDRKRYTSTKEVLDATLIHQSITGLYETRIDLSQLGGDGGGGGGSGGGGSGGGGSGGGGSGGGGSGGGGSGGTLNIEDEYRLHETSKEPDVSLGSTWLSDFPQAWAETGGMGLAVRQAPLIIPLKATSTPVSIKQYPMSQEARLGIKPHIQRLLDQGILVPCQSPWNTPLLPVKKPGTNDYRPVQDLREVNKRVEDIHPTVPNPYNLLSGLPPSHQWYTVLDLKDAFFCLRLHPTSQPLFAFEWRDPEMGISGQLTWTRLPQGFKNSPTLFNEALHRDLADFRIQHPDLILLQYVDDLLLAATSELDCQQGTRALLQTLGNLGYRASAKKAQICQKQVKYLGYLLKEGQRWLTEARKETVMGQPTPKTPRQLREFLGKAGFCRLFIPGFAEMAAPLYPLTKPGTLFNWGPDQQKAYQEIKQALLTAPALGLPDLTKPFELFVDEKQGYAKGVLTQKLGPWRRPVAYLSKKLDPVAAGWPPCLRMVAAIAVLTKDAGKLTMGQPLVILAPHAVEALVKQPPDRWLSNARMTHYQALLLDTDRVQFGPVVALNPATLLPLPEEGLQHNCLDILAEAHGTRPDLTDQPLPDADHTWYTDGSSLLQEGQRKAGAAVTTETEVIWAKALPAGTSAQRAELIALTQALKMAEGKKLNVYTDSRYAFATAHIHGEIYRRRGWLTSEGKEIKNKDEILALLKALFLPKRLSIIHCPGHQKGHSAEARGNRMADQAARKAAITETPDTSTLLIENSSPSGGSKRTADGSEFEAGKRTADGSEFEKRTADGSEFESPKKKAKVE

SEQ ID NO: 2645 - protein, 2116 aa, synthetic construct
MPAAKRVKLDGGDKKYSIGLDIGTNSVGWAVITDEYKVPSKKFKVLGNTDRHSIKKNLIGALLFDSGETAEATRLKRTARRRYTRRKNRICYLQEIFSNEMAKVDDSFFHRLEESFLVEEDKKHERHPIFGNIVDEVAYHEKYPTIYHLRKKLVDSTDKADLRLIYLALAHMIKFRGHFLIEGDLNPDNSDVDKLFIQLVQTYNQLFEENPINASGVDAKAILSARLSKSRRLENLIAQLPGEKKNGLFGNLIALSLGLTPNFKSNFDLAEDAKLQLSKDTYDDDLDNLLAQIGDQYADLFLAAKNLSDAILLSDILRVNTEITKAPLSASMIKRYDEHHQDLTLLKALVRQQLPEKYKEIFFDQSKNGYAGYIDGGASQEEFYKFIKPILEKMDGTEELLVKLNREDLLRKQRTFDNGSIPHQIHLGELHAILRRQEDFYPFLKDNREKIEKILTFRIPYYVGPLARGNSRFAWMTRKSEETITPWNFEEVVDKGASAQSFIERMTNFDKNLPNEKVLPKHSLLYEYFTVYNELTKVKYVTEGMRKPAFLSGEQKKAIVDLLFKTNRKVTVKQLKEDYFKKIECFDSVEISGVEDRFNASLGTYHDLLKIIKDKDFLDNEENEDILEDIVLTLTLFEDREMIEERLKTYAHLFDDKVMKQLKRRRYTGWGRLSRKLINGIRDKQSGKTILDFLKSDGFANRNFMQLIHDDSLTFKEDIQKAQVSGQGDSLHEHIANLAGSPAIKKGILQTVKVVDELVKVMGRHKPENIVIEMARENQTTQKGQKNSRERMKRIEEGIKELGSQILKEHPVENTQLQNEKLYLYYLQNGRDMYVDQELDINRLSDYDVDHIVPQSFLKDDSIDNKVLTRSDKARGKSDNVPSEEVVKKMKNYWRQLLNAKLITQRKFDNLTKAERGGLSELDKAGFIKRQLVETRQITKHVAQILDSRMNTKYDENDKLIREVKVITLKSKLVSDFRKDFQFYKVREINNYHHAHDAYLNAVVGTALIKKYPKLESEFVYGDYKVYDVRKMIAKSEQEIGKATAKYFFYSNIMNFFKTEITLANGEIRKRPLIETNGETGEIVWDKGRDFATVRKVLSMPQVNIVKKTEVQTGGFSKESILPKRNSDKLIARKKDWDPKKYGGFDSPTVAYSVLVVAKVEKGKSKKLKSVKELLGITIMERSSFEKNPIDFLEAKGYKEVKKDLIIKLPKYSLFELENGRKRMLASAGELQKGNELALPSKYVNFLYLASHYEKLKGSPEDNEQKQLFVEQHKHYLDEIIEQISEFSKRVILADANLDKVLSAYNKHRDKPIREQAENIIHLFTLTNLGAPAAFKYFDTTIDRKRYTSTKEVLDATLIHQSITGLYETRIDLSQLGGDGGPAPEAAAKGSSGGTLNIEDEYRLHETSKEPDVSLGSTWLSDFPQAWAETGGMGLAVRQAPLIIPLKATSTPVSIKQYPMSQEARLGIKPHIQRLLDQGILVPCQSPWNTPLLPVKKPGTNDYRPVQDLREVNKRVEDIHPTVPNPYNLLSGLPPSHQWYTVLDLKDAFFCLRLHPTSQPLFAFEWRDPEMGISGQLTWTRLPQGFKNSPTLFNEALHRDLADFRIQHPDLILLQYVDDLLLAATSELDCQQGTRALLQTLGNLGYRASAKKAQICQKQVKYLGYLLKEGQRWLTEARKETVMGQPTPKTPRQLREFLGKAGFCRLFIPGFAEMAAPLYPLTKPGTLFNWGPDQQKAYQEIKQALLTAPALGLPDLTKPFELFVDEKQGYAKGVLTQKLGPWRRPVAYLSKKLDPVAAGWPPCLRMVAAIAVLTKDAGKLTMGQPLVILAPHAVEALVKQPPDRWLSNARMTHYQALLLDTDRVQFGPVVALNPATLLPLPEEGLQHNCLDILAEAHGTRPDLTDQPLPDADHTWYTDGSSLLQEGQRKAGAAVTTETEVIWAKALPAGTSAQRAELIALTQALKMAEGKKLNVYTDSRYAFATAHIHGEIYRRRGWLTSEGKEIKNKDEILALLKALFLPKRLSIIHCPGHQKGHSAEARGNRMADQAARKAAITETPDTSTLLIENSSPSGGSKRTADGSEFEAGKRTADGSEFEKRTADGSEFESPKKKAKVE

SEQ ID NO: 2646 - protein, 2108 aa, synthetic construct
MPAAKRVKLDGGDKKYSIGLDIGTNSVGWAVITDEYKVPSKKFKVLGNTDRHSIKKNLIGALLFDSGETAEATRLKRTARRRYTRRKNRICYLQEIFSNEMAKVDDSFFHRLEESFLVEEDKKHERHPIFGNIVDEVAYHEKYPTIYHLRKKLVDSTDKADLRLIYLALAHMIKFRGHFLIEGDLNPDNSDVDKLFIQLVQTYNQLFEENPINASGVDAKAILSARLSKSRRLENLIAQLPGEKKNGLFGNLIALSLGLTPNFKSNFDLAEDAKLQLSKDTYDDDLDNLLAQIGDQYADLFLAAKNLSDAILLSDILRVNTEITKAPLSASMIKRYDEHHQDLTLLKALVRQQLPEKYKEIFFDQSKNGYAGYIDGGASQEEFYKFIKPILEKMDGTEELLVKLNREDLLRKQRTFDNGSIPHQIHLGELHAILRRQEDFYPFLKDNREKIEKILTFRIPYYVGPLARGNSRFAWMTRKSEETITPWNFEEVVDKGASAQSFIERMTNFDKNLPNEKVLPKHSLLYEYFTVYNELTKVKYVTEGMRKPAFLSGEQKKAIVDLLFKTNRKVTVKQLKEDYFKKIECFDSVEISGVEDRFNASLGTYHDLLKIIKDKDFLDNEENEDILEDIVLTLTLFEDREMIEERLKTYAHLFDDKVMKQLKRRRYTGWGRLSRKLINGIRDKQSGKTILDFLKSDGFANRNFMQLIHDDSLTFKEDIQKAQVSGQGDSLHEHIANLAGSPAIKKGILQTVKVVDELVKVMGRHKPENIVIEMARENQTTQKGQKNSRERMKRIEEGIKELGSQILKEHPVENTQLQNEKLYLYYLQNGRDMYVDQELDINRLSDYDVDHIVPQSFLKDDSIDNKVLTRSDKARGKSDNVPSEEVVKKMKNYWRQLLNAKLITQRKFDNLTKAERGGLSELDKAGFIKRQLVETRQITKHVAQILDSRMNTKYDENDKLIREVKVITLKSKLVSDFRKDFQFYKVREINNYHHAHDAYLNAVVGTALIKKYPKLESEFVYGDYKVYDVRKMIAKSEQEIGKATAKYFFYSNIMNFFKTEITLANGEIRKRPLIETNGETGEIVWDKGRDFATVRKVLSMPQVNIVKKTEVQTGGFSKESILPKRNSDKLIARKKDWDPKKYGGFDSPTVAYSVLVVAKVEKGKSKKLKSVKELLGITIMERSSFEKNPIDFLEAKGYKEVKKDLIIKLPKYSLFELENGRKRMLASAGELQKGNELALPSKYVNFLYLASHYEKLKGSPEDNEQKQLFVEQHKHYLDEIIEQISEFSKRVILADANLDKVLSAYNKHRDKPIREQAENIIHLFTLTNLGAPAAFKYFDTTIDRKRYTSTKEVLDATLIHQSITGLYETRIDLSQLGGDGGGGGGGTLNIEDEYRLHETSKEPDVSLGSTWLSDFPQAWAETGGMGLAVRQAPLIIPLKATSTPVSIKQYPMSQEARLGIKPHIQRLLDQGILVPCQSPWNTPLLPVKKPGTNDYRPVQDLREVNKRVEDIHPTVPNPYNLLSGLPPSHQWYTVLDLKDAFFCLRLHPTSQPLFAFEWRDPEMGISGQLTWTRLPQGFKNSPTLFNEALHRDLADFRIQHPDLILLQYVDDLLLAATSELDCQQGTRALLQTLGNLGYRASAKKAQICQKQVKYLGYLLKEGQRWLTEARKETVMGQPTPKTPRQLREFLGKAGFCRLFIPGFAEMAAPLYPLTKPGTLFNWGPDQQKAYQEIKQALLTAPALGLPDLTKPFELFVDEKQGYAKGVLTQKLGPWRRPVAYLSKKLDPVAAGWPPCLRMVAAIAVLTKDAGKLTMGQPLVILAPHAVEALVKQPPDRWLSNARMTHYQALLLDTDRVQFGPVVALNPATLLPLPEEGLQHNCLDILAEAHGTRPDLTDQPLPDADHTWYTDGSSLLQEGQRKAGAAVTTETEVIWAKALPAGTSAQRAELIALTQALKMAEGKKLNVYTDSRYAFATAHIHGEIYRRRGWLTSEGKEIKNKDEILALLKALFLPKRLSIIHCPGHQKGHSAEARGNRMADQAARKAAITETPDTSTLLIENSSPSGGSKRTADGSEFEAGKRTADGSEFEKRTADGSEFESPKKKAKVE

SEQ ID NO: 2647 - protein, 2115 aa, synthetic construct
MPAAKRVKLDGGDKKYSIGLDIGTNSVGWAVITDEYKVPSKKFKVLGNTDRHSIKKNLIGALLFDSGETAEATRLKRTARRRYTRRKNRICYLQEIFSNEMAKVDDSFFHRLEESFLVEEDKKHERHPIFGNIVDEVAYHEKYPTIYHLRKKLVDSTDKADLRLIYLALAHMIKFRGHFLIEGDLNPDNSDVDKLFIQLVQTYNQLFEENPINASGVDAKAILSARLSKSRRLENLIAQLPGEKKNGLFGNLIALSLGLTPNFKSNFDLAEDAKLQLSKDTYDDDLDNLLAQIGDQYADLFLAAKNLSDAILLSDILRVNTEITKAPLSASMIKRYDEHHQDLTLLKALVRQQLPEKYKEIFFDQSKNGYAGYIDGGASQEEFYKFIKPILEKMDGTEELLVKLNREDLLRKQRTFDNGSIPHQIHLGELHAILRRQEDFYPFLKDNREKIEKILTFRIPYYVGPLARGNSRFAWMTRKSEETITPWNFEEVVDKGASAQSFIERMTNFDKNLPNEKVLPKHSLLYEYFTVYNELTKVKYVTEGMRKPAFLSGEQKKAIVDLLFKTNRKVTVKQLKEDYFKKIECFDSVEISGVEDRFNASLGTYHDLLKIIKDKDFLDNEENEDILEDIVLTLTLFEDREMIEERLKTYAHLFDDKVMKQLKRRRYTGWGRLSRKLINGIRDKQSGKTILDFLKSDGFANRNFMQLIHDDSLTFKEDIQKAQVSGQGDSLHEHIANLAGSPAIKKGILQTVKVVDELVKVMGRHKPENIVIEMARENQTTQKGQKNSRERMKRIEEGIKELGSQILKEHPVENTQLQNEKLYLYYLQNGRDMYVDQELDINRLSDYDVDHIVPQSFLKDDSIDNKVLTRSDKARGKSDNVPSEEVVKKMKNYWRQLLNAKLITQRKFDNLTKAERGGLSELDKAGFIKRQLVETRQITKHVAQILDSRMNTKYDENDKLIREVKVITLKSKLVSDFRKDFQFYKVREINNYHHAHDAYLNAVVGTALIKKYPKLESEFVYGDYKVYDVRKMIAKSEQEIGKATAKYFFYSNIMNFFKTEITLANGEIRKRPLIETNGETGEIVWDKGRDFATVRKVLSMPQVNIVKKTEVQTGGFSKESILPKRNSDKLIARKKDWDPKKYGGFDSPTVAYSVLVVAKVEKGKSKKLKSVKELLGITIMERSSFEKNPIDFLEAKGYKEVKKDLIIKLPKYSLFELENGRKRMLASAGELQKGNELALPSKYVNFLYLASHYEKLKGSPEDNEQKQLFVEQHKHYLDEIIEQISEFSKRVILADANLDKVLSAYNKHRDKPIREQAENIIHLFTLTNLGAPAAFKYFDTTIDRKRYTSTKEVLDATLIHQSITGLYETRIDLSQLGGDGGEAAAKEAAAKGGTLNIEDEYRLHETSKEPDVSLGSTWLSDFPQAWAETGGMGLAVRQAPLIIPLKATSTPVSIKQYPMSQEARLGIKPHIQRLLDQGILVPCQSPWNTPLLPVKKPGTNDYRPVQDLREVNKRVEDIHPTVPNPYNLLSGLPPSHQWYTVLDLKDAFFCLRLHPTSQPLFAFEWRDPEMGISGQLTWTRLPQGFKNSPTLFNEALHRDLADFRIQHPDLILLQYVDDLLLAATSELDCQQGTRALLQTLGNLGYRASAKKAQICQKQVKYLGYLLKEGQRWLTEARKETVMGQPTPKTPRQLREFLGKAGFCRLFIPGFAEMAAPLYPLTKPGTLFNWGPDQQKAYQEIKQALLTAPALGLPDLTKPFELFVDEKQGYAKGVLTQKLGPWRRPVAYLSKKLDPVAAGWPPCLRMVAAIAVLTKDAGKLTMGQPLVILAPHAVEALVKQPPDRWLSNARMTHYQALLLDTDRVQFGPVVALNPATLLPLPEEGLQHNCLDILAEAHGTRPDLTDQPLPDADHTWYTDGSSLLQEGQRKAGAAVTTETEVIWAKALPAGTSAQRAELIALTQALKMAEGKKLNVYTDSRYAFATAHIHGEIYRRRGWLTSEGKEIKNKDEILALLKALFLPKRLSIIHCPGHQKGHSAEARGNRMADQAARKAAITETPDTSTLLIENSSPSGGSKRTADGSEFEAGKRTADGSEFEKRTADGSEFESPKKKAKVE

SEQ ID NO: 2648 - protein, 2116 aa, synthetic construct
MPAAKRVKLDGGDKKYSIGLDIGTNSVGWAVITDEYKVPSKKFKVLGNTDRHSIKKNLIGALLFDSGETAEATRLKRTARRRYTRRKNRICYLQEIFSNEMAKVDDSFFHRLEESFLVEEDKKHERHPIFGNIVDEVAYHEKYPTIYHLRKKLVDSTDKADLRLIYLALAHMIKFRGHFLIEGDLNPDNSDVDKLFIQLVQTYNQLFEENPINASGVDAKAILSARLSKSRRLENLIAQLPGEKKNGLFGNLIALSLGLTPNFKSNFDLAEDAKLQLSKDTYDDDLDNLLAQIGDQYADLFLAAKNLSDAILLSDILRVNTEITKAPLSASMIKRYDEHHQDLTLLKALVRQQLPEKYKEIFFDQSKNGYAGYIDGGASQEEFYKFIKPILEKMDGTEELLVKLNREDLLRKQRTFDNGSIPHQIHLGELHAILRRQEDFYPFLKDNREKIEKILTFRIPYYVGPLARGNSRFAWMTRKSEETITPWNFEEVVDKGASAQSFIERMTNFDKNLPNEKVLPKHSLLYEYFTVYNELTKVKYVTEGMRKPAFLSGEQKKAIVDLLFKTNRKVTVKQLKEDYFKKIECFDSVEISGVEDRFNASLGTYHDLLKIIKDKDFLDNEENEDILEDIVLTLTLFEDREMIEERLKTYAHLFDDKVMKQLKRRRYTGWGRLSRKLINGIRDKQSGKTILDFLKSDGFANRNFMQLIHDDSLTFKEDIQKAQVSGQGDSLHEHIANLAGSPAIKKGILQTVKVVDELVKVMGRHKPENIVIEMARENQTTQKGQKNSRERMKRIEEGIKELGSQILKEHPVENTQLQNEKLYLYYLQNGRDMYVDQELDINRLSDYDVDHIVPQSFLKDDSIDNKVLTRSDKARGKSDNVPSEEVVKKMKNYWRQLLNAKLITQRKFDNLTKAERGGLSELDKAGFIKRQLVETRQITKHVAQILDSRMNTKYDENDKLIREVKVITLKSKLVSDFRKDFQFYKVREINNYHHAHDAYLNAVVGTALIKKYPKLESEFVYGDYKVYDVRKMIAKSEQEIGKATAKYFFYSNIMNFFKTEITLANGEIRKRPLIETNGETGEIVWDKGRDFATVRKVLSMPQVNIVKKTEVQTGGFSKESILPKRNSDKLIARKKDWDPKKYGGFDSPTVAYSVLVVAKVEKGKSKKLKSVKELLGITIMERSSFEKNPIDFLEAKGYKEVKKDLIIKLPKYSLFELENGRKRMLASAGELQKGNELALPSKYVNFLYLASHYEKLKGSPEDNEQKQLFVEQHKHYLDEIIEQISEFSKRVILADANLDKVLSAYNKHRDKPIREQAENIIHLFTLTNLGAPAAFKYFDTTIDRKRYTSTKEVLDATLIHQSITGLYETRIDLSQLGGDGGGSSPAPEAAAKGGTLNIEDEYRLHETSKEPDVSLGSTWLSDFPQAWAETGGMGLAVRQAPLIIPLKATSTPVSIKQYPMSQEARLGIKPHIQRLLDQGILVPCQSPWNTPLLPVKKPGTNDYRPVQDLREVNKRVEDIHPTVPNPYNLLSGLPPSHQWYTVLDLKDAFFCLRLHPTSQPLFAFEWRDPEMGISGQLTWTRLPQGFKNSPTLFNEALHRDLADFRIQHPDLILLQYVDDLLLAATSELDCQQGTRALLQTLGNLGYRASAKKAQICQKQVKYLGYLLKEGQRWLTEARKETVMGQPTPKTPRQLREFLGKAGFCRLFIPGFAEMAAPLYPLTKPGTLFNWGPDQQKAYQEIKQALLTAPALGLPDLTKPFELFVDEKQGYAKGVLTQKLGPWRRPVAYLSKKLDPVAAGWPPCLRMVAAIAVLTKDAGKLTMGQPLVILAPHAVEALVKQPPDRWLSNARMTHYQALLLDTDRVQFGPVVALNPATLLPLPEEGLQHNCLDILAEAHGTRPDLTDQPLPDADHTWYTDGSSLLQEGQRKAGAAVTTETEVIWAKALPAGTSAQRAELIALTQALKMAEGKKLNVYTDSRYAFATAHIHGEIYRRRGWLTSEGKEIKNKDEILALLKALFLPKRLSIIHCPGHQKGHSAEARGNRMADQAARKAAITETPDTSTLLIENSSPSGGSKRTADGSEFEAGKRTADGSEFEKRTADGSEFESPKKKAKVE

SEQ ID NO: 2649 - protein, 2114 aa, synthetic construct
MPAAKRVKLDGGDKKYSIGLDIGTNSVGWAVITDEYKVPSKKFKVLGNTDRHSIKKNLIGALLFDSGETAEATRLKRTARRRYTRRKNRICYLQEIFSNEMAKVDDSFFHRLEESFLVEEDKKHERHPIFGNIVDEVAYHEKYPTIYHLRKKLVDSTDKADLRLIYLALAHMIKFRGHFLIEGDLNPDNSDVDKLFIQLVQTYNQLFEENPINASGVDAKAILSARLSKSRRLENLIAQLPGEKKNGLFGNLIALSLGLTPNFKSNFDLAEDAKLQLSKDTYDDDLDNLLAQIGDQYADLFLAAKNLSDAILLSDILRVNTEITKAPLSASMIKRYDEHHQDLTLLKALVRQQLPEKYKEIFFDQSKNGYAGYIDGGASQEEFYKFIKPILEKMDGTEELLVKLNREDLLRKQRTFDNGSIPHQIHLGELHAILRRQEDFYPFLKDNREKIEKILTFRIPYYVGPLARGNSRFAWMTRKSEETITPWNFEEVVDKGASAQSFIERMTNFDKNLPNEKVLPKHSLLYEYFTVYNELTKVKYVTEGMRKPAFLSGEQKKAIVDLLFKTNRKVTVKQLKEDYFKKIECFDSVEISGVEDRFNASLGTYHDLLKIIKDKDFLDNEENEDILEDIVLTLTLFEDREMIEERLKTYAHLFDDKVMKQLKRRRYTGWGRLSRKLINGIRDKQSGKTILDFLKSDGFANRNFMQLIHDDSLTFKEDIQKAQVSGQGDSLHEHIANLAGSPAIKKGILQTVKVVDELVKVMGRHKPENIVIEMARENQTTQKGQKNSRERMKRIEEGIKELGSQILKEHPVENTQLQNEKLYLYYLQNGRDMYVDQELDINRLSDYDVDHIVPQSFLKDDSIDNKVLTRSDKARGKSDNVPSEEVVKKMKNYWRQLLNAKLITQRKFDNLTKAERGGLSELDKAGFIKRQLVETRQITKHVAQILDSRMNTKYDENDKLIREVKVITLKSKLVSDFRKDFQFYKVREINNYHHAHDAYLNAVVGTALIKKYPKLESEFVYGDYKVYDVRKMIAKSEQEIGKATAKYFFYSNIMNFFKTEITLANGEIRKRPLIETNGETGEIVWDKGRDFATVRKVLSMPQVNIVKKTEVQTGGFSKESILPKRNSDKLIARKKDWDPKKYGGFDSPTVAYSVLVVAKVEKGKSKKLKSVKELLGITIMERSSFEKNPIDFLEAKGYKEVKKDLIIKLPKYSLFELENGRKRMLASAGELQKGNELALPSKYVNFLYLASHYEKLKGSPEDNEQKQLFVEQHKHYLDEIIEQISEFSKRVILADANLDKVLSAYNKHRDKPIREQAENIIHLFTLTNLGAPAAFKYFDTTIDRKRYTSTKEVLDATLIHQSITGLYETRIDLSQLGGDGGPAPGGSGGGGGTLNIEDEYRLHETSKEPDVSLGSTWLSDFPQAWAETGGMGLAVRQAPLIIPLKATSTPVSIKQYPMSQEARLGIKPHIQRLLDQGILVPCQSPWNTPLLPVKKPGTNDYRPVQDLREVNKRVEDIHPTVPNPYNLLSGLPPSHQWYTVLDLKDAFFCLRLHPTSQPLFAFEWRDPEMGISGQLTWTRLPQGFKNSPTLFNEALHRDLADFRIQHPDLILLQYVDDLLLAATSELDCQQGTRALLQTLGNLGYRASAKKAQICQKQVKYLGYLLKEGQRWLTEARKETVMGQPTPKTPRQLREFLGKAGFCRLFIPGFAEMAAPLYPLTKPGTLFNWGPDQQKAYQEIKQALLTAPALGLPDLTKPFELFVDEKQGYAKGVLTQKLGPWRRPVAYLSKKLDPVAAGWPPCLRMVAAIAVLTKDAGKLTMGQPLVILAPHAVEALVKQPPDRWLSNARMTHYQALLLDTDRVQFGPVVALNPATLLPLPEEGLQHNCLDILAEAHGTRPDLTDQPLPDADHTWYTDGSSLLQEGQRKAGAAVTTETEVIWAKALPAGTSAQRAELIALTQALKMAEGKKLNVYTDSRYAFATAHIHGEIYRRRGWLTSEGKEIKNKDEILALLKALFLPKRLSIIHCPGHQKGHSAEARGNRMADQAARKAAITETPDTSTLLIENSSPSGGSKRTADGSEFEAGKRTADGSEFEKRTADGSEFESPKKKAKVE

SEQ ID NO: 2650 - protein, 2114 aa, synthetic construct
MPAAKRVKLDGGDKKYSIGLDIGTNSVGWAVITDEYKVPSKKFKVLGNTDRHSIKKNLIGALLFDSGETAEATRLKRTARRRYTRRKNRICYLQEIFSNEMAKVDDSFFHRLEESFLVEEDKKHERHPIFGNIVDEVAYHEKYPTIYHLRKKLVDSTDKADLRLIYLALAHMIKFRGHFLIEGDLNPDNSDVDKLFIQLVQTYNQLFEENPINASGVDAKAILSARLSKSRRLENLIAQLPGEKKNGLFGNLIALSLGLTPNFKSNFDLAEDAKLQLSKDTYDDDLDNLLAQIGDQYADLFLAAKNLSDAILLSDILRVNTEITKAPLSASMIKRYDEHHQDLTLLKALVRQQLPEKYKEIFFDQSKNGYAGYIDGGASQEEFYKFIKPILEKMDGTEELLVKLNREDLLRKQRTFDNGSIPHQIHLGELHAILRRQEDFYPFLKDNREKIEKILTFRIPYYVGPLARGNSRFAWMTRKSEETITPWNFEEVVDKGASAQSFIERMTNFDKNLPNEKVLPKHSLLYEYFTVYNELTKVKYVTEGMRKPAFLSGEQKKAIVDLLFKTNRKVTVKQLKEDYFKKIECFDSVEISGVEDRFNASLGTYHDLLKIIKDKDFLDNEENEDILEDIVLTLTLFEDREMIEERLKTYAHLFDDKVMKQLKRRRYTGWGRLSRKLINGIRDKQSGKTILDFLKSDGFANRNFMQLIHDDSLTFKEDIQKAQVSGQGDSLHEHIANLAGSPAIKKGILQTVKVVDELVKVMGRHKPENIVIEMARENQTTQKGQKNSRERMKRIEEGIKELGSQILKEHPVENTQLQNEKLYLYYLQNGRDMYVDQELDINRLSDYDVDHIVPQSFLKDDSIDNKVLTRSDKARGKSDNVPSEEVVKKMKNYWRQLLNAKLITQRKFDNLTKAERGGLSELDKAGFIKRQLVETRQITKHVAQILDSRMNTKYDENDKLIREVKVITLKSKLVSDFRKDFQFYKVREINNYHHAHDAYLNAVVGTALIKKYPKLESEFVYGDYKVYDVRKMIAKSEQEIGKATAKYFFYSNIMNFFKTEITLANGEIRKRPLIETNGETGEIVWDKGRDFATVRKVLSMPQVNIVKKTEVQTGGFSKESILPKRNSDKLIARKKDWDPKKYGGFDSPTVAYSVLVVAKVEKGKSKKLKSVKELLGITIMERSSFEKNPIDFLEAKGYKEVKKDLIIKLPKYSLFELENGRKRMLASAGELQKGNELALPSKYVNFLYLASHYEKLKGSPEDNEQKQLFVEQHKHYLDEIIEQISEFSKRVILADANLDKVLSAYNKHRDKPIREQAENIIHLFTLTNLGAPAAFKYFDTTIDRKRYTSTKEVLDATLIHQSITGLYETRIDLSQLGGDGGPAPGGGGGSGGTLNIEDEYRLHETSKEPDVSLGSTWLSDFPQAWAETGGMGLAVRQAPLIIPLKATSTPVSIKQYPMSQEARLGIKPHIQRLLDQGILVPCQSPWNTPLLPVKKPGTNDYRPVQDLREVNKRVEDIHPTVPNPYNLLSGLPPSHQWYTVLDLKDAFFCLRLHPTSQPLFAFEWRDPEMGISGQLTWTRLPQGFKNSPTLFNEALHRDLADFRIQHPDLILLQYVDDLLLAATSELDCQQGTRALLQTLGNLGYRASAKKAQICQKQVKYLGYLLKEGQRWLTEARKETVMGQPTPKTPRQLREFLGKAGFCRLFIPGFAEMAAPLYPLTKPGTLFNWGPDQQKAYQEIKQALLTAPALGLPDLTKPFELFVDEKQGYAKGVLTQKLGPWRRPVAYLSKKLDPVAAGWPPCLRMVAAIAVLTKDAGKLTMGQPLVILAPHAVEALVKQPPDRWLSNARMTHYQALLLDTDRVQFGPVVALNPATLLPLPEEGLQHNCLDILAEAHGTRPDLTDQPLPDADHTWYTDGSSLLQEGQRKAGAAVTTETEVIWAKALPAGTSAQRAELIALTQALKMAEGKKLNVYTDSRYAFATAHIHGEIYRRRGWLTSEGKEIKNKDEILALLKALFLPKRLSIIHCPGHQKGHSAEARGNRMADQAARKAAITETPDTSTLLIENSSPSGGSKRTADGSEFEAGKRTADGSEFEKRTADGSEFESPKKKAKVE

SEQ ID NO: 2651 - protein, 2116 aa, synthetic construct
MPAAKRVKLDGGDKKYSIGLDIGTNSVGWAVITDEYKVPSKKFKVLGNTDRHSIKKNLIGALLFDSGETAEATRLKRTARRRYTRRKNRICYLQEIFSNEMAKVDDSFFHRLEESFLVEEDKKHERHPIFGNIVDEVAYHEKYPTIYHLRKKLVDSTDKADLRLIYLALAHMIKFRGHFLIEGDLNPDNSDVDKLFIQLVQTYNQLFEENPINASGVDAKAILSARLSKSRRLENLIAQLPGEKKNGLFGNLIALSLGLTPNFKSNFDLAEDAKLQLSKDTYDDDLDNLLAQIGDQYADLFLAAKNLSDAILLSDILRVNTEITKAPLSASMIKRYDEHHQDLTLLKALVRQQLPEKYKEIFFDQSKNGYAGYIDGGASQEEFYKFIKPILEKMDGTEELLVKLNREDLLRKQRTFDNGSIPHQIHLGELHAILRRQEDFYPFLKDNREKIEKILTFRIPYYVGPLARGNSRFAWMTRKSEETITPWNFEEVVDKGASAQSFIERMTNFDKNLPNEKVLPKHSLLYEYFTVYNELTKVKYVTEGMRKPAFLSGEQKKAIVDLLFKTNRKVTVKQLKEDYFKKIECFDSVEISGVEDRFNASLGTYHDLLKIIKDKDFLDNEENEDILEDIVLTLTLFEDREMIEERLKTYAHLFDDKVMKQLKRRRYTGWGRLSRKLINGIRDKQSGKTILDFLKSDGFANRNFMQLIHDDSLTFKEDIQKAQVSGQGDSLHEHIANLAGSPAIKKGILQTVKVVDELVKVMGRHKPENIVIEMARENQTTQKGQKNSRERMKRIEEGIKELGSQILKEHPVENTQLQNEKLYLYYLQNGRDMYVDQELDINRLSDYDVDHIVPQSFLKDDSIDNKVLTRSDKARGKSDNVPSEEVVKKMKNYWRQLLNAKLITQRKFDNLTKAERGGLSELDKAGFIKRQLVETRQITKHVAQILDSRMNTKYDENDKLIREVKVITLKSKLVSDFRKDFQFYKVREINNYHHAHDAYLNAVVGTALIKKYPKLESEFVYGDYKVYDVRKMIAKSEQEIGKATAKYFFYSNIMNFFKTEITLANGEIRKRPLIETNGETGEIVWDKGRDFATVRKVLSMPQVNIVKKTEVQTGGFSKESILPKRNSDKLIARKKDWDPKKYGGFDSPTVAYSVLVVAKVEKGKSKKLKSVKELLGITIMERSSFEKNPIDFLEAKGYKEVKKDLIIKLPKYSLFELENGRKRMLASAGELQKGNELALPSKYVNFLYLASHYEKLKGSPEDNEQKQLFVEQHKHYLDEIIEQISEFSKRVILADANLDKVLSAYNKHRDKPIREQAENIIHLFTLTNLGAPAAFKYFDTTIDRKRYTSTKEVLDATLIHQSITGLYETRIDLSQLGGDGGPAPGSSEAAAKGGTLNIEDEYRLHETSKEPDVSLGSTWLSDFPQAWAETGGMGLAVRQAPLIIPLKATSTPVSIKQYPMSQEARLGIKPHIQRLLDQGILVPCQSPWNTPLLPVKKPGTNDYRPVQDLREVNKRVEDIHPTVPNPYNLLSGLPPSHQWYTVLDLKDAFFCLRLHPTSQPLFAFEWRDPEMGISGQLTWTRLPQGFKNSPTLFNEALHRDLADFRIQHPDLILLQYVDDLLLAATSELDCQQGTRALLQTLGNLGYRASAKKAQICQKQVKYLGYLLKEGQRWLTEARKETVMGQPTPKTPRQLREFLGKAGFCRLFIPGFAEMAAPLYPLTKPGTLFNWGPDQQKAYQEIKQALLTAPALGLPDLTKPFELFVDEKQGYAKGVLTQKLGPWRRPVAYLSKKLDPVAAGWPPCLRMVAAIAVLTKDAGKLTMGQPLVILAPHAVEALVKQPPDRWLSNARMTHYQALLLDTDRVQFGPVVALNPATLLPLPEEGLQHNCLDILAEAHGTRPDLTDQPLPDADHTWYTDGSSLLQEGQRKAGAAVTTETEVIWAKALPAGTSAQRAELIALTQALKMAEGKKLNVYTDSRYAFATAHIHGEIYRRRGWLTSEGKEIKNKDEILALLKALFLPKRLSIIHCPGHQKGHSAEARGNRMADQAARKAAITETPDTSTLLIENSSPSGGSKRTADGSEFEAGKRTADGSEFEKRTADGSEFESPKKKAKVE

SEQ ID NO: 2652 - protein, 2116 aa, synthetic construct
MPAAKRVKLDGGDKKYSIGLDIGTNSVGWAVITDEYKVPSKKFKVLGNTDRHSIKKNLIGALLFDSGETAEATRLKRTARRRYTRRKNRICYLQEIFSNEMAKVDDSFFHRLEESFLVEEDKKHERHPIFGNIVDEVAYHEKYPTIYHLRKKLVDSTDKADLRLIYLALAHMIKFRGHFLIEGDLNPDNSDVDKLFIQLVQTYNQLFEENPINASGVDAKAILSARLSKSRRLENLIAQLPGEKKNGLFGNLIALSLGLTPNFKSNFDLAEDAKLQLSKDTYDDDLDNLLAQIGDQYADLFLAAKNLSDAILLSDILRVNTEITKAPLSASMIKRYDEHHQDLTLLKALVRQQLPEKYKEIFFDQSKNGYAGYIDGGASQEEFYKFIKPILEKMDGTEELLVKLNREDLLRKQRTFDNGSIPHQIHLGELHAILRRQEDFYPFLKDNREKIEKILTFRIPYYVGPLARGNSRFAWMTRKSEETITPWNFEEVVDKGASAQSFIERMTNFDKNLPNEKVLPKHSLLYEYFTVYNELTKVKYVTEGMRKPAFLSGEQKKAIVDLLFKTNRKVTVKQLKEDYFKKIECFDSVEISGVEDRFNASLGTYHDLLKIIKDKDFLDNEENEDILEDIVLTLTLFEDREMIEERLKTYAHLFDDKVMKQLKRRRYTGWGRLSRKLINGIRDKQSGKTILDFLKSDGFANRNFMQLIHDDSLTFKEDIQKAQVSGQGDSLHEHIANLAGSPAIKKGILQTVKVVDELVKVMGRHKPENIVIEMARENQTTQKGQKNSRERMKRIEEGIKELGSQILKEHPVENTQLQNEKLYLYYLQNGRDMYVDQELDINRLSDYDVDHIVPQSFLKDDSIDNKVLTRSDKARGKSDNVPSEEVVKKMKNYWRQLLNAKLITQRKFDNLTKAERGGLSELDKAGFIKRQLVETRQITKHVAQILDSRMNTKYDENDKLIREVKVITLKSKLVSDFRKDFQFYKVREINNYHHAHDAYLNAVVGTALIKKYPKLESEFVYGDYKVYDVRKMIAKSEQEIGKATAKYFFYSNIMNFFKTEITLANGEIRKRPLIETNGETGEIVWDKGRDFATVRKVLSMPQVNIVKKTEVQTGGFSKESILPKRNSDKLIARKKDWDPKKYGGFDSPTVAYSVLVVAKVEKGKSKKLKSVKELLGITIMERSSFEKNPIDFLEAKGYKEVKKDLIIKLPKYSLFELENGRKRMLASAGELQKGNELALPSKYVNFLYLASHYEKLKGSPEDNEQKQLFVEQHKHYLDEIIEQISEFSKRVILADANLDKVLSAYNKHRDKPIREQAENIIHLFTLTNLGAPAAFKYFDTTIDRKRYTSTKEVLDATLIHQSITGLYETRIDLSQLGGDGGGSSGGGEAAAKGGTLNIEDEYRLHETSKEPDVSLGSTWLSDFPQAWAETGGMGLAVRQAPLIIPLKATSTPVSIKQYPMSQEARLGIKPHIQRLLDQGILVPCQSPWNTPLLPVKKPGTNDYRPVQDLREVNKRVEDIHPTVPNPYNLLSGLPPSHQWYTVLDLKDAFFCLRLHPTSQPLFAFEWRDPEMGISGQLTWTRLPQGFKNSPTLFNEALHRDLADFRIQHPDLILLQYVDDLLLAATSELDCQQGTRALLQTLGNLGYRASAKKAQICQKQVKYLGYLLKEGQRWLTEARKETVMGQPTPKTPRQLREFLGKAGFCRLFIPGFAEMAAPLYPLTKPGTLFNWGPDQQKAYQEIKQALLTAPALGLPDLTKPFELFVDEKQGYAKGVLTQKLGPWRRPVAYLSKKLDPVAAGWPPCLRMVAAIAVLTKDAGKLTMGQPLVILAPHAVEALVKQPPDRWLSNARMTHYQALLLDTDRVQFGPVVALNPATLLPLPEEGLQHNCLDILAEAHGTRPDLTDQPLPDADHTWYTDGSSLLQEGQRKAGAAVTTETEVIWAKALPAGTSAQRAELIALTQALKMAEGKKLNVYTDSRYAFATAHIHGEIYRRRGWLTSEGKEIKNKDEILALLKALFLPKRLSIIHCPGHQKGHSAEARGNRMADQAARKAAITETPDTSTLLIENSSPSGGSKRTADGSEFEAGKRTADGSEFEKRTADGSEFESPKKKAKVE

SEQ ID NO: 2653 - protein, 2111 aa, synthetic construct
MPAAKRVKLDGGDKKYSIGLDIGTNSVGWAVITDEYKVPSKKFKVLGNTDRHSIKKNLIGALLFDSGETAEATRLKRTARRRYTRRKNRICYLQEIFSNEMAKVDDSFFHRLEESFLVEEDKKHERHPIFGNIVDEVAYHEKYPTIYHLRKKLVDSTDKADLRLIYLALAHMIKFRGHFLIEGDLNPDNSDVDKLFIQLVQTYNQLFEENPINASGVDAKAILSARLSKSRRLENLIAQLPGEKKNGLFGNLIALSLGLTPNFKSNFDLAEDAKLQLSKDTYDDDLDNLLAQIGDQYADLFLAAKNLSDAILLSDILRVNTEITKAPLSASMIKRYDEHHQDLTLLKALVRQQLPEKYKEIFFDQSKNGYAGYIDGGASQEEFYKFIKPILEKMDGTEELLVKLNREDLLRKQRTFDNGSIPHQIHLGELHAILRRQEDFYPFLKDNREKIEKILTFRIPYYVGPLARGNSRFAWMTRKSEETITPWNFEEVVDKGASAQSFIERMTNFDKNLPNEKVLPKHSLLYEYFTVYNELTKVKYVTEGMRKPAFLSGEQKKAIVDLLFKTNRKVTVKQLKEDYFKKIECFDSVEISGVEDRFNASLGTYHDLLKIIKDKDFLDNEENEDILEDIVLTLTLFEDREMIEERLKTYAHLFDDKVMKQLKRRRYTGWGRLSRKLINGIRDKQSGKTILDFLKSDGFANRNFMQLIHDDSLTFKEDIQKAQVSGQGDSLHEHIANLAGSPAIKKGILQTVKVVDELVKVMGRHKPENIVIEMARENQTTQKGQKNSRERMKRIEEGIKELGSQILKEHPVENTQLQNEKLYLYYLQNGRDMYVDQELDINRLSDYDVDHIVPQSFLKDDSIDNKVLTRSDKARGKSDNVPSEEVVKKMKNYWRQLLNAKLITQRKFDNLTKAERGGLSELDKAGFIKRQLVETRQITKHVAQILDSRMNTKYDENDKLIREVKVITLKSKLVSDFRKDFQFYKVREINNYHHAHDAYLNAVVGTALIKKYPKLESEFVYGDYKVYDVRKMIAKSEQEIGKATAKYFFYSNIMNFFKTEITLANGEIRKRPLIETNGETGEIVWDKGRDFATVRKVLSMPQVNIVKKTEVQTGGFSKESILPKRNSDKLIARKKDWDPKKYGGFDSPTVAYSVLVVAKVEKGKSKKLKSVKELLGITIMERSSFEKNPIDFLEAKGYKEVKKDLIIKLPKYSLFELENGRKRMLASAGELQKGNELALPSKYVNFLYLASHYEKLKGSPEDNEQKQLFVEQHKHYLDEIIEQISEFSKRVILADANLDKVLSAYNKHRDKPIREQAENIIHLFTLTNLGAPAAFKYFDTTIDRKRYTSTKEVLDATLIHQSITGLYETRIDLSQLGGDGGGGSGGGGGTLNIEDEYRLHETSKEPDVSLGSTWLSDFPQAWAETGGMGLAVRQAPLIIPLKATSTPVSIKQYPMSQEARLGIKPHIQRLLDQGILVPCQSPWNTPLLPVKKPGTNDYRPVQDLREVNKRVEDIHPTVPNPYNLLSGLPPSHQWYTVLDLKDAFFCLRLHPTSQPLFAFEWRDPEMGISGQLTWTRLPQGFKNSPTLFNEALHRDLADFRIQHPDLILLQYVDDLLLAATSELDCQQGTRALLQTLGNLGYRASAKKAQICQKQVKYLGYLLKEGQRWLTEARKETVMGQPTPKTPRQLREFLGKAGFCRLFIPGFAEMAAPLYPLTKPGTLFNWGPDQQKAYQEIKQALLTAPALGLPDLTKPFELFVDEKQGYAKGVLTQKLGPWRRPVAYLSKKLDPVAAGWPPCLRMVAAIAVLTKDAGKLTMGQPLVILAPHAVEALVKQPPDRWLSNARMTHYQALLLDTDRVQFGPVVALNPATLLPLPEEGLQHNCLDILAEAHGTRPDLTDQPLPDADHTWYTDGSSLLQEGQRKAGAAVTTETEVIWAKALPAGTSAQRAELIALTQALKMAEGKKLNVYTDSRYAFATAHIHGEIYRRRGWLTSEGKEIKNKDEILALLKALFLPKRLSIIHCPGHQKGHSAEARGNRMADQAARKAAITETPDTSTLLIENSSPSGGSKRTADGSEFEAGKRTADGSEFEKRTADGSEFESPKKKAKVE

SEQ ID NO: 2654 - protein, 2116 aa, synthetic construct
MPAAKRVKLDGGDKKYSIGLDIGTNSVGWAVITDEYKVPSKKFKVLGNTDRHSIKKNLIGALLFDSGETAEATRLKRTARRRYTRRKNRICYLQEIFSNEMAKVDDSFFHRLEESFLVEEDKKHERHPIFGNIVDEVAYHEKYPTIYHLRKKLVDSTDKADLRLIYLALAHMIKFRGHFLIEGDLNPDNSDVDKLFIQLVQTYNQLFEENPINASGVDAKAILSARLSKSRRLENLIAQLPGEKKNGLFGNLIALSLGLTPNFKSNFDLAEDAKLQLSKDTYDDDLDNLLAQIGDQYADLFLAAKNLSDAILLSDILRVNTEITKAPLSASMIKRYDEHHQDLTLLKALVRQQLPEKYKEIFFDQSKNGYAGYIDGGASQEEFYKFIKPILEKMDGTEELLVKLNREDLLRKQRTFDNGSIPHQIHLGELHAILRRQEDFYPFLKDNREKIEKILTFRIPYYVGPLARGNSRFAWMTRKSEETITPWNFEEVVDKGASAQSFIERMTNFDKNLPNEKVLPKHSLLYEYFTVYNELTKVKYVTEGMRKPAFLSGEQKKAIVDLLFKTNRKVTVKQLKEDYFKKIECFDSVEISGVEDRFNASLGTYHDLLKIIKDKDFLDNEENEDILEDIVLTLTLFEDREMIEERLKTYAHLFDDKVMKQLKRRRYTGWGRLSRKLINGIRDKQSGKTILDFLKSDGFANRNFMQLIHDDSLTFKEDIQKAQVSGQGDSLHEHIANLAGSPAIKKGILQTVKVVDELVKVMGRHKPENIVIEMARENQTTQKGQKNSRERMKRIEEGIKELGSQILKEHPVENTQLQNEKLYLYYLQNGRDMYVDQELDINRLSDYDVDHIVPQSFLKDDSIDNKVLTRSDKARGKSDNVPSEEVVKKMKNYWRQLLNAKLITQRKFDNLTKAERGGLSELDKAGFIKRQLVETRQITKHVAQILDSRMNTKYDENDKLIREVKVITLKSKLVSDFRKDFQFYKVREINNYHHAHDAYLNAVVGTALIKKYPKLESEFVYGDYKVYDVRKMIAKSEQEIGKATAKYFFYSNIMNFFKTEITLANGEIRKRPLIETNGETGEIVWDKGRDFATVRKVLSMPQVNIVKKTEVQTGGFSKESILPKRNSDKLIARKKDWDPKKYGGFDSPTVAYSVLVVAKVEKGKSKKLKSVKELLGITIMERSSFEKNPIDFLEAKGYKEVKKDLIIKLPKYSLFELENGRKRMLASAGELQKGNELALPSKYVNFLYLASHYEKLKGSPEDNEQKQLFVEQHKHYLDEIIEQISEFSKRVILADANLDKVLSAYNKHRDKPIREQAENIIHLFTLTNLGAPAAFKYFDTTIDRKRYTSTKEVLDATLIHQSITGLYETRIDLSQLGGDGGEAAAKGGSPAPGGTLNIEDEYRLHETSKEPDVSLGSTWLSDFPQAWAETGGMGLAVRQAPLIIPLKATSTPVSIKQYPMSQEARLGIKPHIQRLLDQGILVPCQSPWNTPLLPVKKPGTNDYRPVQDLREVNKRVEDIHPTVPNPYNLLSGLPPSHQWYTVLDLKDAFFCLRLHPTSQPLFAFEWRDPEMGISGQLTWTRLPQGFKNSPTLFNEALHRDLADFRIQHPDLILLQYVDDLLLAATSELDCQQGTRALLQTLGNLGYRASAKKAQICQKQVKYLGYLLKEGQRWLTEARKETVMGQPTPKTPRQLREFLGKAGFCRLFIPGFAEMAAPLYPLTKPGTLFNWGPDQQKAYQEIKQALLTAPALGLPDLTKPFELFVDEKQGYAKGVLTQKLGPWRRPVAYLSKKLDPVAAGWPPCLRMVAAIAVLTKDAGKLTMGQPLVILAPHAVEALVKQPPDRWLSNARMTHYQALLLDTDRVQFGPVVALNPATLLPLPEEGLQHNCLDILAEAHGTRPDLTDQPLPDADHTWYTDGSSLLQEGQRKAGAAVTTETEVIWAKALPAGTSAQRAELIALTQALKMAEGKKLNVYTDSRYAFATAHIHGEIYRRRGWLTSEGKEIKNKDEILALLKALFLPKRLSIIHCPGHQKGHSAEARGNRMADQAARKAAITETPDTSTLLIENSSPSGGSKRTADGSEFEAGKRTADGSEFEKRTADGSEFESPKKKAKVE

SEQ ID NO: 2655 - protein, 2108 aa, synthetic construct
MPAAKRVKLDGGDKKYSIGLDIGTNSVGWAVITDEYKVPSKKFKVLGNTDRHSIKKNLIGALLFDSGETAEATRLKRTARRRYTRRKNRICYLQEIFSNEMAKVDDSFFHRLEESFLVEEDKKHERHPIFGNIVDEVAYHEKYPTIYHLRKKLVDSTDKADLRLIYLALAHMIKFRGHFLIEGDLNPDNSDVDKLFIQLVQTYNQLFEENPINASGVDAKAILSARLSKSRRLENLIAQLPGEKKNGLFGNLIALSLGLTPNFKSNFDLAEDAKLQLSKDTYDDDLDNLLAQIGDQYADLFLAAKNLSDAILLSDILRVNTEITKAPLSASMIKRYDEHHQDLTLLKALVRQQLPEKYKEIFFDQSKNGYAGYIDGGASQEEFYKFIKPILEKMDGTEELLVKLNREDLLRKQRTFDNGSIPHQIHLGELHAILRRQEDFYPFLKDNREKIEKILTFRIPYYVGPLARGNSRFAWMTRKSEETITPWNFEEVVDKGASAQSFIERMTNFDKNLPNEKVLPKHSLLYEYFTVYNELTKVKYVTEGMRKPAFLSGEQKKAIVDLLFKTNRKVTVKQLKEDYFKKIECFDSVEISGVEDRFNASLGTYHDLLKIIKDKDFLDNEENEDILEDIVLTLTLFEDREMIEERLKTYAHLFDDKVMKQLKRRRYTGWGRLSRKLINGIRDKQSGKTILDFLKSDGFANRNFMQLIHDDSLTFKEDIQKAQVSGQGDSLHEHIANLAGSPAIKKGILQTVKVVDELVKVMGRHKPENIVIEMARENQTTQKGQKNSRERMKRIEEGIKELGSQILKEHPVENTQLQNEKLYLYYLQNGRDMYVDQELDINRLSDYDVDHIVPQSFLKDDSIDNKVLTRSDKARGKSDNVPSEEVVKKMKNYWRQLLNAKLITQRKFDNLTKAERGGLSELDKAGFIKRQLVETRQITKHVAQILDSRMNTKYDENDKLIREVKVITLKSKLVSDFRKDFQFYKVREINNYHHAHDAYLNAVVGTALIKKYPKLESEFVYGDYKVYDVRKMIAKSEQEIGKATAKYFFYSNIMNFFKTEITLANGEIRKRPLIETNGETGEIVWDKGRDFATVRKVLSMPQVNIVKKTEVQTGGFSKESILPKRNSDKLIARKKDWDPKKYGGFDSPTVAYSVLVVAKVEKGKSKKLKSVKELLGITIMERSSFEKNPIDFLEAKGYKEVKKDLIIKLPKYSLFELENGRKRMLASAGELQKGNELALPSKYVNFLYLASHYEKLKGSPEDNEQKQLFVEQHKHYLDEIIEQISEFSKRVILADANLDKVLSAYNKHRDKPIREQAENIIHLFTLTNLGAPAAFKYFDTTIDRKRYTSTKEVLDATLIHQSITGLYETRIDLSQLGGDGGGSSGGTLNIEDEYRLHETSKEPDVSLGSTWLSDFPQAWAETGGMGLAVRQAPLIIPLKATSTPVSIKQYPMSQEARLGIKPHIQRLLDQGILVPCQSPWNTPLLPVKKPGTNDYRPVQDLREVNKRVEDIHPTVPNPYNLLSGLPPSHQWYTVLDLKDAFFCLRLHPTSQPLFAFEWRDPEMGISGQLTWTRLPQGFKNSPTLFNEALHRDLADFRIQHPDLILLQYVDDLLLAATSELDCQQGTRALLQTLGNLGYRASAKKAQICQKQVKYLGYLLKEGQRWLTEARKETVMGQPTPKTPRQLREFLGKAGFCRLFIPGFAEMAAPLYPLTKPGTLFNWGPDQQKAYQEIKQALLTAPALGLPDLTKPFELFVDEKQGYAKGVLTQKLGPWRRPVAYLSKKLDPVAAGWPPCLRMVAAIAVLTKDAGKLTMGQPLVILAPHAVEALVKQPPDRWLSNARMTHYQALLLDTDRVQFGPVVALNPATLLPLPEEGLQHNCLDILAEAHGTRPDLTDQPLPDADHTWYTDGSSLLQEGQRKAGAAVTTETEVIWAKALPAGTSAQRAELIALTQALKMAEGKKLNVYTDSRYAFATAHIHGEIYRRRGWLTSEGKEIKNKDEILALLKALFLPKRLSIIHCPGHQKGHSAEARGNRMADQAARKAAITETPDTSTLLIENSSPSGGSKRTADGSEFEAGKRTADGSEFEKRTADGSEFESPKKKAKVE

SEQ ID NO: 2656 - protein, 2114 aa, synthetic construct
MPAAKRVKLDGGDKKYSIGLDIGTNSVGWAVITDEYKVPSKKFKVLGNTDRHSIKKNLIGALLFDSGETAEATRLKRTARRRYTRRKNRICYLQEIFSNEMAKVDDSFFHRLEESFLVEEDKKHERHPIFGNIVDEVAYHEKYPTIYHLRKKLVDSTDKADLRLIYLALAHMIKFRGHFLIEGDLNPDNSDVDKLFIQLVQTYNQLFEENPINASGVDAKAILSARLSKSRRLENLIAQLPGEKKNGLFGNLIALSLGLTPNFKSNFDLAEDAKLQLSKDTYDDDLDNLLAQIGDQYADLFLAAKNLSDAILLSDILRVNTEITKAPLSASMIKRYDEHHQDLTLLKALVRQQLPEKYKEIFFDQSKNGYAGYIDGGASQEEFYKFIKPILEKMDGTEELLVKLNREDLLRKQRTFDNGSIPHQIHLGELHAILRRQEDFYPFLKDNREKIEKILTFRIPYYVGPLARGNSRFAWMTRKSEETITPWNFEEVVDKGASAQSFIERMTNFDKNLPNEKVLPKHSLLYEYFTVYNELTKVKYVTEGMRKPAFLSGEQKKAIVDLLFKTNRKVTVKQLKEDYFKKIECFDSVEISGVEDRFNASLGTYHDLLKIIKDKDFLDNEENEDILEDIVLTLTLFEDREMIEERLKTYAHLFDDKVMKQLKRRRYTGWGRLSRKLINGIRDKQSGKTILDFLKSDGFANRNFMQLIHDDSLTFKEDIQKAQVSGQGDSLHEHIANLAGSPAIKKGILQTVKVVDELVKVMGRHKPENIVIEMARENQTTQKGQKNSRERMKRIEEGIKELGSQILKEHPVENTQLQNEKLYLYYLQNGRDMYVDQELDINRLSDYDVDHIVPQSFLKDDSIDNKVLTRSDKARGKSDNVPSEEVVKKMKNYWRQLLNAKLITQRKFDNLTKAERGGLSELDKAGFIKRQLVETRQITKHVAQILDSRMNTKYDENDKLIREVKVITLKSKLVSDFRKDFQFYKVREINNYHHAHDAYLNAVVGTALIKKYPKLESEFVYGDYKVYDVRKMIAKSEQEIGKATAKYFFYSNIMNFFKTEITLANGEIRKRPLIETNGETGEIVWDKGRDFATVRKVLSMPQVNIVKKTEVQTGGFSKESILPKRNSDKLIARKKDWDPKKYGGFDSPTVAYSVLVVAKVEKGKSKKLKSVKELLGITIMERSSFEKNPIDFLEAKGYKEVKKDLIIKLPKYSLFELENGRKRMLASAGELQKGNELALPSKYVNFLYLASHYEKLKGSPEDNEQKQLFVEQHKHYLDEIIEQISEFSKRVILADANLDKVLSAYNKHRDKPIREQAENIIHLFTLTNLGAPAAFKYFDTTIDRKRYTSTKEVLDATLIHQSITGLYETRIDLSQLGGDGGPAPAPAPAPGGTLNIEDEYRLHETSKEPDVSLGSTWLSDFPQAWAETGGMGLAVRQAPLIIPLKATSTPVSIKQYPMSQEARLGIKPHIQRLLDQGILVPCQSPWNTPLLPVKKPGTNDYRPVQDLREVNKRVEDIHPTVPNPYNLLSGLPPSHQWYTVLDLKDAFFCLRLHPTSQPLFAFEWRDPEMGISGQLTWTRLPQGFKNSPTLFNEALHRDLADFRIQHPDLILLQYVDDLLLAATSELDCQQGTRALLQTLGNLGYRASAKKAQICQKQVKYLGYLLKEGQRWLTEARKETVMGQPTPKTPRQLREFLGKAGFCRLFIPGFAEMAAPLYPLTKPGTLFNWGPDQQKAYQEIKQALLTAPALGLPDLTKPFELFVDEKQGYAKGVLTQKLGPWRRPVAYLSKKLDPVAAGWPPCLRMVAAIAVLTKDAGKLTMGQPLVILAPHAVEALVKQPPDRWLSNARMTHYQALLLDTDRVQFGPVVALNPATLLPLPEEGLQHNCLDILAEAHGTRPDLTDQPLPDADHTWYTDGSSLLQEGQRKAGAAVTTETEVIWAKALPAGTSAQRAELIALTQALKMAEGKKLNVYTDSRYAFATAHIHGEIYRRRGWLTSEGKEIKNKDEILALLKALFLPKRLSIIHCPGHQKGHSAEARGNRMADQAARKAAITETPDTSTLLIENSSPSGGSKRTADGSEFEAGKRTADGSEFEKRTADGSEFESPKKKAKVE

SEQ ID NO: 2657 - protein, 2113 aa, synthetic construct
MPAAKRVKLDGGDKKYSIGLDIGTNSVGWAVITDEYKVPSKKFKVLGNTDRHSIKKNLIGALLFDSGETAEATRLKRTARRRYTRRKNRICYLQEIFSNEMAKVDDSFFHRLEESFLVEEDKKHERHPIFGNIVDEVAYHEKYPTIYHLRKKLVDSTDKADLRLIYLALAHMIKFRGHFLIEGDLNPDNSDVDKLFIQLVQTYNQLFEENPINASGVDAKAILSARLSKSRRLENLIAQLPGEKKNGLFGNLIALSLGLTPNFKSNFDLAEDAKLQLSKDTYDDDLDNLLAQIGDQYADLFLAAKNLSDAILLSDILRVNTEITKAPLSASMIKRYDEHHQDLTLLKALVRQQLPEKYKEIFFDQSKNGYAGYIDGGASQEEFYKFIKPILEKMDGTEELLVKLNREDLLRKQRTFDNGSIPHQIHLGELHAILRRQEDFYPFLKDNREKIEKILTFRIPYYVGPLARGNSRFAWMTRKSEETITPWNFEEVVDKGASAQSFIERMTNFDKNLPNEKVLPKHSLLYEYFTVYNELTKVKYVTEGMRKPAFLSGEQKKAIVDLLFKTNRKVTVKQLKEDYFKKIECFDSVEISGVEDRFNASLGTYHDLLKIIKDKDFLDNEENEDILEDIVLTLTLFEDREMIEERLKTYAHLFDDKVMKQLKRRRYTGWGRLSRKLINGIRDKQSGKTILDFLKSDGFANRNFMQLIHDDSLTFKEDIQKAQVSGQGDSLHEHIANLAGSPAIKKGILQTVKVVDELVKVMGRHKPENIVIEMARENQTTQKGQKNSRERMKRIEEGIKELGSQILKEHPVENTQLQNEKLYLYYLQNGRDMYVDQELDINRLSDYDVDHIVPQSFLKDDSIDNKVLTRSDKARGKSDNVPSEEVVKKMKNYWRQLLNAKLITQRKFDNLTKAERGGLSELDKAGFIKRQLVETRQITKHVAQILDSRMNTKYDENDKLIREVKVITLKSKLVSDFRKDFQFYKVREINNYHHAHDAYLNAVVGTALIKKYPKLESEFVYGDYKVYDVRKMIAKSEQEIGKATAKYFFYSNIMNFFKTEITLANGEIRKRPLIETNGETGEIVWDKGRDFATVRKVLSMPQVNIVKKTEVQTGGFSKESILPKRNSDKLIARKKDWDPKKYGGFDSPTVAYSVLVVAKVEKGKSKKLKSVKELLGITIMERSSFEKNPIDFLEAKGYKEVKKDLIIKLPKYSLFELENGRKRMLASAGELQKGNELALPSKYVNFLYLASHYEKLKGSPEDNEQKQLFVEQHKHYLDEIIEQISEFSKRVILADANLDKVLSAYNKHRDKPIREQAENIIHLFTLTNLGAPAAFKYFDTTIDRKRYTSTKEVLDATLIHQSITGLYETRIDLSQLGGDGGEAAAKGGSGGTLNIEDEYRLHETSKEPDVSLGSTWLSDFPQAWAETGGMGLAVRQAPLIIPLKATSTPVSIKQYPMSQEARLGIKPHIQRLLDQGILVPCQSPWNTPLLPVKKPGTNDYRPVQDLREVNKRVEDIHPTVPNPYNLLSGLPPSHQWYTVLDLKDAFFCLRLHPTSQPLFAFEWRDPEMGISGQLTWTRLPQGFKNSPTLFNEALHRDLADFRIQHPDLILLQYVDDLLLAATSELDCQQGTRALLQTLGNLGYRASAKKAQICQKQVKYLGYLLKEGQRWLTEARKETVMGQPTPKTPRQLREFLGKAGFCRLFIPGFAEMAAPLYPLTKPGTLFNWGPDQQKAYQEIKQALLTAPALGLPDLTKPFELFVDEKQGYAKGVLTQKLGPWRRPVAYLSKKLDPVAAGWPPCLRMVAAIAVLTKDAGKLTMGQPLVILAPHAVEALVKQPPDRWLSNARMTHYQALLLDTDRVQFGPVVALNPATLLPLPEEGLQHNCLDILAEAHGTRPDLTDQPLPDADHTWYTDGSSLLQEGQRKAGAAVTTETEVIWAKALPAGTSAQRAELIALTQALKMAEGKKLNVYTDSRYAFATAHIHGEIYRRRGWLTSEGKEIKNKDEILALLKALFLPKRLSIIHCPGHQKGHSAEARGNRMADQAARKAAITETPDTSTLLIENSSPSGGSKRTADGSEFEAGKRTADGSEFEKRTADGSEFESPKKKAKVE

SEQ ID NO: 2658 - protein, 2116 aa, synthetic construct
MPAAKRVKLDGGDKKYSIGLDIGTNSVGWAVITDEYKVPSKKFKVLGNTDRHSIKKNLIGALLFDSGETAEATRLKRTARRRYTRRKNRICYLQEIFSNEMAKVDDSFFHRLEESFLVEEDKKHERHPIFGNIVDEVAYHEKYPTIYHLRKKLVDSTDKADLRLIYLALAHMIKFRGHFLIEGDLNPDNSDVDKLFIQLVQTYNQLFEENPINASGVDAKAILSARLSKSRRLENLIAQLPGEKKNGLFGNLIALSLGLTPNFKSNFDLAEDAKLQLSKDTYDDDLDNLLAQIGDQYADLFLAAKNLSDAILLSDILRVNTEITKAPLSASMIKRYDEHHQDLTLLKALVRQQLPEKYKEIFFDQSKNGYAGYIDGGASQEEFYKFIKPILEKMDGTEELLVKLNREDLLRKQRTFDNGSIPHQIHLGELHAILRRQEDFYPFLKDNREKIEKILTFRIPYYVGPLARGNSRFAWMTRKSEETITPWNFEEVVDKGASAQSFIERMTNFDKNLPNEKVLPKHSLLYEYFTVYNELTKVKYVTEGMRKPAFLSGEQKKAIVDLLFKTNRKVTVKQLKEDYFKKIECFDSVEISGVEDRFNASLGTYHDLLKIIKDKDFLDNEENEDILEDIVLTLTLFEDREMIEERLKTYAHLFDDKVMKQLKRRRYTGWGRLSRKLINGIRDKQSGKTILDFLKSDGFANRNFMQLIHDDSLTFKEDIQKAQVSGQGDSLHEHIANLAGSPAIKKGILQTVKVVDELVKVMGRHKPENIVIEMARENQTTQKGQKNSRERMKRIEEGIKELGSQILKEHPVENTQLQNEKLYLYYLQNGRDMYVDQELDINRLSDYDVDHIVPQSFLKDDSIDNKVLTRSDKARGKSDNVPSEEVVKKMKNYWRQLLNAKLITQRKFDNLTKAERGGLSELDKAGFIKRQLVETRQITKHVAQILDSRMNTKYDENDKLIREVKVITLKSKLVSDFRKDFQFYKVREINNYHHAHDAYLNAVVGTALIKKYPKLESEFVYGDYKVYDVRKMIAKSEQEIGKATAKYFFYSNIMNFFKTEITLANGEIRKRPLIETNGETGEIVWDKGRDFATVRKVLSMPQVNIVKKTEVQTGGFSKESILPKRNSDKLIARKKDWDPKKYGGFDSPTVAYSVLVVAKVEKGKSKKLKSVKELLGITIMERSSFEKNPIDFLEAKGYKEVKKDLIIKLPKYSLFELENGRKRMLASAGELQKGNELALPSKYVNFLYLASHYEKLKGSPEDNEQKQLFVEQHKHYLDEIIEQISEFSKRVILADANLDKVLSAYNKHRDKPIREQAENIIHLFTLTNLGAPAAFKYFDTTIDRKRYTSTKEVLDATLIHQSITGLYETRIDLSQLGGDGGEAAAKGSSPAPGGTLNIEDEYRLHETSKEPDVSLGSTWLSDFPQAWAETGGMGLAVRQAPLIIPLKATSTPVSIKQYPMSQEARLGIKPHIQRLLDQGILVPCQSPWNTPLLPVKKPGTNDYRPVQDLREVNKRVEDIHPTVPNPYNLLSGLPPSHQWYTVLDLKDAFFCLRLHPTSQPLFAFEWRDPEMGISGQLTWTRLPQGFKNSPTLFNEALHRDLADFRIQHPDLILLQYVDDLLLAATSELDCQQGTRALLQTLGNLGYRASAKKAQICQKQVKYLGYLLKEGQRWLTEARKETVMGQPTPKTPRQLREFLGKAGFCRLFIPGFAEMAAPLYPLTKPGTLFNWGPDQQKAYQEIKQALLTAPALGLPDLTKPFELFVDEKQGYAKGVLTQKLGPWRRPVAYLSKKLDPVAAGWPPCLRMVAAIAVLTKDAGKLTMGQPLVILAPHAVEALVKQPPDRWLSNARMTHYQALLLDTDRVQFGPVVALNPATLLPLPEEGLQHNCLDILAEAHGTRPDLTDQPLPDADHTWYTDGSSLLQEGQRKAGAAVTTETEVIWAKALPAGTSAQRAELIALTQALKMAEGKKLNVYTDSRYAFATAHIHGEIYRRRGWLTSEGKEIKNKDEILALLKALFLPKRLSIIHCPGHQKGHSAEARGNRMADQAARKAAITETPDTSTLLIENSSPSGGSKRTADGSEFEAGKRTADGSEFEKRTADGSEFESPKKKAKVE

SEQ ID NO: 2659 - protein, 2113 aa, synthetic construct
MPAAKRVKLDGGDKKYSIGLDIGTNSVGWAVITDEYKVPSKKFKVLGNTDRHSIKKNLIGALLFDSGETAEATRLKRTARRRYTRRKNRICYLQEIFSNEMAKVDDSFFHRLEESFLVEEDKKHERHPIFGNIVDEVAYHEKYPTIYHLRKKLVDSTDKADLRLIYLALAHMIKFRGHFLIEGDLNPDNSDVDKLFIQLVQTYNQLFEENPINASGVDAKAILSARLSKSRRLENLIAQLPGEKKNGLFGNLIALSLGLTPNFKSNFDLAEDAKLQLSKDTYDDDLDNLLAQIGDQYADLFLAAKNLSDAILLSDILRVNTEITKAPLSASMIKRYDEHHQDLTLLKALVRQQLPEKYKEIFFDQSKNGYAGYIDGGASQEEFYKFIKPILEKMDGTEELLVKLNREDLLRKQRTFDNGSIPHQIHLGELHAILRRQEDFYPFLKDNREKIEKILTFRIPYYVGPLARGNSRFAWMTRKSEETITPWNFEEVVDKGASAQSFIERMTNFDKNLPNEKVLPKHSLLYEYFTVYNELTKVKYVTEGMRKPAFLSGEQKKAIVDLLFKTNRKVTVKQLKEDYFKKIECFDSVEISGVEDRFNASLGTYHDLLKIIKDKDFLDNEENEDILEDIVLTLTLFEDREMIEERLKTYAHLFDDKVMKQLKRRRYTGWGRLSRKLINGIRDKQSGKTILDFLKSDGFANRNFMQLIHDDSLTFKEDIQKAQVSGQGDSLHEHIANLAGSPAIKKGILQTVKVVDELVKVMGRHKPENIVIEMARENQTTQKGQKNSRERMKRIEEGIKELGSQILKEHPVENTQLQNEKLYLYYLQNGRDMYVDQELDINRLSDYDVDHIVPQSFLKDDSIDNKVLTRSDKARGKSDNVPSEEVVKKMKNYWRQLLNAKLITQRKFDNLTKAERGGLSELDKAGFIKRQLVETRQITKHVAQILDSRMNTKYDENDKLIREVKVITLKSKLVSDFRKDFQFYKVREINNYHHAHDAYLNAVVGTALIKKYPKLESEFVYGDYKVYDVRKMIAKSEQEIGKATAKYFFYSNIMNFFKTEITLANGEIRKRPLIETNGETGEIVWDKGRDFATVRKVLSMPQVNIVKKTEVQTGGFSKESILPKRNSDKLIARKKDWDPKKYGGFDSPTVAYSVLVVAKVEKGKSKKLKSVKELLGITIMERSSFEKNPIDFLEAKGYKEVKKDLIIKLPKYSLFELENGRKRMLASAGELQKGNELALPSKYVNFLYLASHYEKLKGSPEDNEQKQLFVEQHKHYLDEIIEQISEFSKRVILADANLDKVLSAYNKHRDKPIREQAENIIHLFTLTNLGAPAAFKYFDTTIDRKRYTSTKEVLDATLIHQSITGLYETRIDLSQLGGDGGEAAAKGGGGGTLNIEDEYRLHETSKEPDVSLGSTWLSDFPQAWAETGGMGLAVRQAPLIIPLKATSTPVSIKQYPMSQEARLGIKPHIQRLLDQGILVPCQSPWNTPLLPVKKPGTNDYRPVQDLREVNKRVEDIHPTVPNPYNLLSGLPPSHQWYTVLDLKDAFFCLRLHPTSQPLFAFEWRDPEMGISGQLTWTRLPQGFKNSPTLFNEALHRDLADFRIQHPDLILLQYVDDLLLAATSELDCQQGTRALLQTLGNLGYRASAKKAQICQKQVKYLGYLLKEGQRWLTEARKETVMGQPTPKTPRQLREFLGKAGFCRLFIPGFAEMAAPLYPLTKPGTLFNWGPDQQKAYQEIKQALLTAPALGLPDLTKPFELFVDEKQGYAKGVLTQKLGPWRRPVAYLSKKLDPVAAGWPPCLRMVAAIAVLTKDAGKLTMGQPLVILAPHAVEALVKQPPDRWLSNARMTHYQALLLDTDRVQFGPVVALNPATLLPLPEEGLQHNCLDILAEAHGTRPDLTDQPLPDADHTWYTDGSSLLQEGQRKAGAAVTTETEVIWAKALPAGTSAQRAELIALTQALKMAEGKKLNVYTDSRYAFATAHIHGEIYRRRGWLTSEGKEIKNKDEILALLKALFLPKRLSIIHCPGHQKGHSAEARGNRMADQAARKAAITETPDTSTLLIENSSPSGGSKRTADGSEFEAGKRTADGSEFEKRTADGSEFESPKKKAKVE

SEQ ID NO: 2660 - protein, 2116 aa, synthetic construct
MPAAKRVKLDGGDKKYSIGLDIGTNSVGWAVITDEYKVPSKKFKVLGNTDRHSIKKNLIGALLFDSGETAEATRLKRTARRRYTRRKNRICYLQEIFSNEMAKVDDSFFHRLEESFLVEEDKKHERHPIFGNIVDEVAYHEKYPTIYHLRKKLVDSTDKADLRLIYLALAHMIKFRGHFLIEGDLNPDNSDVDKLFIQLVQTYNQLFEENPINASGVDAKAILSARLSKSRRLENLIAQLPGEKKNGLFGNLIALSLGLTPNFKSNFDLAEDAKLQLSKDTYDDDLDNLLAQIGDQYADLFLAAKNLSDAILLSDILRVNTEITKAPLSASMIKRYDEHHQDLTLLKALVRQQLPEKYKEIFFDQSKNGYAGYIDGGASQEEFYKFIKPILEKMDGTEELLVKLNREDLLRKQRTFDNGSIPHQIHLGELHAILRRQEDFYPFLKDNREKIEKILTFRIPYYVGPLARGNSRFAWMTRKSEETITPWNFEEVVDKGASAQSFIERMTNFDKNLPNEKVLPKHSLLYEYFTVYNELTKVKYVTEGMRKPAFLSGEQKKAIVDLLFKTNRKVTVKQLKEDYFKKIECFDSVEISGVEDRFNASLGTYHDLLKIIKDKDFLDNEENEDILEDIVLTLTLFEDREMIEERLKTYAHLFDDKVMKQLKRRRYTGWGRLSRKLINGIRDKQSGKTILDFLKSDGFANRNFMQLIHDDSLTFKEDIQKAQVSGQGDSLHEHIANLAGSPAIKKGILQTVKVVDELVKVMGRHKPENIVIEMARENQTTQKGQKNSRERMKRIEEGIKELGSQILKEHPVENTQLQNEKLYLYYLQNGRDMYVDQELDINRLSDYDVDHIVPQSFLKDDSIDNKVLTRSDKARGKSDNVPSEEVVKKMKNYWRQLLNAKLITQRKFDNLTKAERGGLSELDKAGFIKRQLVETRQITKHVAQILDSRMNTKYDENDKLIREVKVITLKSKLVSDFRKDFQFYKVREINNYHHAHDAYLNAVVGTALIKKYPKLESEFVYGDYKVYDVRKMIAKSEQEIGKATAKYFFYSNIMNFFKTEITLANGEIRKRPLIETNGETGEIVWDKGRDFATVRKVLSMPQVNIVKKTEVQTGGFSKESILPKRNSDKLIARKKDWDPKKYGGFDSPTVAYSVLVVAKVEKGKSKKLKSVKELLGITIMERSSFEKNPIDFLEAKGYKEVKKDLIIKLPKYSLFELENGRKRMLASAGELQKGNELALPSKYVNFLYLASHYEKLKGSPEDNEQKQLFVEQHKHYLDEIIEQISEFSKRVILADANLDKVLSAYNKHRDKPIREQAENIIHLFTLTNLGAPAAFKYFDTTIDRKRYTSTKEVLDATLIHQSITGLYETRIDLSQLGGDGGGGSGSSEAAAKGGTLNIEDEYRLHETSKEPDVSLGSTWLSDFPQAWAETGGMGLAVRQAPLIIPLKATSTPVSIKQYPMSQEARLGIKPHIQRLLDQGILVPCQSPWNTPLLPVKKPGTNDYRPVQDLREVNKRVEDIHPTVPNPYNLLSGLPPSHQWYTVLDLKDAFFCLRLHPTSQPLFAFEWRDPEMGISGQLTWTRLPQGFKNSPTLFNEALHRDLADFRIQHPDLILLQYVDDLLLAATSELDCQQGTRALLQTLGNLGYRASAKKAQICQKQVKYLGYLLKEGQRWLTEARKETVMGQPTPKTPRQLREFLGKAGFCRLFIPGFAEMAAPLYPLTKPGTLFNWGPDQQKAYQEIKQALLTAPALGLPDLTKPFELFVDEKQGYAKGVLTQKLGPWRRPVAYLSKKLDPVAAGWPPCLRMVAAIAVLTKDAGKLTMGQPLVILAPHAVEALVKQPPDRWLSNARMTHYQALLLDTDRVQFGPVVALNPATLLPLPEEGLQHNCLDILAEAHGTRPDLTDQPLPDADHTWYTDGSSLLQEGQRKAGAAVTTETEVIWAKALPAGTSAQRAELIALTQALKMAEGKKLNVYTDSRYAFATAHIHGEIYRRRGWLTSEGKEIKNKDEILALLKALFLPKRLSIIHCPGHQKGHSAEARGNRMADQAARKAAITETPDTSTLLIENSSPSGGSKRTADGSEFEAGKRTADGSEFEKRTADGSEFESPKKKAKVE

SEQ ID NO: 2661 - protein, 2116 aa, synthetic construct
MPAAKRVKLDGGDKKYSIGLDIGTNSVGWAVITDEYKVPSKKFKVLGNTDRHSIKKNLIGALLFDSGETAEATRLKRTARRRYTRRKNRICYLQEIFSNEMAKVDDSFFHRLEESFLVEEDKKHERHPIFGNIVDEVAYHEKYPTIYHLRKKLVDSTDKADLRLIYLALAHMIKFRGHFLIEGDLNPDNSDVDKLFIQLVQTYNQLFEENPINASGVDAKAILSARLSKSRRLENLIAQLPGEKKNGLFGNLIALSLGLTPNFKSNFDLAEDAKLQLSKDTYDDDLDNLLAQIGDQYADLFLAAKNLSDAILLSDILRVNTEITKAPLSASMIKRYDEHHQDLTLLKALVRQQLPEKYKEIFFDQSKNGYAGYIDGGASQEEFYKFIKPILEKMDGTEELLVKLNREDLLRKQRTFDNGSIPHQIHLGELHAILRRQEDFYPFLKDNREKIEKILTFRIPYYVGPLARGNSRFAWMTRKSEETITPWNFEEVVDKGASAQSFIERMTNFDKNLPNEKVLPKHSLLYEYFTVYNELTKVKYVTEGMRKPAFLSGEQKKAIVDLLFKTNRKVTVKQLKEDYFKKIECFDSVEISGVEDRFNASLGTYHDLLKIIKDKDFLDNEENEDILEDIVLTLTLFEDREMIEERLKTYAHLFDDKVMKQLKRRRYTGWGRLSRKLINGIRDKQSGKTILDFLKSDGFANRNFMQLIHDDSLTFKEDIQKAQVSGQGDSLHEHIANLAGSPAIKKGILQTVKVVDELVKVMGRHKPENIVIEMARENQTTQKGQKNSRERMKRIEEGIKELGSQILKEHPVENTQLQNEKLYLYYLQNGRDMYVDQELDINRLSDYDVDHIVPQSFLKDDSIDNKVLTRSDKARGKSDNVPSEEVVKKMKNYWRQLLNAKLITQRKFDNLTKAERGGLSELDKAGFIKRQLVETRQITKHVAQILDSRMNTKYDENDKLIREVKVITLKSKLVSDFRKDFQFYKVREINNYHHAHDAYLNAVVGTALIKKYPKLESEFVYGDYKVYDVRKMIAKSEQEIGKATAKYFFYSNIMNFFKTEITLANGEIRKRPLIETNGETGEIVWDKGRDFATVRKVLSMPQVNIVKKTEVQTGGFSKESILPKRNSDKLIARKKDWDPKKYGGFDSPTVAYSVLVVAKVEKGKSKKLKSVKELLGITIMERSSFEKNPIDFLEAKGYKEVKKDLIIKLPKYSLFELENGRKRMLASAGELQKGNELALPSKYVNFLYLASHYEKLKGSPEDNEQKQLFVEQHKHYLDEIIEQISEFSKRVILADANLDKVLSAYNKHRDKPIREQAENIIHLFTLTNLGAPAAFKYFDTTIDRKRYTSTKEVLDATLIHQSITGLYETRIDLSQLGGDGGGSSGGSEAAAKGGTLNIEDEYRLHETSKEPDVSLGSTWLSDFPQAWAETGGMGLAVRQAPLIIPLKATSTPVSIKQYPMSQEARLGIKPHIQRLLDQGILVPCQSPWNTPLLPVKKPGTNDYRPVQDLREVNKRVEDIHPTVPNPYNLLSGLPPSHQWYTVLDLKDAFFCLRLHPTSQPLFAFEWRDPEMGISGQLTWTRLPQGFKNSPTLFNEALHRDLADFRIQHPDLILLQYVDDLLLAATSELDCQQGTRALLQTLGNLGYRASAKKAQICQKQVKYLGYLLKEGQRWLTEARKETVMGQPTPKTPRQLREFLGKAGFCRLFIPGFAEMAAPLYPLTKPGTLFNWGPDQQKAYQEIKQALLTAPALGLPDLTKPFELFVDEKQGYAKGVLTQKLGPWRRPVAYLSKKLDPVAAGWPPCLRMVAAIAVLTKDAGKLTMGQPLVILAPHAVEALVKQPPDRWLSNARMTHYQALLLDTDRVQFGPVVALNPATLLPLPEEGLQHNCLDILAEAHGTRPDLTDQPLPDADHTWYTDGSSLLQEGQRKAGAAVTTETEVIWAKALPAGTSAQRAELIALTQALKMAEGKKLNVYTDSRYAFATAHIHGEIYRRRGWLTSEGKEIKNKDEILALLKALFLPKRLSIIHCPGHQKGHSAEARGNRMADQAARKAAITETPDTSTLLIENSSPSGGSKRTADGSEFEAGKRTADGSEFEKRTADGSEFESPKKKAKVE

SEQ ID NO: 2662 - protein, 2120 aa, synthetic construct
MPAAKRVKLDGGDKKYSIGLDIGTNSVGWAVITDEYKVPSKKFKVLGNTDRHSIKKNLIGALLFDSGETAEATRLKRTARRRYTRRKNRICYLQEIFSNEMAKVDDSFFHRLEESFLVEEDKKHERHPIFGNIVDEVAYHEKYPTIYHLRKKLVDSTDKADLRLIYLALAHMIKFRGHFLIEGDLNPDNSDVDKLFIQLVQTYNQLFEENPINASGVDAKAILSARLSKSRRLENLIAQLPGEKKNGLFGNLIALSLGLTPNFKSNFDLAEDAKLQLSKDTYDDDLDNLLAQIGDQYADLFLAAKNLSDAILLSDILRVNTEITKAPLSASMIKRYDEHHQDLTLLKALVRQQLPEKYKEIFFDQSKNGYAGYIDGGASQEEFYKFIKPILEKMDGTEELLVKLNREDLLRKQRTFDNGSIPHQIHLGELHAILRRQEDFYPFLKDNREKIEKILTFRIPYYVGPLARGNSRFAWMTRKSEETITPWNFEEVVDKGASAQSFIERMTNFDKNLPNEKVLPKHSLLYEYFTVYNELTKVKYVTEGMRKPAFLSGEQKKAIVDLLFKTNRKVTVKQLKEDYFKKIECFDSVEISGVEDRFNASLGTYHDLLKIIKDKDFLDNEENEDILEDIVLTLTLFEDREMIEERLKTYAHLFDDKVMKQLKRRRYTGWGRLSRKLINGIRDKQSGKTILDFLKSDGFANRNFMQLIHDDSLTFKEDIQKAQVSGQGDSLHEHIANLAGSPAIKKGILQTVKVVDELVKVMGRHKPENIVIEMARENQTTQKGQKNSRERMKRIEEGIKELGSQILKEHPVENTQLQNEKLYLYYLQNGRDMYVDQELDINRLSDYDVDHIVPQSFLKDDSIDNKVLTRSDKARGKSDNVPSEEVVKKMKNYWRQLLNAKLITQRKFDNLTKAERGGLSELDKAGFIKRQLVETRQITKHVAQILDSRMNTKYDENDKLIREVKVITLKSKLVSDFRKDFQFYKVREINNYHHAHDAYLNAVVGTALIKKYPKLESEFVYGDYKVYDVRKMIAKSEQEIGKATAKYFFYSNIMNFFKTEITLANGEIRKRPLIETNGETGEIVWDKGRDFATVRKVLSMPQVNIVKKTEVQTGGFSKESILPKRNSDKLIARKKDWDPKKYGGFDSPTVAYSVLVVAKVEKGKSKKLKSVKELLGITIMERSSFEKNPIDFLEAKGYKEVKKDLIIKLPKYSLFELENGRKRMLASAGELQKGNELALPSKYVNFLYLASHYEKLKGSPEDNEQKQLFVEQHKHYLDEIIEQISEFSKRVILADANLDKVLSAYNKHRDKPIREQAENIIHLFTLTNLGAPAAFKYFDTTIDRKRYTSTKEVLDATLIHQSITGLYETRIDLSQLGGDGGGGGGSGGGGSGGGGSGGTLNIEDEYRLHETSKEPDVSLGSTWLSDFPQAWAETGGMGLAVRQAPLIIPLKATSTPVSIKQYPMSQEARLGIKPHIQRLLDQGILVPCQSPWNTPLLPVKKPGTNDYRPVQDLREVNKRVEDIHPTVPNPYNLLSGLPPSHQWYTVLDLKDAFFCLRLHPTSQPLFAFEWRDPEMGISGQLTWTRLPQGFKNSPTLFNEALHRDLADFRIQHPDLILLQYVDDLLLAATSELDCQQGTRALLQTLGNLGYRASAKKAQICQKQVKYLGYLLKEGQRWLTEARKETVMGQPTPKTPRQLREFLGKAGFCRLFIPGFAEMAAPLYPLTKPGTLFNWGPDQQKAYQEIKQALLTAPALGLPDLTKPFELFVDEKQGYAKGVLTQKLGPWRRPVAYLSKKLDPVAAGWPPCLRMVAAIAVLTKDAGKLTMGQPLVILAPHAVEALVKQPPDRWLSNARMTHYQALLLDTDRVQFGPVVALNPATLLPLPEEGLQHNCLDILAEAHGTRPDLTDQPLPDADHTWYTDGSSLLQEGQRKAGAAVTTETEVIWAKALPAGTSAQRAELIALTQALKMAEGKKLNVYTDSRYAFATAHIHGEIYRRRGWLTSEGKEIKNKDEILALLKALFLPKRLSIIHCPGHQKGHSAEARGNRMADQAARKAAITETPDTSTLLIENSSPSGGSKRTADGSEFEAGKRTADGSEFEKRTADGSEFESPKKKAKVE

SEQ ID NO: 2663 - protein, 2121 aa, synthetic construct
MPAAKRVKLDGGDKKYSIGLDIGTNSVGWAVITDEYKVPSKKFKVLGNTDRHSIKKNLIGALLFDSGETAEATRLKRTARRRYTRRKNRICYLQEIFSNEMAKVDDSFFHRLEESFLVEEDKKHERHPIFGNIVDEVAYHEKYPTIYHLRKKLVDSTDKADLRLIYLALAHMIKFRGHFLIEGDLNPDNSDVDKLFIQLVQTYNQLFEENPINASGVDAKAILSARLSKSRRLENLIAQLPGEKKNGLFGNLIALSLGLTPNFKSNFDLAEDAKLQLSKDTYDDDLDNLLAQIGDQYADLFLAAKNLSDAILLSDILRVNTEITKAPLSASMIKRYDEHHQDLTLLKALVRQQLPEKYKEIFFDQSKNGYAGYIDGGASQEEFYKFIKPILEKMDGTEELLVKLNREDLLRKQRTFDNGSIPHQIHLGELHAILRRQEDFYPFLKDNREKIEKILTFRIPYYVGPLARGNSRFAWMTRKSEETITPWNFEEVVDKGASAQSFIERMTNFDKNLPNEKVLPKHSLLYEYFTVYNELTKVKYVTEGMRKPAFLSGEQKKAIVDLLFKTNRKVTVKQLKEDYFKKIECFDSVEISGVEDRFNASLGTYHDLLKIIKDKDFLDNEENEDILEDIVLTLTLFEDREMIEERLKTYAHLFDDKVMKQLKRRRYTGWGRLSRKLINGIRDKQSGKTILDFLKSDGFANRNFMQLIHDDSLTFKEDIQKAQVSGQGDSLHEHIANLAGSPAIKKGILQTVKVVDELVKVMGRHKPENIVIEMARENQTTQKGQKNSRERMKRIEEGIKELGSQILKEHPVENTQLQNEKLYLYYLQNGRDMYVDQELDINRLSDYDVDHIVPQSFLKDDSIDNKVLTRSDKARGKSDNVPSEEVVKKMKNYWRQLLNAKLITQRKFDNLTKAERGGLSELDKAGFIKRQLVETRQITKHVAQILDSRMNTKYDENDKLIREVKVITLKSKLVSDFRKDFQFYKVREINNYHHAHDAYLNAVVGTALIKKYPKLESEFVYGDYKVYDVRKMIAKSEQEIGKATAKYFFYSNIMNFFKTEITLANGEIRKRPLIETNGETGEIVWDKGRDFATVRKVLSMPQVNIVKKTEVQTGGFSKESILPKRNSDKLIARKKDWDPKKYGGFDSPTVAYSVLVVAKVEKGKSKKLKSVKELLGITIMERSSFEKNPIDFLEAKGYKEVKKDLIIKLPKYSLFELENGRKRMLASAGELQKGNELALPSKYVNFLYLASHYEKLKGSPEDNEQKQLFVEQHKHYLDEIIEQISEFSKRVILADANLDKVLSAYNKHRDKPIREQAENIIHLFTLTNLGAPAAFKYFDTTIDRKRYTSTKEVLDATLIHQSITGLYETRIDLSQLGGDGGSGSETPGTSESATPESGGTLNIEDEYRLHETSKEPDVSLGSTWLSDFPQAWAETGGMGLAVRQAPLIIPLKATSTPVSIKQYPMSQEARLGIKPHIQRLLDQGILVPCQSPWNTPLLPVKKPGTNDYRPVQDLREVNKRVEDIHPTVPNPYNLLSGLPPSHQWYTVLDLKDAFFCLRLHPTSQPLFAFEWRDPEMGISGQLTWTRLPQGFKNSPTLFNEALHRDLADFRIQHPDLILLQYVDDLLLAATSELDCQQGTRALLQTLGNLGYRASAKKAQICQKQVKYLGYLLKEGQRWLTEARKETVMGQPTPKTPRQLREFLGKAGFCRLFIPGFAEMAAPLYPLTKPGTLFNWGPDQQKAYQEIKQALLTAPALGLPDLTKPFELFVDEKQGYAKGVLTQKLGPWRRPVAYLSKKLDPVAAGWPPCLRMVAAIAVLTKDAGKLTMGQPLVILAPHAVEALVKQPPDRWLSNARMTHYQALLLDTDRVQFGPVVALNPATLLPLPEEGLQHNCLDILAEAHGTRPDLTDQPLPDADHTWYTDGSSLLQEGQRKAGAAVTTETEVIWAKALPAGTSAQRAELIALTQALKMAEGKKLNVYTDSRYAFATAHIHGEIYRRRGWLTSEGKEIKNKDEILALLKALFLPKRLSIIHCPGHQKGHSAEARGNRMADQAARKAAITETPDTSTLLIENSSPSGGSKRTADGSEFEAGKRTADGSEFEKRTADGSEFESPKKKAKVE

SEQ ID NO: 2664 - protein, 2114 aa, synthetic construct
MPAAKRVKLDGGDKKYSIGLDIGTNSVGWAVITDEYKVPSKKFKVLGNTDRHSIKKNLIGALLFDSGETAEATRLKRTARRRYTRRKNRICYLQEIFSNEMAKVDDSFFHRLEESFLVEEDKKHERHPIFGNIVDEVAYHEKYPTIYHLRKKLVDSTDKADLRLIYLALAHMIKFRGHFLIEGDLNPDNSDVDKLFIQLVQTYNQLFEENPINASGVDAKAILSARLSKSRRLENLIAQLPGEKKNGLFGNLIALSLGLTPNFKSNFDLAEDAKLQLSKDTYDDDLDNLLAQIGDQYADLFLAAKNLSDAILLSDILRVNTEITKAPLSASMIKRYDEHHQDLTLLKALVRQQLPEKYKEIFFDQSKNGYAGYIDGGASQEEFYKFIKPILEKMDGTEELLVKLNREDLLRKQRTFDNGSIPHQIHLGELHAILRRQEDFYPFLKDNREKIEKILTFRIPYYVGPLARGNSRFAWMTRKSEETITPWNFEEVVDKGASAQSFIERMTNFDKNLPNEKVLPKHSLLYEYFTVYNELTKVKYVTEGMRKPAFLSGEQKKAIVDLLFKTNRKVTVKQLKEDYFKKIECFDSVEISGVEDRFNASLGTYHDLLKIIKDKDFLDNEENEDILEDIVLTLTLFEDREMIEERLKTYAHLFDDKVMKQLKRRRYTGWGRLSRKLINGIRDKQSGKTILDFLKSDGFANRNFMQLIHDDSLTFKEDIQKAQVSGQGDSLHEHIANLAGSPAIKKGILQTVKVVDELVKVMGRHKPENIVIEMARENQTTQKGQKNSRERMKRIEEGIKELGSQILKEHPVENTQLQNEKLYLYYLQNGRDMYVDQELDINRLSDYDVDHIVPQSFLKDDSIDNKVLTRSDKARGKSDNVPSEEVVKKMKNYWRQLLNAKLITQRKFDNLTKAERGGLSELDKAGFIKRQLVETRQITKHVAQILDSRMNTKYDENDKLIREVKVITLKSKLVSDFRKDFQFYKVREINNYHHAHDAYLNAVVGTALIKKYPKLESEFVYGDYKVYDVRKMIAKSEQEIGKATAKYFFYSNIMNFFKTEITLANGEIRKRPLIETNGETGEIVWDKGRDFATVRKVLSMPQVNIVKKTEVQTGGFSKESILPKRNSDKLIARKKDWDPKKYGGFDSPTVAYSVLVVAKVEKGKSKKLKSVKELLGITIMERSSFEKNPIDFLEAKGYKEVKKDLIIKLPKYSLFELENGRKRMLASAGELQKGNELALPSKYVNFLYLASHYEKLKGSPEDNEQKQLFVEQHKHYLDEIIEQISEFSKRVILADANLDKVLSAYNKHRDKPIREQAENIIHLFTLTNLGAPAAFKYFDTTIDRKRYTSTKEVLDATLIHQSITGLYETRIDLSQLGGDGGGGGGSSPAPGGTLNIEDEYRLHETSKEPDVSLGSTWLSDFPQAWAETGGMGLAVRQAPLIIPLKATSTPVSIKQYPMSQEARLGIKPHIQRLLDQGILVPCQSPWNTPLLPVKKPGTNDYRPVQDLREVNKRVEDIHPTVPNPYNLLSGLPPSHQWYTVLDLKDAFFCLRLHPTSQPLFAFEWRDPEMGISGQLTWTRLPQGFKNSPTLFNEALHRDLADFRIQHPDLILLQYVDDLLLAATSELDCQQGTRALLQTLGNLGYRASAKKAQICQKQVKYLGYLLKEGQRWLTEARKETVMGQPTPKTPRQLREFLGKAGFCRLFIPGFAEMAAPLYPLTKPGTLFNWGPDQQKAYQEIKQALLTAPALGLPDLTKPFELFVDEKQGYAKGVLTQKLGPWRRPVAYLSKKLDPVAAGWPPCLRMVAAIAVLTKDAGKLTMGQPLVILAPHAVEALVKQPPDRWLSNARMTHYQALLLDTDRVQFGPVVALNPATLLPLPEEGLQHNCLDILAEAHGTRPDLTDQPLPDADHTWYTDGSSLLQEGQRKAGAAVTTETEVIWAKALPAGTSAQRAELIALTQALKMAEGKKLNVYTDSRYAFATAHIHGEIYRRRGWLTSEGKEIKNKDEILALLKALFLPKRLSIIHCPGHQKGHSAEARGNRMADQAARKAAITETPDTSTLLIENSSPSGGSKRTADGSEFEAGKRTADGSEFEKRTADGSEFESPKKKAKVE

SEQ ID NO: 2665 - protein, 2117 aa, synthetic construct
MPAAKRVKLDGGDKKYSIGLDIGTNSVGWAVITDEYKVPSKKFKVLGNTDRHSIKKNLIGALLFDSGETAEATRLKRTARRRYTRRKNRICYLQEIFSNEMAKVDDSFFHRLEESFLVEEDKKHERHPIFGNIVDEVAYHEKYPTIYHLRKKLVDSTDKADLRLIYLALAHMIKFRGHFLIEGDLNPDNSDVDKLFIQLVQTYNQLFEENPINASGVDAKAILSARLSKSRRLENLIAQLPGEKKNGLFGNLIALSLGLTPNFKSNFDLAEDAKLQLSKDTYDDDLDNLLAQIGDQYADLFLAAKNLSDAILLSDILRVNTEITKAPLSASMIKRYDEHHQDLTLLKALVRQQLPEKYKEIFFDQSKNGYAGYIDGGASQEEFYKFIKPILEKMDGTEELLVKLNREDLLRKQRTFDNGSIPHQIHLGELHAILRRQEDFYPFLKDNREKIEKILTFRIPYYVGPLARGNSRFAWMTRKSEETITPWNFEEVVDKGASAQSFIERMTNFDKNLPNEKVLPKHSLLYEYFTVYNELTKVKYVTEGMRKPAFLSGEQKKAIVDLLFKTNRKVTVKQLKEDYFKKIECFDSVEISGVEDRFNASLGTYHDLLKIIKDKDFLDNEENEDILEDIVLTLTLFEDREMIEERLKTYAHLFDDKVMKQLKRRRYTGWGRLSRKLINGIRDKQSGKTILDFLKSDGFANRNFMQLIHDDSLTFKEDIQKAQVSGQGDSLHEHIANLAGSPAIKKGILQTVKVVDELVKVMGRHKPENIVIEMARENQTTQKGQKNSRERMKRIEEGIKELGSQILKEHPVENTQLQNEKLYLYYLQNGRDMYVDQELDINRLSDYDVDHIVPQSFLKDDSIDNKVLTRSDKARGKSDNVPSEEVVKKMKNYWRQLLNAKLITQRKFDNLTKAERGGLSELDKAGFIKRQLVETRQITKHVAQILDSRMNTKYDENDKLIREVKVITLKSKLVSDFRKDFQFYKVREINNYHHAHDAYLNAVVGTALIKKYPKLESEFVYGDYKVYDVRKMIAKSEQEIGKATAKYFFYSNIMNFFKTEITLANGEIRKRPLIETNGETGEIVWDKGRDFATVRKVLSMPQVNIVKKTEVQTGGFSKESILPKRNSDKLIARKKDWDPKKYGGFDSPTVAYSVLVVAKVEKGKSKKLKSVKELLGITIMERSSFEKNPIDFLEAKGYKEVKKDLIIKLPKYSLFELENGRKRMLASAGELQKGNELALPSKYVNFLYLASHYEKLKGSPEDNEQKQLFVEQHKHYLDEIIEQISEFSKRVILADANLDKVLSAYNKHRDKPIREQAENIIHLFTLTNLGAPAAFKYFDTTIDRKRYTSTKEVLDATLIHQSITGLYETRIDLSQLGGDGGGSSGSSGSSGSSGGTLNIEDEYRLHETSKEPDVSLGSTWLSDFPQAWAETGGMGLAVRQAPLIIPLKATSTPVSIKQYPMSQEARLGIKPHIQRLLDQGILVPCQSPWNTPLLPVKKPGTNDYRPVQDLREVNKRVEDIHPTVPNPYNLLSGLPPSHQWYTVLDLKDAFFCLRLHPTSQPLFAFEWRDPEMGISGQLTWTRLPQGFKNSPTLFNEALHRDLADFRIQHPDLILLQYVDDLLLAATSELDCQQGTRALLQTLGNLGYRASAKKAQICQKQVKYLGYLLKEGQRWLTEARKETVMGQPTPKTPRQLREFLGKAGFCRLFIPGFAEMAAPLYPLTKPGTLFNWGPDQQKAYQEIKQALLTAPALGLPDLTKPFELFVDEKQGYAKGVLTQKLGPWRRPVAYLSKKLDPVAAGWPPCLRMVAAIAVLTKDAGKLTMGQPLVILAPHAVEALVKQPPDRWLSNARMTHYQALLLDTDRVQFGPVVALNPATLLPLPEEGLQHNCLDILAEAHGTRPDLTDQPLPDADHTWYTDGSSLLQEGQRKAGAAVTTETEVIWAKALPAGTSAQRAELIALTQALKMAEGKKLNVYTDSRYAFATAHIHGEIYRRRGWLTSEGKEIKNKDEILALLKALFLPKRLSIIHCPGHQKGHSAEARGNRMADQAARKAAITETPDTSTLLIENSSPSGGSKRTADGSEFEAGKRTADGSEFEKRTADGSEFESPKKKAKVE

SEQ ID NO: 2666 - protein, 2116 aa, synthetic construct
MPAAKRVKLDGGDKKYSIGLDIGTNSVGWAVITDEYKVPSKKFKVLGNTDRHSIKKNLIGALLFDSGETAEATRLKRTARRRYTRRKNRICYLQEIFSNEMAKVDDSFFHRLEESFLVEEDKKHERHPIFGNIVDEVAYHEKYPTIYHLRKKLVDSTDKADLRLIYLALAHMIKFRGHFLIEGDLNPDNSDVDKLFIQLVQTYNQLFEENPINASGVDAKAILSARLSKSRRLENLIAQLPGEKKNGLFGNLIALSLGLTPNFKSNFDLAEDAKLQLSKDTYDDDLDNLLAQIGDQYADLFLAAKNLSDAILLSDILRVNTEITKAPLSASMIKRYDEHHQDLTLLKALVRQQLPEKYKEIFFDQSKNGYAGYIDGGASQEEFYKFIKPILEKMDGTEELLVKLNREDLLRKQRTFDNGSIPHQIHLGELHAILRRQEDFYPFLKDNREKIEKILTFRIPYYVGPLARGNSRFAWMTRKSEETITPWNFEEVVDKGASAQSFIERMTNFDKNLPNEKVLPKHSLLYEYFTVYNELTKVKYVTEGMRKPAFLSGEQKKAIVDLLFKTNRKVTVKQLKEDYFKKIECFDSVEISGVEDRFNASLGTYHDLLKIIKDKDFLDNEENEDILEDIVLTLTLFEDREMIEERLKTYAHLFDDKVMKQLKRRRYTGWGRLSRKLINGIRDKQSGKTILDFLKSDGFANRNFMQLIHDDSLTFKEDIQKAQVSGQGDSLHEHIANLAGSPAIKKGILQTVKVVDELVKVMGRHKPENIVIEMARENQTTQKGQKNSRERMKRIEEGIKELGSQILKEHPVENTQLQNEKLYLYYLQNGRDMYVDQELDINRLSDYDVDHIVPQSFLKDDSIDNKVLTRSDKARGKSDNVPSEEVVKKMKNYWRQLLNAKLITQRKFDNLTKAERGGLSELDKAGFIKRQLVETRQITKHVAQILDSRMNTKYDENDKLIREVKVITLKSKLVSDFRKDFQFYKVREINNYHHAHDAYLNAVVGTALIKKYPKLESEFVYGDYKVYDVRKMIAKSEQEIGKATAKYFFYSNIMNFFKTEITLANGEIRKRPLIETNGETGEIVWDKGRDFATVRKVLSMPQVNIVKKTEVQTGGFSKESILPKRNSDKLIARKKDWDPKKYGGFDSPTVAYSVLVVAKVEKGKSKKLKSVKELLGITIMERSSFEKNPIDFLEAKGYKEVKKDLIIKLPKYSLFELENGRKRMLASAGELQKGNELALPSKYVNFLYLASHYEKLKGSPEDNEQKQLFVEQHKHYLDEIIEQISEFSKRVILADANLDKVLSAYNKHRDKPIREQAENIIHLFTLTNLGAPAAFKYFDTTIDRKRYTSTKEVLDATLIHQSITGLYETRIDLSQLGGDGGEAAAKGGSGSSGGTLNIEDEYRLHETSKEPDVSLGSTWLSDFPQAWAETGGMGLAVRQAPLIIPLKATSTPVSIKQYPMSQEARLGIKPHIQRLLDQGILVPCQSPWNTPLLPVKKPGTNDYRPVQDLREVNKRVEDIHPTVPNPYNLLSGLPPSHQWYTVLDLKDAFFCLRLHPTSQPLFAFEWRDPEMGISGQLTWTRLPQGFKNSPTLFNEALHRDLADFRIQHPDLILLQYVDDLLLAATSELDCQQGTRALLQTLGNLGYRASAKKAQICQKQVKYLGYLLKEGQRWLTEARKETVMGQPTPKTPRQLREFLGKAGFCRLFIPGFAEMAAPLYPLTKPGTLFNWGPDQQKAYQEIKQALLTAPALGLPDLTKPFELFVDEKQGYAKGVLTQKLGPWRRPVAYLSKKLDPVAAGWPPCLRMVAAIAVLTKDAGKLTMGQPLVILAPHAVEALVKQPPDRWLSNARMTHYQALLLDTDRVQFGPVVALNPATLLPLPEEGLQHNCLDILAEAHGTRPDLTDQPLPDADHTWYTDGSSLLQEGQRKAGAAVTTETEVIWAKALPAGTSAQRAELIALTQALKMAEGKKLNVYTDSRYAFATAHIHGEIYRRRGWLTSEGKEIKNKDEILALLKALFLPKRLSIIHCPGHQKGHSAEARGNRMADQAARKAAITETPDTSTLLIENSSPSGGSKRTADGSEFEAGKRTADGSEFEKRTADGSEFESPKKKAKVE

SEQ ID NO: 2667 - protein, 2114 aa, synthetic construct
MPAAKRVKLDGGDKKYSIGLDIGTNSVGWAVITDEYKVPSKKFKVLGNTDRHSIKKNLIGALLFDSGETAEATRLKRTARRRYTRRKNRICYLQEIFSNEMAKVDDSFFHRLEESFLVEEDKKHERHPIFGNIVDEVAYHEKYPTIYHLRKKLVDSTDKADLRLIYLALAHMIKFRGHFLIEGDLNPDNSDVDKLFIQLVQTYNQLFEENPINASGVDAKAILSARLSKSRRLENLIAQLPGEKKNGLFGNLIALSLGLTPNFKSNFDLAEDAKLQLSKDTYDDDLDNLLAQIGDQYADLFLAAKNLSDAILLSDILRVNTEITKAPLSASMIKRYDEHHQDLTLLKALVRQQLPEKYKEIFFDQSKNGYAGYIDGGASQEEFYKFIKPILEKMDGTEELLVKLNREDLLRKQRTFDNGSIPHQIHLGELHAILRRQEDFYPFLKDNREKIEKILTFRIPYYVGPLARGNSRFAWMTRKSEETITPWNFEEVVDKGASAQSFIERMTNFDKNLPNEKVLPKHSLLYEYFTVYNELTKVKYVTEGMRKPAFLSGEQKKAIVDLLFKTNRKVTVKQLKEDYFKKIECFDSVEISGVEDRFNASLGTYHDLLKIIKDKDFLDNEENEDILEDIVLTLTLFEDREMIEERLKTYAHLFDDKVMKQLKRRRYTGWGRLSRKLINGIRDKQSGKTILDFLKSDGFANRNFMQLIHDDSLTFKEDIQKAQVSGQGDSLHEHIANLAGSPAIKKGILQTVKVVDELVKVMGRHKPENIVIEMARENQTTQKGQKNSRERMKRIEEGIKELGSQILKEHPVENTQLQNEKLYLYYLQNGRDMYVDQELDINRLSDYDVDHIVPQSFLKDDSIDNKVLTRSDKARGKSDNVPSEEVVKKMKNYWRQLLNAKLITQRKFDNLTKAERGGLSELDKAGFIKRQLVETRQITKHVAQILDSRMNTKYDENDKLIREVKVITLKSKLVSDFRKDFQFYKVREINNYHHAHDAYLNAVVGTALIKKYPKLESEFVYGDYKVYDVRKMIAKSEQEIGKATAKYFFYSNIMNFFKTEITLANGEIRKRPLIETNGETGEIVWDKGRDFATVRKVLSMPQVNIVKKTEVQTGGFSKESILPKRNSDKLIARKKDWDPKKYGGFDSPTVAYSVLVVAKVEKGKSKKLKSVKELLGITIMERSSFEKNPIDFLEAKGYKEVKKDLIIKLPKYSLFELENGRKRMLASAGELQKGNELALPSKYVNFLYLASHYEKLKGSPEDNEQKQLFVEQHKHYLDEIIEQISEFSKRVILADANLDKVLSAYNKHRDKPIREQAENIIHLFTLTNLGAPAAFKYFDTTIDRKRYTSTKEVLDATLIHQSITGLYETRIDLSQLGGDGGGGSPAPGGGGGTLNIEDEYRLHETSKEPDVSLGSTWLSDFPQAWAETGGMGLAVRQAPLIIPLKATSTPVSIKQYPMSQEARLGIKPHIQRLLDQGILVPCQSPWNTPLLPVKKPGTNDYRPVQDLREVNKRVEDIHPTVPNPYNLLSGLPPSHQWYTVLDLKDAFFCLRLHPTSQPLFAFEWRDPEMGISGQLTWTRLPQGFKNSPTLFNEALHRDLADFRIQHPDLILLQYVDDLLLAATSELDCQQGTRALLQTLGNLGYRASAKKAQICQKQVKYLGYLLKEGQRWLTEARKETVMGQPTPKTPRQLREFLGKAGFCRLFIPGFAEMAAPLYPLTKPGTLFNWGPDQQKAYQEIKQALLTAPALGLPDLTKPFELFVDEKQGYAKGVLTQKLGPWRRPVAYLSKKLDPVAAGWPPCLRMVAAIAVLTKDAGKLTMGQPLVILAPHAVEALVKQPPDRWLSNARMTHYQALLLDTDRVQFGPVVALNPATLLPLPEEGLQHNCLDILAEAHGTRPDLTDQPLPDADHTWYTDGSSLLQEGQRKAGAAVTTETEVIWAKALPAGTSAQRAELIALTQALKMAEGKKLNVYTDSRYAFATAHIHGEIYRRRGWLTSEGKEIKNKDEILALLKALFLPKRLSIIHCPGHQKGHSAEARGNRMADQAARKAAITETPDTSTLLIENSSPSGGSKRTADGSEFEAGKRTADGSEFEKRTADGSEFESPKKKAKVE

SEQ ID NO: 2668 - protein, 2116 aa, synthetic construct
MPAAKRVKLDGGDKKYSIGLDIGTNSVGWAVITDEYKVPSKKFKVLGNTDRHSIKKNLIGALLFDSGETAEATRLKRTARRRYTRRKNRICYLQEIFSNEMAKVDDSFFHRLEESFLVEEDKKHERHPIFGNIVDEVAYHEKYPTIYHLRKKLVDSTDKADLRLIYLALAHMIKFRGHFLIEGDLNPDNSDVDKLFIQLVQTYNQLFEENPINASGVDAKAILSARLSKSRRLENLIAQLPGEKKNGLFGNLIALSLGLTPNFKSNFDLAEDAKLQLSKDTYDDDLDNLLAQIGDQYADLFLAAKNLSDAILLSDILRVNTEITKAPLSASMIKRYDEHHQDLTLLKALVRQQLPEKYKEIFFDQSKNGYAGYIDGGASQEEFYKFIKPILEKMDGTEELLVKLNREDLLRKQRTFDNGSIPHQIHLGELHAILRRQEDFYPFLKDNREKIEKILTFRIPYYVGPLARGNSRFAWMTRKSEETITPWNFEEVVDKGASAQSFIERMTNFDKNLPNEKVLPKHSLLYEYFTVYNELTKVKYVTEGMRKPAFLSGEQKKAIVDLLFKTNRKVTVKQLKEDYFKKIECFDSVEISGVEDRFNASLGTYHDLLKIIKDKDFLDNEENEDILEDIVLTLTLFEDREMIEERLKTYAHLFDDKVMKQLKRRRYTGWGRLSRKLINGIRDKQSGKTILDFLKSDGFANRNFMQLIHDDSLTFKEDIQKAQVSGQGDSLHEHIANLAGSPAIKKGILQTVKVVDELVKVMGRHKPENIVIEMARENQTTQKGQKNSRERMKRIEEGIKELGSQILKEHPVENTQLQNEKLYLYYLQNGRDMYVDQELDINRLSDYDVDHIVPQSFLKDDSIDNKVLTRSDKARGKSDNVPSEEVVKKMKNYWRQLLNAKLITQRKFDNLTKAERGGLSELDKAGFIKRQLVETRQITKHVAQILDSRMNTKYDENDKLIREVKVITLKSKLVSDFRKDFQFYKVREINNYHHAHDAYLNAVVGTALIKKYPKLESEFVYGDYKVYDVRKMIAKSEQEIGKATAKYFFYSNIMNFFKTEITLANGEIRKRPLIETNGETGEIVWDKGRDFATVRKVLSMPQVNIVKKTEVQTGGFSKESILPKRNSDKLIARKKDWDPKKYGGFDSPTVAYSVLVVAKVEKGKSKKLKSVKELLGITIMERSSFEKNPIDFLEAKGYKEVKKDLIIKLPKYSLFELENGRKRMLASAGELQKGNELALPSKYVNFLYLASHYEKLKGSPEDNEQKQLFVEQHKHYLDEIIEQISEFSKRVILADANLDKVLSAYNKHRDKPIREQAENIIHLFTLTNLGAPAAFKYFDTTIDRKRYTSTKEVLDATLIHQSITGLYETRIDLSQLGGDGGPAPEAAAKGGGGGTLNIEDEYRLHETSKEPDVSLGSTWLSDFPQAWAETGGMGLAVRQAPLIIPLKATSTPVSIKQYPMSQEARLGIKPHIQRLLDQGILVPCQSPWNTPLLPVKKPGTNDYRPVQDLREVNKRVEDIHPTVPNPYNLLSGLPPSHQWYTVLDLKDAFFCLRLHPTSQPLFAFEWRDPEMGISGQLTWTRLPQGFKNSPTLFNEALHRDLADFRIQHPDLILLQYVDDLLLAATSELDCQQGTRALLQTLGNLGYRASAKKAQICQKQVKYLGYLLKEGQRWLTEARKETVMGQPTPKTPRQLREFLGKAGFCRLFIPGFAEMAAPLYPLTKPGTLFNWGPDQQKAYQEIKQALLTAPALGLPDLTKPFELFVDEKQGYAKGVLTQKLGPWRRPVAYLSKKLDPVAAGWPPCLRMVAAIAVLTKDAGKLTMGQPLVILAPHAVEALVKQPPDRWLSNARMTHYQALLLDTDRVQFGPVVALNPATLLPLPEEGLQHNCLDILAEAHGTRPDLTDQPLPDADHTWYTDGSSLLQEGQRKAGAAVTTETEVIWAKALPAGTSAQRAELIALTQALKMAEGKKLNVYTDSRYAFATAHIHGEIYRRRGWLTSEGKEIKNKDEILALLKALFLPKRLSIIHCPGHQKGHSAEARGNRMADQAARKAAITETPDTSTLLIENSSPSGGSKRTADGSEFEAGKRTADGSEFEKRTADGSEFESPKKKAKVE

SEQ ID NO: 2669 - protein, 2120 aa, synthetic construct
MPAAKRVKLDGGDKKYSIGLDIGTNSVGWAVITDEYKVPSKKFKVLGNTDRHSIKKNLIGALLFDSGETAEATRLKRTARRRYTRRKNRICYLQEIFSNEMAKVDDSFFHRLEESFLVEEDKKHERHPIFGNIVDEVAYHEKYPTIYHLRKKLVDSTDKADLRLIYLALAHMIKFRGHFLIEGDLNPDNSDVDKLFIQLVQTYNQLFEENPINASGVDAKAILSARLSKSRRLENLIAQLPGEKKNGLFGNLIALSLGLTPNFKSNFDLAEDAKLQLSKDTYDDDLDNLLAQIGDQYADLFLAAKNLSDAILLSDILRVNTEITKAPLSASMIKRYDEHHQDLTLLKALVRQQLPEKYKEIFFDQSKNGYAGYIDGGASQEEFYKFIKPILEKMDGTEELLVKLNREDLLRKQRTFDNGSIPHQIHLGELHAILRRQEDFYPFLKDNREKIEKILTFRIPYYVGPLARGNSRFAWMTRKSEETITPWNFEEVVDKGASAQSFIERMTNFDKNLPNEKVLPKHSLLYEYFTVYNELTKVKYVTEGMRKPAFLSGEQKKAIVDLLFKTNRKVTVKQLKEDYFKKIECFDSVEISGVEDRFNASLGTYHDLLKIIKDKDFLDNEENEDILEDIVLTLTLFEDREMIEERLKTYAHLFDDKVMKQLKRRRYTGWGRLSRKLINGIRDKQSGKTILDFLKSDGFANRNFMQLIHDDSLTFKEDIQKAQVSGQGDSLHEHIANLAGSPAIKKGILQTVKVVDELVKVMGRHKPENIVIEMARENQTTQKGQKNSRERMKRIEEGIKELGSQILKEHPVENTQLQNEKLYLYYLQNGRDMYVDQELDINRLSDYDVDHIVPQSFLKDDSIDNKVLTRSDKARGKSDNVPSEEVVKKMKNYWRQLLNAKLITQRKFDNLTKAERGGLSELDKAGFIKRQLVETRQITKHVAQILDSRMNTKYDENDKLIREVKVITLKSKLVSDFRKDFQFYKVREINNYHHAHDAYLNAVVGTALIKKYPKLESEFVYGDYKVYDVRKMIAKSEQEIGKATAKYFFYSNIMNFFKTEITLANGEIRKRPLIETNGETGEIVWDKGRDFATVRKVLSMPQVNIVKKTEVQTGGFSKESILPKRNSDKLIARKKDWDPKKYGGFDSPTVAYSVLVVAKVEKGKSKKLKSVKELLGITIMERSSFEKNPIDFLEAKGYKEVKKDLIIKLPKYSLFELENGRKRMLASAGELQKGNELALPSKYVNFLYLASHYEKLKGSPEDNEQKQLFVEQHKHYLDEIIEQISEFSKRVILADANLDKVLSAYNKHRDKPIREQAENIIHLFTLTNLGAPAAFKYFDTTIDRKRYTSTKEVLDATLIHQSITGLYETRIDLSQLGGDGGGSSGSSGSSGSSGSSGGTLNIEDEYRLHETSKEPDVSLGSTWLSDFPQAWAETGGMGLAVRQAPLIIPLKATSTPVSIKQYPMSQEARLGIKPHIQRLLDQGILVPCQSPWNTPLLPVKKPGTNDYRPVQDLREVNKRVEDIHPTVPNPYNLLSGLPPSHQWYTVLDLKDAFFCLRLHPTSQPLFAFEWRDPEMGISGQLTWTRLPQGFKNSPTLFNEALHRDLADFRIQHPDLILLQYVDDLLLAATSELDCQQGTRALLQTLGNLGYRASAKKAQICQKQVKYLGYLLKEGQRWLTEARKETVMGQPTPKTPRQLREFLGKAGFCRLFIPGFAEMAAPLYPLTKPGTLFNWGPDQQKAYQEIKQALLTAPALGLPDLTKPFELFVDEKQGYAKGVLTQKLGPWRRPVAYLSKKLDPVAAGWPPCLRMVAAIAVLTKDAGKLTMGQPLVILAPHAVEALVKQPPDRWLSNARMTHYQALLLDTDRVQFGPVVALNPATLLPLPEEGLQHNCLDILAEAHGTRPDLTDQPLPDADHTWYTDGSSLLQEGQRKAGAAVTTETEVIWAKALPAGTSAQRAELIALTQALKMAEGKKLNVYTDSRYAFATAHIHGEIYRRRGWLTSEGKEIKNKDEILALLKALFLPKRLSIIHCPGHQKGHSAEARGNRMADQAARKAAITETPDTSTLLIENSSPSGGSKRTADGSEFEAGKRTADGSEFEKRTADGSEFESPKKKAKVE

SEQ ID NO: 2670 - protein, 2114 aa, synthetic construct
MPAAKRVKLDGGDKKYSIGLDIGTNSVGWAVITDEYKVPSKKFKVLGNTDRHSIKKNLIGALLFDSGETAEATRLKRTARRRYTRRKNRICYLQEIFSNEMAKVDDSFFHRLEESFLVEEDKKHERHPIFGNIVDEVAYHEKYPTIYHLRKKLVDSTDKADLRLIYLALAHMIKFRGHFLIEGDLNPDNSDVDKLFIQLVQTYNQLFEENPINASGVDAKAILSARLSKSRRLENLIAQLPGEKKNGLFGNLIALSLGLTPNFKSNFDLAEDAKLQLSKDTYDDDLDNLLAQIGDQYADLFLAAKNLSDAILLSDILRVNTEITKAPLSASMIKRYDEHHQDLTLLKALVRQQLPEKYKEIFFDQSKNGYAGYIDGGASQEEFYKFIKPILEKMDGTEELLVKLNREDLLRKQRTFDNGSIPHQIHLGELHAILRRQEDFYPFLKDNREKIEKILTFRIPYYVGPLARGNSRFAWMTRKSEETITPWNFEEVVDKGASAQSFIERMTNFDKNLPNEKVLPKHSLLYEYFTVYNELTKVKYVTEGMRKPAFLSGEQKKAIVDLLFKTNRKVTVKQLKEDYFKKIECFDSVEISGVEDRFNASLGTYHDLLKIIKDKDFLDNEENEDILEDIVLTLTLFEDREMIEERLKTYAHLFDDKVMKQLKRRRYTGWGRLSRKLINGIRDKQSGKTILDFLKSDGFANRNFMQLIHDDSLTFKEDIQKAQVSGQGDSLHEHIANLAGSPAIKKGILQTVKVVDELVKVMGRHKPENIVIEMARENQTTQKGQKNSRERMKRIEEGIKELGSQILKEHPVENTQLQNEKLYLYYLQNGRDMYVDQELDINRLSDYDVDHIVPQSFLKDDSIDNKVLTRSDKARGKSDNVPSEEVVKKMKNYWRQLLNAKLITQRKFDNLTKAERGGLSELDKAGFIKRQLVETRQITKHVAQILDSRMNTKYDENDKLIREVKVITLKSKLVSDFRKDFQFYKVREINNYHHAHDAYLNAVVGTALIKKYPKLESEFVYGDYKVYDVRKMIAKSEQEIGKATAKYFFYSNIMNFFKTEITLANGEIRKRPLIETNGETGEIVWDKGRDFATVRKVLSMPQVNIVKKTEVQTGGFSKESILPKRNSDKLIARKKDWDPKKYGGFDSPTVAYSVLVVAKVEKGKSKKLKSVKELLGITIMERSSFEKNPIDFLEAKGYKEVKKDLIIKLPKYSLFELENGRKRMLASAGELQKGNELALPSKYVNFLYLASHYEKLKGSPEDNEQKQLFVEQHKHYLDEIIEQISEFSKRVILADANLDKVLSAYNKHRDKPIREQAENIIHLFTLTNLGAPAAFKYFDTTIDRKRYTSTKEVLDATLIHQSITGLYETRIDLSQLGGDGGGGGGGSGSSGGTLNIEDEYRLHETSKEPDVSLGSTWLSDFPQAWAETGGMGLAVRQAPLIIPLKATSTPVSIKQYPMSQEARLGIKPHIQRLLDQGILVPCQSPWNTPLLPVKKPGTNDYRPVQDLREVNKRVEDIHPTVPNPYNLLSGLPPSHQWYTVLDLKDAFFCLRLHPTSQPLFAFEWRDPEMGISGQLTWTRLPQGFKNSPTLFNEALHRDLADFRIQHPDLILLQYVDDLLLAATSELDCQQGTRALLQTLGNLGYRASAKKAQICQKQVKYLGYLLKEGQRWLTEARKETVMGQPTPKTPRQLREFLGKAGFCRLFIPGFAEMAAPLYPLTKPGTLFNWGPDQQKAYQEIKQALLTAPALGLPDLTKPFELFVDEKQGYAKGVLTQKLGPWRRPVAYLSKKLDPVAAGWPPCLRMVAAIAVLTKDAGKLTMGQPLVILAPHAVEALVKQPPDRWLSNARMTHYQALLLDTDRVQFGPVVALNPATLLPLPEEGLQHNCLDILAEAHGTRPDLTDQPLPDADHTWYTDGSSLLQEGQRKAGAAVTTETEVIWAKALPAGTSAQRAELIALTQALKMAEGKKLNVYTDSRYAFATAHIHGEIYRRRGWLTSEGKEIKNKDEILALLKALFLPKRLSIIHCPGHQKGHSAEARGNRMADQAARKAAITETPDTSTLLIENSSPSGGSKRTADGSEFEAGKRTADGSEFEKRTADGSEFESPKKKAKVE

SEQ ID NO: 2671 - protein, 2111 aa, synthetic construct
MPAAKRVKLDGGDKKYSIGLDIGTNSVGWAVITDEYKVPSKKFKVLGNTDRHSIKKNLIGALLFDSGETAEATRLKRTARRRYTRRKNRICYLQEIFSNEMAKVDDSFFHRLEESFLVEEDKKHERHPIFGNIVDEVAYHEKYPTIYHLRKKLVDSTDKADLRLIYLALAHMIKFRGHFLIEGDLNPDNSDVDKLFIQLVQTYNQLFEENPINASGVDAKAILSARLSKSRRLENLIAQLPGEKKNGLFGNLIALSLGLTPNFKSNFDLAEDAKLQLSKDTYDDDLDNLLAQIGDQYADLFLAAKNLSDAILLSDILRVNTEITKAPLSASMIKRYDEHHQDLTLLKALVRQQLPEKYKEIFFDQSKNGYAGYIDGGASQEEFYKFIKPILEKMDGTEELLVKLNREDLLRKQRTFDNGSIPHQIHLGELHAILRRQEDFYPFLKDNREKIEKILTFRIPYYVGPLARGNSRFAWMTRKSEETITPWNFEEVVDKGASAQSFIERMTNFDKNLPNEKVLPKHSLLYEYFTVYNELTKVKYVTEGMRKPAFLSGEQKKAIVDLLFKTNRKVTVKQLKEDYFKKIECFDSVEISGVEDRFNASLGTYHDLLKIIKDKDFLDNEENEDILEDIVLTLTLFEDREMIEERLKTYAHLFDDKVMKQLKRRRYTGWGRLSRKLINGIRDKQSGKTILDFLKSDGFANRNFMQLIHDDSLTFKEDIQKAQVSGQGDSLHEHIANLAGSPAIKKGILQTVKVVDELVKVMGRHKPENIVIEMARENQTTQKGQKNSRERMKRIEEGIKELGSQILKEHPVENTQLQNEKLYLYYLQNGRDMYVDQELDINRLSDYDVDHIVPQSFLKDDSIDNKVLTRSDKARGKSDNVPSEEVVKKMKNYWRQLLNAKLITQRKFDNLTKAERGGLSELDKAGFIKRQLVETRQITKHVAQILDSRMNTKYDENDKLIREVKVITLKSKLVSDFRKDFQFYKVREINNYHHAHDAYLNAVVGTALIKKYPKLESEFVYGDYKVYDVRKMIAKSEQEIGKATAKYFFYSNIMNFFKTEITLANGEIRKRPLIETNGETGEIVWDKGRDFATVRKVLSMPQVNIVKKTEVQTGGFSKESILPKRNSDKLIARKKDWDPKKYGGFDSPTVAYSVLVVAKVEKGKSKKLKSVKELLGITIMERSSFEKNPIDFLEAKGYKEVKKDLIIKLPKYSLFELENGRKRMLASAGELQKGNELALPSKYVNFLYLASHYEKLKGSPEDNEQKQLFVEQHKHYLDEIIEQISEFSKRVILADANLDKVLSAYNKHRDKPIREQAENIIHLFTLTNLGAPAAFKYFDTTIDRKRYTSTKEVLDATLIHQSITGLYETRIDLSQLGGDGGGGSPAPGGTLNIEDEYRLHETSKEPDVSLGSTWLSDFPQAWAETGGMGLAVRQAPLIIPLKATSTPVSIKQYPMSQEARLGIKPHIQRLLDQGILVPCQSPWNTPLLPVKKPGTNDYRPVQDLREVNKRVEDIHPTVPNPYNLLSGLPPSHQWYTVLDLKDAFFCLRLHPTSQPLFAFEWRDPEMGISGQLTWTRLPQGFKNSPTLFNEALHRDLADFRIQHPDLILLQYVDDLLLAATSELDCQQGTRALLQTLGNLGYRASAKKAQICQKQVKYLGYLLKEGQRWLTEARKETVMGQPTPKTPRQLREFLGKAGFCRLFIPGFAEMAAPLYPLTKPGTLFNWGPDQQKAYQEIKQALLTAPALGLPDLTKPFELFVDEKQGYAKGVLTQKLGPWRRPVAYLSKKLDPVAAGWPPCLRMVAAIAVLTKDAGKLTMGQPLVILAPHAVEALVKQPPDRWLSNARMTHYQALLLDTDRVQFGPVVALNPATLLPLPEEGLQHNCLDILAEAHGTRPDLTDQPLPDADHTWYTDGSSLLQEGQRKAGAAVTTETEVIWAKALPAGTSAQRAELIALTQALKMAEGKKLNVYTDSRYAFATAHIHGEIYRRRGWLTSEGKEIKNKDEILALLKALFLPKRLSIIHCPGHQKGHSAEARGNRMADQAARKAAITETPDTSTLLIENSSPSGGSKRTADGSEFEAGKRTADGSEFEKRTADGSEFESPKKKAKVE

SEQ ID NO: 2672 - protein, 2111 aa, synthetic construct
MPAAKRVKLDGGDKKYSIGLDIGTNSVGWAVITDEYKVPSKKFKVLGNTDRHSIKKNLIGALLFDSGETAEATRLKRTARRRYTRRKNRICYLQEIFSNEMAKVDDSFFHRLEESFLVEEDKKHERHPIFGNIVDEVAYHEKYPTIYHLRKKLVDSTDKADLRLIYLALAHMIKFRGHFLIEGDLNPDNSDVDKLFIQLVQTYNQLFEENPINASGVDAKAILSARLSKSRRLENLIAQLPGEKKNGLFGNLIALSLGLTPNFKSNFDLAEDAKLQLSKDTYDDDLDNLLAQIGDQYADLFLAAKNLSDAILLSDILRVNTEITKAPLSASMIKRYDEHHQDLTLLKALVRQQLPEKYKEIFFDQSKNGYAGYIDGGASQEEFYKFIKPILEKMDGTEELLVKLNREDLLRKQRTFDNGSIPHQIHLGELHAILRRQEDFYPFLKDNREKIEKILTFRIPYYVGPLARGNSRFAWMTRKSEETITPWNFEEVVDKGASAQSFIERMTNFDKNLPNEKVLPKHSLLYEYFTVYNELTKVKYVTEGMRKPAFLSGEQKKAIVDLLFKTNRKVTVKQLKEDYFKKIECFDSVEISGVEDRFNASLGTYHDLLKIIKDKDFLDNEENEDILEDIVLTLTLFEDREMIEERLKTYAHLFDDKVMKQLKRRRYTGWGRLSRKLINGIRDKQSGKTILDFLKSDGFANRNFMQLIHDDSLTFKEDIQKAQVSGQGDSLHEHIANLAGSPAIKKGILQTVKVVDELVKVMGRHKPENIVIEMARENQTTQKGQKNSRERMKRIEEGIKELGSQILKEHPVENTQLQNEKLYLYYLQNGRDMYVDQELDINRLSDYDVDHIVPQSFLKDDSIDNKVLTRSDKARGKSDNVPSEEVVKKMKNYWRQLLNAKLITQRKFDNLTKAERGGLSELDKAGFIKRQLVETRQITKHVAQILDSRMNTKYDENDKLIREVKVITLKSKLVSDFRKDFQFYKVREINNYHHAHDAYLNAVVGTALIKKYPKLESEFVYGDYKVYDVRKMIAKSEQEIGKATAKYFFYSNIMNFFKTEITLANGEIRKRPLIETNGETGEIVWDKGRDFATVRKVLSMPQVNIVKKTEVQTGGFSKESILPKRNSDKLIARKKDWDPKKYGGFDSPTVAYSVLVVAKVEKGKSKKLKSVKELLGITIMERSSFEKNPIDFLEAKGYKEVKKDLIIKLPKYSLFELENGRKRMLASAGELQKGNELALPSKYVNFLYLASHYEKLKGSPEDNEQKQLFVEQHKHYLDEIIEQISEFSKRVILADANLDKVLSAYNKHRDKPIREQAENIIHLFTLTNLGAPAAFKYFDTTIDRKRYTSTKEVLDATLIHQSITGLYETRIDLSQLGGDGGGGGPAPGGTLNIEDEYRLHETSKEPDVSLGSTWLSDFPQAWAETGGMGLAVRQAPLIIPLKATSTPVSIKQYPMSQEARLGIKPHIQRLLDQGILVPCQSPWNTPLLPVKKPGTNDYRPVQDLREVNKRVEDIHPTVPNPYNLLSGLPPSHQWYTVLDLKDAFFCLRLHPTSQPLFAFEWRDPEMGISGQLTWTRLPQGFKNSPTLFNEALHRDLADFRIQHPDLILLQYVDDLLLAATSELDCQQGTRALLQTLGNLGYRASAKKAQICQKQVKYLGYLLKEGQRWLTEARKETVMGQPTPKTPRQLREFLGKAGFCRLFIPGFAEMAAPLYPLTKPGTLFNWGPDQQKAYQEIKQALLTAPALGLPDLTKPFELFVDEKQGYAKGVLTQKLGPWRRPVAYLSKKLDPVAAGWPPCLRMVAAIAVLTKDAGKLTMGQPLVILAPHAVEALVKQPPDRWLSNARMTHYQALLLDTDRVQFGPVVALNPATLLPLPEEGLQHNCLDILAEAHGTRPDLTDQPLPDADHTWYTDGSSLLQEGQRKAGAAVTTETEVIWAKALPAGTSAQRAELIALTQALKMAEGKKLNVYTDSRYAFATAHIHGEIYRRRGWLTSEGKEIKNKDEILALLKALFLPKRLSIIHCPGHQKGHSAEARGNRMADQAARKAAITETPDTSTLLIENSSPSGGSKRTADGSEFEAGKRTADGSEFEKRTADGSEFESPKKKAKVE

SEQ ID NO: 2673 - protein, 2116 aa, synthetic construct
MPAAKRVKLDGGDKKYSIGLDIGTNSVGWAVITDEYKVPSKKFKVLGNTDRHSIKKNLIGALLFDSGETAEATRLKRTARRRYTRRKNRICYLQEIFSNEMAKVDDSFFHRLEESFLVEEDKKHERHPIFGNIVDEVAYHEKYPTIYHLRKKLVDSTDKADLRLIYLALAHMIKFRGHFLIEGDLNPDNSDVDKLFIQLVQTYNQLFEENPINASGVDAKAILSARLSKSRRLENLIAQLPGEKKNGLFGNLIALSLGLTPNFKSNFDLAEDAKLQLSKDTYDDDLDNLLAQIGDQYADLFLAAKNLSDAILLSDILRVNTEITKAPLSASMIKRYDEHHQDLTLLKALVRQQLPEKYKEIFFDQSKNGYAGYIDGGASQEEFYKFIKPILEKMDGTEELLVKLNREDLLRKQRTFDNGSIPHQIHLGELHAILRRQEDFYPFLKDNREKIEKILTFRIPYYVGPLARGNSRFAWMTRKSEETITPWNFEEVVDKGASAQSFIERMTNFDKNLPNEKVLPKHSLLYEYFTVYNELTKVKYVTEGMRKPAFLSGEQKKAIVDLLFKTNRKVTVKQLKEDYFKKIECFDSVEISGVEDRFNASLGTYHDLLKIIKDKDFLDNEENEDILEDIVLTLTLFEDREMIEERLKTYAHLFDDKVMKQLKRRRYTGWGRLSRKLINGIRDKQSGKTILDFLKSDGFANRNFMQLIHDDSLTFKEDIQKAQVSGQGDSLHEHIANLAGSPAIKKGILQTVKVVDELVKVMGRHKPENIVIEMARENQTTQKGQKNSRERMKRIEEGIKELGSQILKEHPVENTQLQNEKLYLYYLQNGRDMYVDQELDINRLSDYDVDHIVPQSFLKDDSIDNKVLTRSDKARGKSDNVPSEEVVKKMKNYWRQLLNAKLITQRKFDNLTKAERGGLSELDKAGFIKRQLVETRQITKHVAQILDSRMNTKYDENDKLIREVKVITLKSKLVSDFRKDFQFYKVREINNYHHAHDAYLNAVVGTALIKKYPKLESEFVYGDYKVYDVRKMIAKSEQEIGKATAKYFFYSNIMNFFKTEITLANGEIRKRPLIETNGETGEIVWDKGRDFATVRKVLSMPQVNIVKKTEVQTGGFSKESILPKRNSDKLIARKKDWDPKKYGGFDSPTVAYSVLVVAKVEKGKSKKLKSVKELLGITIMERSSFEKNPIDFLEAKGYKEVKKDLIIKLPKYSLFELENGRKRMLASAGELQKGNELALPSKYVNFLYLASHYEKLKGSPEDNEQKQLFVEQHKHYLDEIIEQISEFSKRVILADANLDKVLSAYNKHRDKPIREQAENIIHLFTLTNLGAPAAFKYFDTTIDRKRYTSTKEVLDATLIHQSITGLYETRIDLSQLGGDGGGGSEAAAKGSSGGTLNIEDEYRLHETSKEPDVSLGSTWLSDFPQAWAETGGMGLAVRQAPLIIPLKATSTPVSIKQYPMSQEARLGIKPHIQRLLDQGILVPCQSPWNTPLLPVKKPGTNDYRPVQDLREVNKRVEDIHPTVPNPYNLLSGLPPSHQWYTVLDLKDAFFCLRLHPTSQPLFAFEWRDPEMGISGQLTWTRLPQGFKNSPTLFNEALHRDLADFRIQHPDLILLQYVDDLLLAATSELDCQQGTRALLQTLGNLGYRASAKKAQICQKQVKYLGYLLKEGQRWLTEARKETVMGQPTPKTPRQLREFLGKAGFCRLFIPGFAEMAAPLYPLTKPGTLFNWGPDQQKAYQEIKQALLTAPALGLPDLTKPFELFVDEKQGYAKGVLTQKLGPWRRPVAYLSKKLDPVAAGWPPCLRMVAAIAVLTKDAGKLTMGQPLVILAPHAVEALVKQPPDRWLSNARMTHYQALLLDTDRVQFGPVVALNPATLLPLPEEGLQHNCLDILAEAHGTRPDLTDQPLPDADHTWYTDGSSLLQEGQRKAGAAVTTETEVIWAKALPAGTSAQRAELIALTQALKMAEGKKLNVYTDSRYAFATAHIHGEIYRRRGWLTSEGKEIKNKDEILALLKALFLPKRLSIIHCPGHQKGHSAEARGNRMADQAARKAAITETPDTSTLLIENSSPSGGSKRTADGSEFEAGKRTADGSEFEKRTADGSEFESPKKKAKVE

SEQ ID NO: 2674 - protein, 2116 aa, synthetic construct
MPAAKRVKLDGGDKKYSIGLDIGTNSVGWAVITDEYKVPSKKFKVLGNTDRHSIKKNLIGALLFDSGETAEATRLKRTARRRYTRRKNRICYLQEIFSNEMAKVDDSFFHRLEESFLVEEDKKHERHPIFGNIVDEVAYHEKYPTIYHLRKKLVDSTDKADLRLIYLALAHMIKFRGHFLIEGDLNPDNSDVDKLFIQLVQTYNQLFEENPINASGVDAKAILSARLSKSRRLENLIAQLPGEKKNGLFGNLIALSLGLTPNFKSNFDLAEDAKLQLSKDTYDDDLDNLLAQIGDQYADLFLAAKNLSDAILLSDILRVNTEITKAPLSASMIKRYDEHHQDLTLLKALVRQQLPEKYKEIFFDQSKNGYAGYIDGGASQEEFYKFIKPILEKMDGTEELLVKLNREDLLRKQRTFDNGSIPHQIHLGELHAILRRQEDFYPFLKDNREKIEKILTFRIPYYVGPLARGNSRFAWMTRKSEETITPWNFEEVVDKGASAQSFIERMTNFDKNLPNEKVLPKHSLLYEYFTVYNELTKVKYVTEGMRKPAFLSGEQKKAIVDLLFKTNRKVTVKQLKEDYFKKIECFDSVEISGVEDRFNASLGTYHDLLKIIKDKDFLDNEENEDILEDIVLTLTLFEDREMIEERLKTYAHLFDDKVMKQLKRRRYTGWGRLSRKLINGIRDKQSGKTILDFLKSDGFANRNFMQLIHDDSLTFKEDIQKAQVSGQGDSLHEHIANLAGSPAIKKGILQTVKVVDELVKVMGRHKPENIVIEMARENQTTQKGQKNSRERMKRIEEGIKELGSQILKEHPVENTQLQNEKLYLYYLQNGRDMYVDQELDINRLSDYDVDHIVPQSFLKDDSIDNKVLTRSDKARGKSDNVPSEEVVKKMKNYWRQLLNAKLITQRKFDNLTKAERGGLSELDKAGFIKRQLVETRQITKHVAQILDSRMNTKYDENDKLIREVKVITLKSKLVSDFRKDFQFYKVREINNYHHAHDAYLNAVVGTALIKKYPKLESEFVYGDYKVYDVRKMIAKSEQEIGKATAKYFFYSNIMNFFKTEITLANGEIRKRPLIETNGETGEIVWDKGRDFATVRKVLSMPQVNIVKKTEVQTGGFSKESILPKRNSDKLIARKKDWDPKKYGGFDSPTVAYSVLVVAKVEKGKSKKLKSVKELLGITIMERSSFEKNPIDFLEAKGYKEVKKDLIIKLPKYSLFELENGRKRMLASAGELQKGNELALPSKYVNFLYLASHYEKLKGSPEDNEQKQLFVEQHKHYLDEIIEQISEFSKRVILADANLDKVLSAYNKHRDKPIREQAENIIHLFTLTNLGAPAAFKYFDTTIDRKRYTSTKEVLDATLIHQSITGLYETRIDLSQLGGDGGEAAAKPAPGGSGGTLNIEDEYRLHETSKEPDVSLGSTWLSDFPQAWAETGGMGLAVRQAPLIIPLKATSTPVSIKQYPMSQEARLGIKPHIQRLLDQGILVPCQSPWNTPLLPVKKPGTNDYRPVQDLREVNKRVEDIHPTVPNPYNLLSGLPPSHQWYTVLDLKDAFFCLRLHPTSQPLFAFEWRDPEMGISGQLTWTRLPQGFKNSPTLFNEALHRDLADFRIQHPDLILLQYVDDLLLAATSELDCQQGTRALLQTLGNLGYRASAKKAQICQKQVKYLGYLLKEGQRWLTEARKETVMGQPTPKTPRQLREFLGKAGFCRLFIPGFAEMAAPLYPLTKPGTLFNWGPDQQKAYQEIKQALLTAPALGLPDLTKPFELFVDEKQGYAKGVLTQKLGPWRRPVAYLSKKLDPVAAGWPPCLRMVAAIAVLTKDAGKLTMGQPLVILAPHAVEALVKQPPDRWLSNARMTHYQALLLDTDRVQFGPVVALNPATLLPLPEEGLQHNCLDILAEAHGTRPDLTDQPLPDADHTWYTDGSSLLQEGQRKAGAAVTTETEVIWAKALPAGTSAQRAELIALTQALKMAEGKKLNVYTDSRYAFATAHIHGEIYRRRGWLTSEGKEIKNKDEILALLKALFLPKRLSIIHCPGHQKGHSAEARGNRMADQAARKAAITETPDTSTLLIENSSPSGGSKRTADGSEFEAGKRTADGSEFEKRTADGSEFESPKKKAKVE

SEQ ID NO: 2675 - protein, 2114 aa, synthetic construct
MPAAKRVKLDGGDKKYSIGLDIGTNSVGWAVITDEYKVPSKKFKVLGNTDRHSIKKNLIGALLFDSGETAEATRLKRTARRRYTRRKNRICYLQEIFSNEMAKVDDSFFHRLEESFLVEEDKKHERHPIFGNIVDEVAYHEKYPTIYHLRKKLVDSTDKADLRLIYLALAHMIKFRGHFLIEGDLNPDNSDVDKLFIQLVQTYNQLFEENPINASGVDAKAILSARLSKSRRLENLIAQLPGEKKNGLFGNLIALSLGLTPNFKSNFDLAEDAKLQLSKDTYDDDLDNLLAQIGDQYADLFLAAKNLSDAILLSDILRVNTEITKAPLSASMIKRYDEHHQDLTLLKALVRQQLPEKYKEIFFDQSKNGYAGYIDGGASQEEFYKFIKPILEKMDGTEELLVKLNREDLLRKQRTFDNGSIPHQIHLGELHAILRRQEDFYPFLKDNREKIEKILTFRIPYYVGPLARGNSRFAWMTRKSEETITPWNFEEVVDKGASAQSFIERMTNFDKNLPNEKVLPKHSLLYEYFTVYNELTKVKYVTEGMRKPAFLSGEQKKAIVDLLFKTNRKVTVKQLKEDYFKKIECFDSVEISGVEDRFNASLGTYHDLLKIIKDKDFLDNEENEDILEDIVLTLTLFEDREMIEERLKTYAHLFDDKVMKQLKRRRYTGWGRLSRKLINGIRDKQSGKTILDFLKSDGFANRNFMQLIHDDSLTFKEDIQKAQVSGQGDSLHEHIANLAGSPAIKKGILQTVKVVDELVKVMGRHKPENIVIEMARENQTTQKGQKNSRERMKRIEEGIKELGSQILKEHPVENTQLQNEKLYLYYLQNGRDMYVDQELDINRLSDYDVDHIVPQSFLKDDSIDNKVLTRSDKARGKSDNVPSEEVVKKMKNYWRQLLNAKLITQRKFDNLTKAERGGLSELDKAGFIKRQLVETRQITKHVAQILDSRMNTKYDENDKLIREVKVITLKSKLVSDFRKDFQFYKVREINNYHHAHDAYLNAVVGTALIKKYPKLESEFVYGDYKVYDVRKMIAKSEQEIGKATAKYFFYSNIMNFFKTEITLANGEIRKRPLIETNGETGEIVWDKGRDFATVRKVLSMPQVNIVKKTEVQTGGFSKESILPKRNSDKLIARKKDWDPKKYGGFDSPTVAYSVLVVAKVEKGKSKKLKSVKELLGITIMERSSFEKNPIDFLEAKGYKEVKKDLIIKLPKYSLFELENGRKRMLASAGELQKGNELALPSKYVNFLYLASHYEKLKGSPEDNEQKQLFVEQHKHYLDEIIEQISEFSKRVILADANLDKVLSAYNKHRDKPIREQAENIIHLFTLTNLGAPAAFKYFDTTIDRKRYTSTKEVLDATLIHQSITGLYETRIDLSQLGGDGGGGSGSSGGGGGTLNIEDEYRLHETSKEPDVSLGSTWLSDFPQAWAETGGMGLAVRQAPLIIPLKATSTPVSIKQYPMSQEARLGIKPHIQRLLDQGILVPCQSPWNTPLLPVKKPGTNDYRPVQDLREVNKRVEDIHPTVPNPYNLLSGLPPSHQWYTVLDLKDAFFCLRLHPTSQPLFAFEWRDPEMGISGQLTWTRLPQGFKNSPTLFNEALHRDLADFRIQHPDLILLQYVDDLLLAATSELDCQQGTRALLQTLGNLGYRASAKKAQICQKQVKYLGYLLKEGQRWLTEARKETVMGQPTPKTPRQLREFLGKAGFCRLFIPGFAEMAAPLYPLTKPGTLFNWGPDQQKAYQEIKQALLTAPALGLPDLTKPFELFVDEKQGYAKGVLTQKLGPWRRPVAYLSKKLDPVAAGWPPCLRMVAAIAVLTKDAGKLTMGQPLVILAPHAVEALVKQPPDRWLSNARMTHYQALLLDTDRVQFGPVVALNPATLLPLPEEGLQHNCLDILAEAHGTRPDLTDQPLPDADHTWYTDGSSLLQEGQRKAGAAVTTETEVIWAKALPAGTSAQRAELIALTQALKMAEGKKLNVYTDSRYAFATAHIHGEIYRRRGWLTSEGKEIKNKDEILALLKALFLPKRLSIIHCPGHQKGHSAEARGNRMADQAARKAAITETPDTSTLLIENSSPSGGSKRTADGSEFEAGKRTADGSEFEKRTADGSEFESPKKKAKVE

SEQ ID NO: 2676 - protein, 2111 aa, synthetic construct
MPAAKRVKLDGGDKKYSIGLDIGTNSVGWAVITDEYKVPSKKFKVLGNTDRHSIKKNLIGALLFDSGETAEATRLKRTARRRYTRRKNRICYLQEIFSNEMAKVDDSFFHRLEESFLVEEDKKHERHPIFGNIVDEVAYHEKYPTIYHLRKKLVDSTDKADLRLIYLALAHMIKFRGHFLIEGDLNPDNSDVDKLFIQLVQTYNQLFEENPINASGVDAKAILSARLSKSRRLENLIAQLPGEKKNGLFGNLIALSLGLTPNFKSNFDLAEDAKLQLSKDTYDDDLDNLLAQIGDQYADLFLAAKNLSDAILLSDILRVNTEITKAPLSASMIKRYDEHHQDLTLLKALVRQQLPEKYKEIFFDQSKNGYAGYIDGGASQEEFYKFIKPILEKMDGTEELLVKLNREDLLRKQRTFDNGSIPHQIHLGELHAILRRQEDFYPFLKDNREKIEKILTFRIPYYVGPLARGNSRFAWMTRKSEETITPWNFEEVVDKGASAQSFIERMTNFDKNLPNEKVLPKHSLLYEYFTVYNELTKVKYVTEGMRKPAFLSGEQKKAIVDLLFKTNRKVTVKQLKEDYFKKIECFDSVEISGVEDRFNASLGTYHDLLKIIKDKDFLDNEENEDILEDIVLTLTLFEDREMIEERLKTYAHLFDDKVMKQLKRRRYTGWGRLSRKLINGIRDKQSGKTILDFLKSDGFANRNFMQLIHDDSLTFKEDIQKAQVSGQGDSLHEHIANLAGSPAIKKGILQTVKVVDELVKVMGRHKPENIVIEMARENQTTQKGQKNSRERMKRIEEGIKELGSQILKEHPVENTQLQNEKLYLYYLQNGRDMYVDQELDINRLSDYDVDHIVPQSFLKDDSIDNKVLTRSDKARGKSDNVPSEEVVKKMKNYWRQLLNAKLITQRKFDNLTKAERGGLSELDKAGFIKRQLVETRQITKHVAQILDSRMNTKYDENDKLIREVKVITLKSKLVSDFRKDFQFYKVREINNYHHAHDAYLNAVVGTALIKKYPKLESEFVYGDYKVYDVRKMIAKSEQEIGKATAKYFFYSNIMNFFKTEITLANGEIRKRPLIETNGETGEIVWDKGRDFATVRKVLSMPQVNIVKKTEVQTGGFSKESILPKRNSDKLIARKKDWDPKKYGGFDSPTVAYSVLVVAKVEKGKSKKLKSVKELLGITIMERSSFEKNPIDFLEAKGYKEVKKDLIIKLPKYSLFELENGRKRMLASAGELQKGNELALPSKYVNFLYLASHYEKLKGSPEDNEQKQLFVEQHKHYLDEIIEQISEFSKRVILADANLDKVLSAYNKHRDKPIREQAENIIHLFTLTNLGAPAAFKYFDTTIDRKRYTSTKEVLDATLIHQSITGLYETRIDLSQLGGDGGGSSGGGGGTLNIEDEYRLHETSKEPDVSLGSTWLSDFPQAWAETGGMGLAVRQAPLIIPLKATSTPVSIKQYPMSQEARLGIKPHIQRLLDQGILVPCQSPWNTPLLPVKKPGTNDYRPVQDLREVNKRVEDIHPTVPNPYNLLSGLPPSHQWYTVLDLKDAFFCLRLHPTSQPLFAFEWRDPEMGISGQLTWTRLPQGFKNSPTLFNEALHRDLADFRIQHPDLILLQYVDDLLLAATSELDCQQGTRALLQTLGNLGYRASAKKAQICQKQVKYLGYLLKEGQRWLTEARKETVMGQPTPKTPRQLREFLGKAGFCRLFIPGFAEMAAPLYPLTKPGTLFNWGPDQQKAYQEIKQALLTAPALGLPDLTKPFELFVDEKQGYAKGVLTQKLGPWRRPVAYLSKKLDPVAAGWPPCLRMVAAIAVLTKDAGKLTMGQPLVILAPHAVEALVKQPPDRWLSNARMTHYQALLLDTDRVQFGPVVALNPATLLPLPEEGLQHNCLDILAEAHGTRPDLTDQPLPDADHTWYTDGSSLLQEGQRKAGAAVTTETEVIWAKALPAGTSAQRAELIALTQALKMAEGKKLNVYTDSRYAFATAHIHGEIYRRRGWLTSEGKEIKNKDEILALLKALFLPKRLSIIHCPGHQKGHSAEARGNRMADQAARKAAITETPDTSTLLIENSSPSGGSKRTADGSEFEAGKRTADGSEFEKRTADGSEFESPKKKAKVE

SEQ ID NO: 2677 - protein, 2116 aa, synthetic construct
MPAAKRVKLDGGDKKYSIGLDIGTNSVGWAVITDEYKVPSKKFKVLGNTDRHSIKKNLIGALLFDSGETAEATRLKRTARRRYTRRKNRICYLQEIFSNEMAKVDDSFFHRLEESFLVEEDKKHERHPIFGNIVDEVAYHEKYPTIYHLRKKLVDSTDKADLRLIYLALAHMIKFRGHFLIEGDLNPDNSDVDKLFIQLVQTYNQLFEENPINASGVDAKAILSARLSKSRRLENLIAQLPGEKKNGLFGNLIALSLGLTPNFKSNFDLAEDAKLQLSKDTYDDDLDNLLAQIGDQYADLFLAAKNLSDAILLSDILRVNTEITKAPLSASMIKRYDEHHQDLTLLKALVRQQLPEKYKEIFFDQSKNGYAGYIDGGASQEEFYKFIKPILEKMDGTEELLVKLNREDLLRKQRTFDNGSIPHQIHLGELHAILRRQEDFYPFLKDNREKIEKILTFRIPYYVGPLARGNSRFAWMTRKSEETITPWNFEEVVDKGASAQSFIERMTNFDKNLPNEKVLPKHSLLYEYFTVYNELTKVKYVTEGMRKPAFLSGEQKKAIVDLLFKTNRKVTVKQLKEDYFKKIECFDSVEISGVEDRFNASLGTYHDLLKIIKDKDFLDNEENEDILEDIVLTLTLFEDREMIEERLKTYAHLFDDKVMKQLKRRRYTGWGRLSRKLINGIRDKQSGKTILDFLKSDGFANRNFMQLIHDDSLTFKEDIQKAQVSGQGDSLHEHIANLAGSPAIKKGILQTVKVVDELVKVMGRHKPENIVIEMARENQTTQKGQKNSRERMKRIEEGIKELGSQILKEHPVENTQLQNEKLYLYYLQNGRDMYVDQELDINRLSDYDVDHIVPQSFLKDDSIDNKVLTRSDKARGKSDNVPSEEVVKKMKNYWRQLLNAKLITQRKFDNLTKAERGGLSELDKAGFIKRQLVETRQITKHVAQILDSRMNTKYDENDKLIREVKVITLKSKLVSDFRKDFQFYKVREINNYHHAHDAYLNAVVGTALIKKYPKLESEFVYGDYKVYDVRKMIAKSEQEIGKATAKYFFYSNIMNFFKTEITLANGEIRKRPLIETNGETGEIVWDKGRDFATVRKVLSMPQVNIVKKTEVQTGGFSKESILPKRNSDKLIARKKDWDPKKYGGFDSPTVAYSVLVVAKVEKGKSKKLKSVKELLGITIMERSSFEKNPIDFLEAKGYKEVKKDLIIKLPKYSLFELENGRKRMLASAGELQKGNELALPSKYVNFLYLASHYEKLKGSPEDNEQKQLFVEQHKHYLDEIIEQISEFSKRVILADANLDKVLSAYNKHRDKPIREQAENIIHLFTLTNLGAPAAFKYFDTTIDRKRYTSTKEVLDATLIHQSITGLYETRIDLSQLGGDGGGGGEAAAKGSSGGTLNIEDEYRLHETSKEPDVSLGSTWLSDFPQAWAETGGMGLAVRQAPLIIPLKATSTPVSIKQYPMSQEARLGIKPHIQRLLDQGILVPCQSPWNTPLLPVKKPGTNDYRPVQDLREVNKRVEDIHPTVPNPYNLLSGLPPSHQWYTVLDLKDAFFCLRLHPTSQPLFAFEWRDPEMGISGQLTWTRLPQGFKNSPTLFNEALHRDLADFRIQHPDLILLQYVDDLLLAATSELDCQQGTRALLQTLGNLGYRASAKKAQICQKQVKYLGYLLKEGQRWLTEARKETVMGQPTPKTPRQLREFLGKAGFCRLFIPGFAEMAAPLYPLTKPGTLFNWGPDQQKAYQEIKQALLTAPALGLPDLTKPFELFVDEKQGYAKGVLTQKLGPWRRPVAYLSKKLDPVAAGWPPCLRMVAAIAVLTKDAGKLTMGQPLVILAPHAVEALVKQPPDRWLSNARMTHYQALLLDTDRVQFGPVVALNPATLLPLPEEGLQHNCLDILAEAHGTRPDLTDQPLPDADHTWYTDGSSLLQEGQRKAGAAVTTETEVIWAKALPAGTSAQRAELIALTQALKMAEGKKLNVYTDSRYAFATAHIHGEIYRRRGWLTSEGKEIKNKDEILALLKALFLPKRLSIIHCPGHQKGHSAEARGNRMADQAARKAAITETPDTSTLLIENSSPSGGSKRTADGSEFEAGKRTADGSEFEKRTADGSEFESPKKKAKVE

SEQ ID NO: 2678 - protein, 2130 aa, synthetic construct
MPAAKRVKLDGGDKKYSIGLDIGTNSVGWAVITDEYKVPSKKFKVLGNTDRHSIKKNLIGALLFDSGETAEATRLKRTARRRYTRRKNRICYLQEIFSNEMAKVDDSFFHRLEESFLVEEDKKHERHPIFGNIVDEVAYHEKYPTIYHLRKKLVDSTDKADLRLIYLALAHMIKFRGHFLIEGDLNPDNSDVDKLFIQLVQTYNQLFEENPINASGVDAKAILSARLSKSRRLENLIAQLPGEKKNGLFGNLIALSLGLTPNFKSNFDLAEDAKLQLSKDTYDDDLDNLLAQIGDQYADLFLAAKNLSDAILLSDILRVNTEITKAPLSASMIKRYDEHHQDLTLLKALVRQQLPEKYKEIFFDQSKNGYAGYIDGGASQEEFYKFIKPILEKMDGTEELLVKLNREDLLRKQRTFDNGSIPHQIHLGELHAILRRQEDFYPFLKDNREKIEKILTFRIPYYVGPLARGNSRFAWMTRKSEETITPWNFEEVVDKGASAQSFIERMTNFDKNLPNEKVLPKHSLLYEYFTVYNELTKVKYVTEGMRKPAFLSGEQKKAIVDLLFKTNRKVTVKQLKEDYFKKIECFDSVEISGVEDRFNASLGTYHDLLKIIKDKDFLDNEENEDILEDIVLTLTLFEDREMIEERLKTYAHLFDDKVMKQLKRRRYTGWGRLSRKLINGIRDKQSGKTILDFLKSDGFANRNFMQLIHDDSLTFKEDIQKAQVSGQGDSLHEHIANLAGSPAIKKGILQTVKVVDELVKVMGRHKPENIVIEMARENQTTQKGQKNSRERMKRIEEGIKELGSQILKEHPVENTQLQNEKLYLYYLQNGRDMYVDQELDINRLSDYDVDHIVPQSFLKDDSIDNKVLTRSDKARGKSDNVPSEEVVKKMKNYWRQLLNAKLITQRKFDNLTKAERGGLSELDKAGFIKRQLVETRQITKHVAQILDSRMNTKYDENDKLIREVKVITLKSKLVSDFRKDFQFYKVREINNYHHAHDAYLNAVVGTALIKKYPKLESEFVYGDYKVYDVRKMIAKSEQEIGKATAKYFFYSNIMNFFKTEITLANGEIRKRPLIETNGETGEIVWDKGRDFATVRKVLSMPQVNIVKKTEVQTGGFSKESILPKRNSDKLIARKKDWDPKKYGGFDSPTVAYSVLVVAKVEKGKSKKLKSVKELLGITIMERSSFEKNPIDFLEAKGYKEVKKDLIIKLPKYSLFELENGRKRMLASAGELQKGNELALPSKYVNFLYLASHYEKLKGSPEDNEQKQLFVEQHKHYLDEIIEQISEFSKRVILADANLDKVLSAYNKHRDKPIREQAENIIHLFTLTNLGAPAAFKYFDTTIDRKRYTSTKEVLDATLIHQSITGLYETRIDLSQLGGDGGEAAAKEAAAKEAAAKEAAAKEAAAKGGTLNIEDEYRLHETSKEPDVSLGSTWLSDFPQAWAETGGMGLAVRQAPLIIPLKATSTPVSIKQYPMSQEARLGIKPHIQRLLDQGILVPCQSPWNTPLLPVKKPGTNDYRPVQDLREVNKRVEDIHPTVPNPYNLLSGLPPSHQWYTVLDLKDAFFCLRLHPTSQPLFAFEWRDPEMGISGQLTWTRLPQGFKNSPTLFNEALHRDLADFRIQHPDLILLQYVDDLLLAATSELDCQQGTRALLQTLGNLGYRASAKKAQICQKQVKYLGYLLKEGQRWLTEARKETVMGQPTPKTPRQLREFLGKAGFCRLFIPGFAEMAAPLYPLTKPGTLFNWGPDQQKAYQEIKQALLTAPALGLPDLTKPFELFVDEKQGYAKGVLTQKLGPWRRPVAYLSKKLDPVAAGWPPCLRMVAAIAVLTKDAGKLTMGQPLVILAPHAVEALVKQPPDRWLSNARMTHYQALLLDTDRVQFGPVVALNPATLLPLPEEGLQHNCLDILAEAHGTRPDLTDQPLPDADHTWYTDGSSLLQEGQRKAGAAVTTETEVIWAKALPAGTSAQRAELIALTQALKMAEGKKLNVYTDSRYAFATAHIHGEIYRRRGWLTSEGKEIKNKDEILALLKALFLPKRLSIIHCPGHQKGHSAEARGNRMADQAARKAAITETPDTSTLLIENSSPSGGSKRTADGSEFEAGKRTADGSEFEKRTADGSEFESPKKKAKVE

SEQ ID NO: 2679 - protein, 2114 aa, synthetic construct
MPAAKRVKLDGGDKKYSIGLDIGTNSVGWAVITDEYKVPSKKFKVLGNTDRHSIKKNLIGALLFDSGETAEATRLKRTARRRYTRRKNRICYLQEIFSNEMAKVDDSFFHRLEESFLVEEDKKHERHPIFGNIVDEVAYHEKYPTIYHLRKKLVDSTDKADLRLIYLALAHMIKFRGHFLIEGDLNPDNSDVDKLFIQLVQTYNQLFEENPINASGVDAKAILSARLSKSRRLENLIAQLPGEKKNGLFGNLIALSLGLTPNFKSNFDLAEDAKLQLSKDTYDDDLDNLLAQIGDQYADLFLAAKNLSDAILLSDILRVNTEITKAPLSASMIKRYDEHHQDLTLLKALVRQQLPEKYKEIFFDQSKNGYAGYIDGGASQEEFYKFIKPILEKMDGTEELLVKLNREDLLRKQRTFDNGSIPHQIHLGELHAILRRQEDFYPFLKDNREKIEKILTFRIPYYVGPLARGNSRFAWMTRKSEETITPWNFEEVVDKGASAQSFIERMTNFDKNLPNEKVLPKHSLLYEYFTVYNELTKVKYVTEGMRKPAFLSGEQKKAIVDLLFKTNRKVTVKQLKEDYFKKIECFDSVEISGVEDRFNASLGTYHDLLKIIKDKDFLDNEENEDILEDIVLTLTLFEDREMIEERLKTYAHLFDDKVMKQLKRRRYTGWGRLSRKLINGIRDKQSGKTILDFLKSDGFANRNFMQLIHDDSLTFKEDIQKAQVSGQGDSLHEHIANLAGSPAIKKGILQTVKVVDELVKVMGRHKPENIVIEMARENQTTQKGQKNSRERMKRIEEGIKELGSQILKEHPVENTQLQNEKLYLYYLQNGRDMYVDQELDINRLSDYDVDHIVPQSFLKDDSIDNKVLTRSDKARGKSDNVPSEEVVKKMKNYWRQLLNAKLITQRKFDNLTKAERGGLSELDKAGFIKRQLVETRQITKHVAQILDSRMNTKYDENDKLIREVKVITLKSKLVSDFRKDFQFYKVREINNYHHAHDAYLNAVVGTALIKKYPKLESEFVYGDYKVYDVRKMIAKSEQEIGKATAKYFFYSNIMNFFKTEITLANGEIRKRPLIETNGETGEIVWDKGRDFATVRKVLSMPQVNIVKKTEVQTGGFSKESILPKRNSDKLIARKKDWDPKKYGGFDSPTVAYSVLVVAKVEKGKSKKLKSVKELLGITIMERSSFEKNPIDFLEAKGYKEVKKDLIIKLPKYSLFELENGRKRMLASAGELQKGNELALPSKYVNFLYLASHYEKLKGSPEDNEQKQLFVEQHKHYLDEIIEQISEFSKRVILADANLDKVLSAYNKHRDKPIREQAENIIHLFTLTNLGAPAAFKYFDTTIDRKRYTSTKEVLDATLIHQSITGLYETRIDLSQLGGDGGGGSGSSPAPGGTLNIEDEYRLHETSKEPDVSLGSTWLSDFPQAWAETGGMGLAVRQAPLIIPLKATSTPVSIKQYPMSQEARLGIKPHIQRLLDQGILVPCQSPWNTPLLPVKKPGTNDYRPVQDLREVNKRVEDIHPTVPNPYNLLSGLPPSHQWYTVLDLKDAFFCLRLHPTSQPLFAFEWRDPEMGISGQLTWTRLPQGFKNSPTLFNEALHRDLADFRIQHPDLILLQYVDDLLLAATSELDCQQGTRALLQTLGNLGYRASAKKAQICQKQVKYLGYLLKEGQRWLTEARKETVMGQPTPKTPRQLREFLGKAGFCRLFIPGFAEMAAPLYPLTKPGTLFNWGPDQQKAYQEIKQALLTAPALGLPDLTKPFELFVDEKQGYAKGVLTQKLGPWRRPVAYLSKKLDPVAAGWPPCLRMVAAIAVLTKDAGKLTMGQPLVILAPHAVEALVKQPPDRWLSNARMTHYQALLLDTDRVQFGPVVALNPATLLPLPEEGLQHNCLDILAEAHGTRPDLTDQPLPDADHTWYTDGSSLLQEGQRKAGAAVTTETEVIWAKALPAGTSAQRAELIALTQALKMAEGKKLNVYTDSRYAFATAHIHGEIYRRRGWLTSEGKEIKNKDEILALLKALFLPKRLSIIHCPGHQKGHSAEARGNRMADQAARKAAITETPDTSTLLIENSSPSGGSKRTADGSEFEAGKRTADGSEFEKRTADGSEFESPKKKAKVE

SEQ ID NO: 2680 - protein, 2120 aa, synthetic construct
MPAAKRVKLDGGDKKYSIGLDIGTNSVGWAVITDEYKVPSKKFKVLGNTDRHSIKKNLIGALLFDSGETAEATRLKRTARRRYTRRKNRICYLQEIFSNEMAKVDDSFFHRLEESFLVEEDKKHERHPIFGNIVDEVAYHEKYPTIYHLRKKLVDSTDKADLRLIYLALAHMIKFRGHFLIEGDLNPDNSDVDKLFIQLVQTYNQLFEENPINASGVDAKAILSARLSKSRRLENLIAQLPGEKKNGLFGNLIALSLGLTPNFKSNFDLAEDAKLQLSKDTYDDDLDNLLAQIGDQYADLFLAAKNLSDAILLSDILRVNTEITKAPLSASMIKRYDEHHQDLTLLKALVRQQLPEKYKEIFFDQSKNGYAGYIDGGASQEEFYKFIKPILEKMDGTEELLVKLNREDLLRKQRTFDNGSIPHQIHLGELHAILRRQEDFYPFLKDNREKIEKILTFRIPYYVGPLARGNSRFAWMTRKSEETITPWNFEEVVDKGASAQSFIERMTNFDKNLPNEKVLPKHSLLYEYFTVYNELTKVKYVTEGMRKPAFLSGEQKKAIVDLLFKTNRKVTVKQLKEDYFKKIECFDSVEISGVEDRFNASLGTYHDLLKIIKDKDFLDNEENEDILEDIVLTLTLFEDREMIEERLKTYAHLFDDKVMKQLKRRRYTGWGRLSRKLINGIRDKQSGKTILDFLKSDGFANRNFMQLIHDDSLTFKEDIQKAQVSGQGDSLHEHIANLAGSPAIKKGILQTVKVVDELVKVMGRHKPENIVIEMARENQTTQKGQKNSRERMKRIEEGIKELGSQILKEHPVENTQLQNEKLYLYYLQNGRDMYVDQELDINRLSDYDVDHIVPQSFLKDDSIDNKVLTRSDKARGKSDNVPSEEVVKKMKNYWRQLLNAKLITQRKFDNLTKAERGGLSELDKAGFIKRQLVETRQITKHVAQILDSRMNTKYDENDKLIREVKVITLKSKLVSDFRKDFQFYKVREINNYHHAHDAYLNAVVGTALIKKYPKLESEFVYGDYKVYDVRKMIAKSEQEIGKATAKYFFYSNIMNFFKTEITLANGEIRKRPLIETNGETGEIVWDKGRDFATVRKVLSMPQVNIVKKTEVQTGGFSKESILPKRNSDKLIARKKDWDPKKYGGFDSPTVAYSVLVVAKVEKGKSKKLKSVKELLGITIMERSSFEKNPIDFLEAKGYKEVKKDLIIKLPKYSLFELENGRKRMLASAGELQKGNELALPSKYVNFLYLASHYEKLKGSPEDNEQKQLFVEQHKHYLDEIIEQISEFSKRVILADANLDKVLSAYNKHRDKPIREQAENIIHLFTLTNLGAPAAFKYFDTTIDRKRYTSTKEVLDATLIHQSITGLYETRIDLSQLGGDGGGGSGGSGGSGGSGGSGGTLNIEDEYRLHETSKEPDVSLGSTWLSDFPQAWAETGGMGLAVRQAPLIIPLKATSTPVSIKQYPMSQEARLGIKPHIQRLLDQGILVPCQSPWNTPLLPVKKPGTNDYRPVQDLREVNKRVEDIHPTVPNPYNLLSGLPPSHQWYTVLDLKDAFFCLRLHPTSQPLFAFEWRDPEMGISGQLTWTRLPQGFKNSPTLFNEALHRDLADFRIQHPDLILLQYVDDLLLAATSELDCQQGTRALLQTLGNLGYRASAKKAQICQKQVKYLGYLLKEGQRWLTEARKETVMGQPTPKTPRQLREFLGKAGFCRLFIPGFAEMAAPLYPLTKPGTLFNWGPDQQKAYQEIKQALLTAPALGLPDLTKPFELFVDEKQGYAKGVLTQKLGPWRRPVAYLSKKLDPVAAGWPPCLRMVAAIAVLTKDAGKLTMGQPLVILAPHAVEALVKQPPDRWLSNARMTHYQALLLDTDRVQFGPVVALNPATLLPLPEEGLQHNCLDILAEAHGTRPDLTDQPLPDADHTWYTDGSSLLQEGQRKAGAAVTTETEVIWAKALPAGTSAQRAELIALTQALKMAEGKKLNVYTDSRYAFATAHIHGEIYRRRGWLTSEGKEIKNKDEILALLKALFLPKRLSIIHCPGHQKGHSAEARGNRMADQAARKAAITETPDTSTLLIENSSPSGGSKRTADGSEFEAGKRTADGSEFEKRTADGSEFESPKKKAKVE

SEQ ID NO: 2681 - protein, 2116 aa, synthetic construct
MPAAKRVKLDGGDKKYSIGLDIGTNSVGWAVITDEYKVPSKKFKVLGNTDRHSIKKNLIGALLFDSGETAEATRLKRTARRRYTRRKNRICYLQEIFSNEMAKVDDSFFHRLEESFLVEEDKKHERHPIFGNIVDEVAYHEKYPTIYHLRKKLVDSTDKADLRLIYLALAHMIKFRGHFLIEGDLNPDNSDVDKLFIQLVQTYNQLFEENPINASGVDAKAILSARLSKSRRLENLIAQLPGEKKNGLFGNLIALSLGLTPNFKSNFDLAEDAKLQLSKDTYDDDLDNLLAQIGDQYADLFLAAKNLSDAILLSDILRVNTEITKAPLSASMIKRYDEHHQDLTLLKALVRQQLPEKYKEIFFDQSKNGYAGYIDGGASQEEFYKFIKPILEKMDGTEELLVKLNREDLLRKQRTFDNGSIPHQIHLGELHAILRRQEDFYPFLKDNREKIEKILTFRIPYYVGPLARGNSRFAWMTRKSEETITPWNFEEVVDKGASAQSFIERMTNFDKNLPNEKVLPKHSLLYEYFTVYNELTKVKYVTEGMRKPAFLSGEQKKAIVDLLFKTNRKVTVKQLKEDYFKKIECFDSVEISGVEDRFNASLGTYHDLLKIIKDKDFLDNEENEDILEDIVLTLTLFEDREMIEERLKTYAHLFDDKVMKQLKRRRYTGWGRLSRKLINGIRDKQSGKTILDFLKSDGFANRNFMQLIHDDSLTFKEDIQKAQVSGQGDSLHEHIANLAGSPAIKKGILQTVKVVDELVKVMGRHKPENIVIEMARENQTTQKGQKNSRERMKRIEEGIKELGSQILKEHPVENTQLQNEKLYLYYLQNGRDMYVDQELDINRLSDYDVDHIVPQSFLKDDSIDNKVLTRSDKARGKSDNVPSEEVVKKMKNYWRQLLNAKLITQRKFDNLTKAERGGLSELDKAGFIKRQLVETRQITKHVAQILDSRMNTKYDENDKLIREVKVITLKSKLVSDFRKDFQFYKVREINNYHHAHDAYLNAVVGTALIKKYPKLESEFVYGDYKVYDVRKMIAKSEQEIGKATAKYFFYSNIMNFFKTEITLANGEIRKRPLIETNGETGEIVWDKGRDFATVRKVLSMPQVNIVKKTEVQTGGFSKESILPKRNSDKLIARKKDWDPKKYGGFDSPTVAYSVLVVAKVEKGKSKKLKSVKELLGITIMERSSFEKNPIDFLEAKGYKEVKKDLIIKLPKYSLFELENGRKRMLASAGELQKGNELALPSKYVNFLYLASHYEKLKGSPEDNEQKQLFVEQHKHYLDEIIEQISEFSKRVILADANLDKVLSAYNKHRDKPIREQAENIIHLFTLTNLGAPAAFKYFDTTIDRKRYTSTKEVLDATLIHQSITGLYETRIDLSQLGGDGGEAAAKPAPGGGGGTLNIEDEYRLHETSKEPDVSLGSTWLSDFPQAWAETGGMGLAVRQAPLIIPLKATSTPVSIKQYPMSQEARLGIKPHIQRLLDQGILVPCQSPWNTPLLPVKKPGTNDYRPVQDLREVNKRVEDIHPTVPNPYNLLSGLPPSHQWYTVLDLKDAFFCLRLHPTSQPLFAFEWRDPEMGISGQLTWTRLPQGFKNSPTLFNEALHRDLADFRIQHPDLILLQYVDDLLLAATSELDCQQGTRALLQTLGNLGYRASAKKAQICQKQVKYLGYLLKEGQRWLTEARKETVMGQPTPKTPRQLREFLGKAGFCRLFIPGFAEMAAPLYPLTKPGTLFNWGPDQQKAYQEIKQALLTAPALGLPDLTKPFELFVDEKQGYAKGVLTQKLGPWRRPVAYLSKKLDPVAAGWPPCLRMVAAIAVLTKDAGKLTMGQPLVILAPHAVEALVKQPPDRWLSNARMTHYQALLLDTDRVQFGPVVALNPATLLPLPEEGLQHNCLDILAEAHGTRPDLTDQPLPDADHTWYTDGSSLLQEGQRKAGAAVTTETEVIWAKALPAGTSAQRAELIALTQALKMAEGKKLNVYTDSRYAFATAHIHGEIYRRRGWLTSEGKEIKNKDEILALLKALFLPKRLSIIHCPGHQKGHSAEARGNRMADQAARKAAITETPDTSTLLIENSSPSGGSKRTADGSEFEAGKRTADGSEFEKRTADGSEFESPKKKAKVE

SEQ ID NO: 2682 - protein, 2111 aa, synthetic construct
MPAAKRVKLDGGDKKYSIGLDIGTNSVGWAVITDEYKVPSKKFKVLGNTDRHSIKKNLIGALLFDSGETAEATRLKRTARRRYTRRKNRICYLQEIFSNEMAKVDDSFFHRLEESFLVEEDKKHERHPIFGNIVDEVAYHEKYPTIYHLRKKLVDSTDKADLRLIYLALAHMIKFRGHFLIEGDLNPDNSDVDKLFIQLVQTYNQLFEENPINASGVDAKAILSARLSKSRRLENLIAQLPGEKKNGLFGNLIALSLGLTPNFKSNFDLAEDAKLQLSKDTYDDDLDNLLAQIGDQYADLFLAAKNLSDAILLSDILRVNTEITKAPLSASMIKRYDEHHQDLTLLKALVRQQLPEKYKEIFFDQSKNGYAGYIDGGASQEEFYKFIKPILEKMDGTEELLVKLNREDLLRKQRTFDNGSIPHQIHLGELHAILRRQEDFYPFLKDNREKIEKILTFRIPYYVGPLARGNSRFAWMTRKSEETITPWNFEEVVDKGASAQSFIERMTNFDKNLPNEKVLPKHSLLYEYFTVYNELTKVKYVTEGMRKPAFLSGEQKKAIVDLLFKTNRKVTVKQLKEDYFKKIECFDSVEISGVEDRFNASLGTYHDLLKIIKDKDFLDNEENEDILEDIVLTLTLFEDREMIEERLKTYAHLFDDKVMKQLKRRRYTGWGRLSRKLINGIRDKQSGKTILDFLKSDGFANRNFMQLIHDDSLTFKEDIQKAQVSGQGDSLHEHIANLAGSPAIKKGILQTVKVVDELVKVMGRHKPENIVIEMARENQTTQKGQKNSRERMKRIEEGIKELGSQILKEHPVENTQLQNEKLYLYYLQNGRDMYVDQELDINRLSDYDVDHIVPQSFLKDDSIDNKVLTRSDKARGKSDNVPSEEVVKKMKNYWRQLLNAKLITQRKFDNLTKAERGGLSELDKAGFIKRQLVETRQITKHVAQILDSRMNTKYDENDKLIREVKVITLKSKLVSDFRKDFQFYKVREINNYHHAHDAYLNAVVGTALIKKYPKLESEFVYGDYKVYDVRKMIAKSEQEIGKATAKYFFYSNIMNFFKTEITLANGEIRKRPLIETNGETGEIVWDKGRDFATVRKVLSMPQVNIVKKTEVQTGGFSKESILPKRNSDKLIARKKDWDPKKYGGFDSPTVAYSVLVVAKVEKGKSKKLKSVKELLGITIMERSSFEKNPIDFLEAKGYKEVKKDLIIKLPKYSLFELENGRKRMLASAGELQKGNELALPSKYVNFLYLASHYEKLKGSPEDNEQKQLFVEQHKHYLDEIIEQISEFSKRVILADANLDKVLSAYNKHRDKPIREQAENIIHLFTLTNLGAPAAFKYFDTTIDRKRYTSTKEVLDATLIHQSITGLYETRIDLSQLGGDGGGSSGGSGGTLNIEDEYRLHETSKEPDVSLGSTWLSDFPQAWAETGGMGLAVRQAPLIIPLKATSTPVSIKQYPMSQEARLGIKPHIQRLLDQGILVPCQSPWNTPLLPVKKPGTNDYRPVQDLREVNKRVEDIHPTVPNPYNLLSGLPPSHQWYTVLDLKDAFFCLRLHPTSQPLFAFEWRDPEMGISGQLTWTRLPQGFKNSPTLFNEALHRDLADFRIQHPDLILLQYVDDLLLAATSELDCQQGTRALLQTLGNLGYRASAKKAQICQKQVKYLGYLLKEGQRWLTEARKETVMGQPTPKTPRQLREFLGKAGFCRLFIPGFAEMAAPLYPLTKPGTLFNWGPDQQKAYQEIKQALLTAPALGLPDLTKPFELFVDEKQGYAKGVLTQKLGPWRRPVAYLSKKLDPVAAGWPPCLRMVAAIAVLTKDAGKLTMGQPLVILAPHAVEALVKQPPDRWLSNARMTHYQALLLDTDRVQFGPVVALNPATLLPLPEEGLQHNCLDILAEAHGTRPDLTDQPLPDADHTWYTDGSSLLQEGQRKAGAAVTTETEVIWAKALPAGTSAQRAELIALTQALKMAEGKKLNVYTDSRYAFATAHIHGEIYRRRGWLTSEGKEIKNKDEILALLKALFLPKRLSIIHCPGHQKGHSAEARGNRMADQAARKAAITETPDTSTLLIENSSPSGGSKRTADGSEFEAGKRTADGSEFEKRTADGSEFESPKKKAKVE

SEQ ID NO: 2683 - protein, 2116 aa, synthetic construct
MPAAKRVKLDGGDKKYSIGLDIGTNSVGWAVITDEYKVPSKKFKVLGNTDRHSIKKNLIGALLFDSGETAEATRLKRTARRRYTRRKNRICYLQEIFSNEMAKVDDSFFHRLEESFLVEEDKKHERHPIFGNIVDEVAYHEKYPTIYHLRKKLVDSTDKADLRLIYLALAHMIKFRGHFLIEGDLNPDNSDVDKLFIQLVQTYNQLFEENPINASGVDAKAILSARLSKSRRLENLIAQLPGEKKNGLFGNLIALSLGLTPNFKSNFDLAEDAKLQLSKDTYDDDLDNLLAQIGDQYADLFLAAKNLSDAILLSDILRVNTEITKAPLSASMIKRYDEHHQDLTLLKALVRQQLPEKYKEIFFDQSKNGYAGYIDGGASQEEFYKFIKPILEKMDGTEELLVKLNREDLLRKQRTFDNGSIPHQIHLGELHAILRRQEDFYPFLKDNREKIEKILTFRIPYYVGPLARGNSRFAWMTRKSEETITPWNFEEVVDKGASAQSFIERMTNFDKNLPNEKVLPKHSLLYEYFTVYNELTKVKYVTEGMRKPAFLSGEQKKAIVDLLFKTNRKVTVKQLKEDYFKKIECFDSVEISGVEDRFNASLGTYHDLLKIIKDKDFLDNEENEDILEDIVLTLTLFEDREMIEERLKTYAHLFDDKVMKQLKRRRYTGWGRLSRKLINGIRDKQSGKTILDFLKSDGFANRNFMQLIHDDSLTFKEDIQKAQVSGQGDSLHEHIANLAGSPAIKKGILQTVKVVDELVKVMGRHKPENIVIEMARENQTTQKGQKNSRERMKRIEEGIKELGSQILKEHPVENTQLQNEKLYLYYLQNGRDMYVDQELDINRLSDYDVDHIVPQSFLKDDSIDNKVLTRSDKARGKSDNVPSEEVVKKMKNYWRQLLNAKLITQRKFDNLTKAERGGLSELDKAGFIKRQLVETRQITKHVAQILDSRMNTKYDENDKLIREVKVITLKSKLVSDFRKDFQFYKVREINNYHHAHDAYLNAVVGTALIKKYPKLESEFVYGDYKVYDVRKMIAKSEQEIGKATAKYFFYSNIMNFFKTEITLANGEIRKRPLIETNGETGEIVWDKGRDFATVRKVLSMPQVNIVKKTEVQTGGFSKESILPKRNSDKLIARKKDWDPKKYGGFDSPTVAYSVLVVAKVEKGKSKKLKSVKELLGITIMERSSFEKNPIDFLEAKGYKEVKKDLIIKLPKYSLFELENGRKRMLASAGELQKGNELALPSKYVNFLYLASHYEKLKGSPEDNEQKQLFVEQHKHYLDEIIEQISEFSKRVILADANLDKVLSAYNKHRDKPIREQAENIIHLFTLTNLGAPAAFKYFDTTIDRKRYTSTKEVLDATLIHQSITGLYETRIDLSQLGGDGGEAAAKGSSGGSGGTLNIEDEYRLHETSKEPDVSLGSTWLSDFPQAWAETGGMGLAVRQAPLIIPLKATSTPVSIKQYPMSQEARLGIKPHIQRLLDQGILVPCQSPWNTPLLPVKKPGTNDYRPVQDLREVNKRVEDIHPTVPNPYNLLSGLPPSHQWYTVLDLKDAFFCLRLHPTSQPLFAFEWRDPEMGISGQLTWTRLPQGFKNSPTLFNEALHRDLADFRIQHPDLILLQYVDDLLLAATSELDCQQGTRALLQTLGNLGYRASAKKAQICQKQVKYLGYLLKEGQRWLTEARKETVMGQPTPKTPRQLREFLGKAGFCRLFIPGFAEMAAPLYPLTKPGTLFNWGPDQQKAYQEIKQALLTAPALGLPDLTKPFELFVDEKQGYAKGVLTQKLGPWRRPVAYLSKKLDPVAAGWPPCLRMVAAIAVLTKDAGKLTMGQPLVILAPHAVEALVKQPPDRWLSNARMTHYQALLLDTDRVQFGPVVALNPATLLPLPEEGLQHNCLDILAEAHGTRPDLTDQPLPDADHTWYTDGSSLLQEGQRKAGAAVTTETEVIWAKALPAGTSAQRAELIALTQALKMAEGKKLNVYTDSRYAFATAHIHGEIYRRRGWLTSEGKEIKNKDEILALLKALFLPKRLSIIHCPGHQKGHSAEARGNRMADQAARKAAITETPDTSTLLIENSSPSGGSKRTADGSEFEAGKRTADGSEFEKRTADGSEFESPKKKAKVE

SEQ ID NO: 2684 - protein, 2114 aa, synthetic construct
MPAAKRVKLDGGDKKYSIGLDIGTNSVGWAVITDEYKVPSKKFKVLGNTDRHSIKKNLIGALLFDSGETAEATRLKRTARRRYTRRKNRICYLQEIFSNEMAKVDDSFFHRLEESFLVEEDKKHERHPIFGNIVDEVAYHEKYPTIYHLRKKLVDSTDKADLRLIYLALAHMIKFRGHFLIEGDLNPDNSDVDKLFIQLVQTYNQLFEENPINASGVDAKAILSARLSKSRRLENLIAQLPGEKKNGLFGNLIALSLGLTPNFKSNFDLAEDAKLQLSKDTYDDDLDNLLAQIGDQYADLFLAAKNLSDAILLSDILRVNTEITKAPLSASMIKRYDEHHQDLTLLKALVRQQLPEKYKEIFFDQSKNGYAGYIDGGASQEEFYKFIKPILEKMDGTEELLVKLNREDLLRKQRTFDNGSIPHQIHLGELHAILRRQEDFYPFLKDNREKIEKILTFRIPYYVGPLARGNSRFAWMTRKSEETITPWNFEEVVDKGASAQSFIERMTNFDKNLPNEKVLPKHSLLYEYFTVYNELTKVKYVTEGMRKPAFLSGEQKKAIVDLLFKTNRKVTVKQLKEDYFKKIECFDSVEISGVEDRFNASLGTYHDLLKIIKDKDFLDNEENEDILEDIVLTLTLFEDREMIEERLKTYAHLFDDKVMKQLKRRRYTGWGRLSRKLINGIRDKQSGKTILDFLKSDGFANRNFMQLIHDDSLTFKEDIQKAQVSGQGDSLHEHIANLAGSPAIKKGILQTVKVVDELVKVMGRHKPENIVIEMARENQTTQKGQKNSRERMKRIEEGIKELGSQILKEHPVENTQLQNEKLYLYYLQNGRDMYVDQELDINRLSDYDVDHIVPQSFLKDDSIDNKVLTRSDKARGKSDNVPSEEVVKKMKNYWRQLLNAKLITQRKFDNLTKAERGGLSELDKAGFIKRQLVETRQITKHVAQILDSRMNTKYDENDKLIREVKVITLKSKLVSDFRKDFQFYKVREINNYHHAHDAYLNAVVGTALIKKYPKLESEFVYGDYKVYDVRKMIAKSEQEIGKATAKYFFYSNIMNFFKTEITLANGEIRKRPLIETNGETGEIVWDKGRDFATVRKVLSMPQVNIVKKTEVQTGGFSKESILPKRNSDKLIARKKDWDPKKYGGFDSPTVAYSVLVVAKVEKGKSKKLKSVKELLGITIMERSSFEKNPIDFLEAKGYKEVKKDLIIKLPKYSLFELENGRKRMLASAGELQKGNELALPSKYVNFLYLASHYEKLKGSPEDNEQKQLFVEQHKHYLDEIIEQISEFSKRVILADANLDKVLSAYNKHRDKPIREQAENIIHLFTLTNLGAPAAFKYFDTTIDRKRYTSTKEVLDATLIHQSITGLYETRIDLSQLGGDGGGGSPAPGSSGGTLNIEDEYRLHETSKEPDVSLGSTWLSDFPQAWAETGGMGLAVRQAPLIIPLKATSTPVSIKQYPMSQEARLGIKPHIQRLLDQGILVPCQSPWNTPLLPVKKPGTNDYRPVQDLREVNKRVEDIHPTVPNPYNLLSGLPPSHQWYTVLDLKDAFFCLRLHPTSQPLFAFEWRDPEMGISGQLTWTRLPQGFKNSPTLFNEALHRDLADFRIQHPDLILLQYVDDLLLAATSELDCQQGTRALLQTLGNLGYRASAKKAQICQKQVKYLGYLLKEGQRWLTEARKETVMGQPTPKTPRQLREFLGKAGFCRLFIPGFAEMAAPLYPLTKPGTLFNWGPDQQKAYQEIKQALLTAPALGLPDLTKPFELFVDEKQGYAKGVLTQKLGPWRRPVAYLSKKLDPVAAGWPPCLRMVAAIAVLTKDAGKLTMGQPLVILAPHAVEALVKQPPDRWLSNARMTHYQALLLDTDRVQFGPVVALNPATLLPLPEEGLQHNCLDILAEAHGTRPDLTDQPLPDADHTWYTDGSSLLQEGQRKAGAAVTTETEVIWAKALPAGTSAQRAELIALTQALKMAEGKKLNVYTDSRYAFATAHIHGEIYRRRGWLTSEGKEIKNKDEILALLKALFLPKRLSIIHCPGHQKGHSAEARGNRMADQAARKAAITETPDTSTLLIENSSPSGGSKRTADGSEFEAGKRTADGSEFEKRTADGSEFESPKKKAKVE

SEQ ID NO: 2685 - protein, 2114 aa, synthetic construct
MPAAKRVKLDGGDKKYSIGLDIGTNSVGWAVITDEYKVPSKKFKVLGNTDRHSIKKNLIGALLFDSGETAEATRLKRTARRRYTRRKNRICYLQEIFSNEMAKVDDSFFHRLEESFLVEEDKKHERHPIFGNIVDEVAYHEKYPTIYHLRKKLVDSTDKADLRLIYLALAHMIKFRGHFLIEGDLNPDNSDVDKLFIQLVQTYNQLFEENPINASGVDAKAILSARLSKSRRLENLIAQLPGEKKNGLFGNLIALSLGLTPNFKSNFDLAEDAKLQLSKDTYDDDLDNLLAQIGDQYADLFLAAKNLSDAILLSDILRVNTEITKAPLSASMIKRYDEHHQDLTLLKALVRQQLPEKYKEIFFDQSKNGYAGYIDGGASQEEFYKFIKPILEKMDGTEELLVKLNREDLLRKQRTFDNGSIPHQIHLGELHAILRRQEDFYPFLKDNREKIEKILTFRIPYYVGPLARGNSRFAWMTRKSEETITPWNFEEVVDKGASAQSFIERMTNFDKNLPNEKVLPKHSLLYEYFTVYNELTKVKYVTEGMRKPAFLSGEQKKAIVDLLFKTNRKVTVKQLKEDYFKKIECFDSVEISGVEDRFNASLGTYHDLLKIIKDKDFLDNEENEDILEDIVLTLTLFEDREMIEERLKTYAHLFDDKVMKQLKRRRYTGWGRLSRKLINGIRDKQSGKTILDFLKSDGFANRNFMQLIHDDSLTFKEDIQKAQVSGQGDSLHEHIANLAGSPAIKKGILQTVKVVDELVKVMGRHKPENIVIEMARENQTTQKGQKNSRERMKRIEEGIKELGSQILKEHPVENTQLQNEKLYLYYLQNGRDMYVDQELDINRLSDYDVDHIVPQSFLKDDSIDNKVLTRSDKARGKSDNVPSEEVVKKMKNYWRQLLNAKLITQRKFDNLTKAERGGLSELDKAGFIKRQLVETRQITKHVAQILDSRMNTKYDENDKLIREVKVITLKSKLVSDFRKDFQFYKVREINNYHHAHDAYLNAVVGTALIKKYPKLESEFVYGDYKVYDVRKMIAKSEQEIGKATAKYFFYSNIMNFFKTEITLANGEIRKRPLIETNGETGEIVWDKGRDFATVRKVLSMPQVNIVKKTEVQTGGFSKESILPKRNSDKLIARKKDWDPKKYGGFDSPTVAYSVLVVAKVEKGKSKKLKSVKELLGITIMERSSFEKNPIDFLEAKGYKEVKKDLIIKLPKYSLFELENGRKRMLASAGELQKGNELALPSKYVNFLYLASHYEKLKGSPEDNEQKQLFVEQHKHYLDEIIEQISEFSKRVILADANLDKVLSAYNKHRDKPIREQAENIIHLFTLTNLGAPAAFKYFDTTIDRKRYTSTKEVLDATLIHQSITGLYETRIDLSQLGGDGGPAPGSSGGSGGTLNIEDEYRLHETSKEPDVSLGSTWLSDFPQAWAETGGMGLAVRQAPLIIPLKATSTPVSIKQYPMSQEARLGIKPHIQRLLDQGILVPCQSPWNTPLLPVKKPGTNDYRPVQDLREVNKRVEDIHPTVPNPYNLLSGLPPSHQWYTVLDLKDAFFCLRLHPTSQPLFAFEWRDPEMGISGQLTWTRLPQGFKNSPTLFNEALHRDLADFRIQHPDLILLQYVDDLLLAATSELDCQQGTRALLQTLGNLGYRASAKKAQICQKQVKYLGYLLKEGQRWLTEARKETVMGQPTPKTPRQLREFLGKAGFCRLFIPGFAEMAAPLYPLTKPGTLFNWGPDQQKAYQEIKQALLTAPALGLPDLTKPFELFVDEKQGYAKGVLTQKLGPWRRPVAYLSKKLDPVAAGWPPCLRMVAAIAVLTKDAGKLTMGQPLVILAPHAVEALVKQPPDRWLSNARMTHYQALLLDTDRVQFGPVVALNPATLLPLPEEGLQHNCLDILAEAHGTRPDLTDQPLPDADHTWYTDGSSLLQEGQRKAGAAVTTETEVIWAKALPAGTSAQRAELIALTQALKMAEGKKLNVYTDSRYAFATAHIHGEIYRRRGWLTSEGKEIKNKDEILALLKALFLPKRLSIIHCPGHQKGHSAEARGNRMADQAARKAAITETPDTSTLLIENSSPSGGSKRTADGSEFEAGKRTADGSEFEKRTADGSEFESPKKKAKVE

SEQ ID NO: 2686 - protein, 2116 aa, synthetic construct
MPAAKRVKLDGGDKKYSIGLDIGTNSVGWAVITDEYKVPSKKFKVLGNTDRHSIKKNLIGALLFDSGETAEATRLKRTARRRYTRRKNRICYLQEIFSNEMAKVDDSFFHRLEESFLVEEDKKHERHPIFGNIVDEVAYHEKYPTIYHLRKKLVDSTDKADLRLIYLALAHMIKFRGHFLIEGDLNPDNSDVDKLFIQLVQTYNQLFEENPINASGVDAKAILSARLSKSRRLENLIAQLPGEKKNGLFGNLIALSLGLTPNFKSNFDLAEDAKLQLSKDTYDDDLDNLLAQIGDQYADLFLAAKNLSDAILLSDILRVNTEITKAPLSASMIKRYDEHHQDLTLLKALVRQQLPEKYKEIFFDQSKNGYAGYIDGGASQEEFYKFIKPILEKMDGTEELLVKLNREDLLRKQRTFDNGSIPHQIHLGELHAILRRQEDFYPFLKDNREKIEKILTFRIPYYVGPLARGNSRFAWMTRKSEETITPWNFEEVVDKGASAQSFIERMTNFDKNLPNEKVLPKHSLLYEYFTVYNELTKVKYVTEGMRKPAFLSGEQKKAIVDLLFKTNRKVTVKQLKEDYFKKIECFDSVEISGVEDRFNASLGTYHDLLKIIKDKDFLDNEENEDILEDIVLTLTLFEDREMIEERLKTYAHLFDDKVMKQLKRRRYTGWGRLSRKLINGIRDKQSGKTILDFLKSDGFANRNFMQLIHDDSLTFKEDIQKAQVSGQGDSLHEHIANLAGSPAIKKGILQTVKVVDELVKVMGRHKPENIVIEMARENQTTQKGQKNSRERMKRIEEGIKELGSQILKEHPVENTQLQNEKLYLYYLQNGRDMYVDQELDINRLSDYDVDHIVPQSFLKDDSIDNKVLTRSDKARGKSDNVPSEEVVKKMKNYWRQLLNAKLITQRKFDNLTKAERGGLSELDKAGFIKRQLVETRQITKHVAQILDSRMNTKYDENDKLIREVKVITLKSKLVSDFRKDFQFYKVREINNYHHAHDAYLNAVVGTALIKKYPKLESEFVYGDYKVYDVRKMIAKSEQEIGKATAKYFFYSNIMNFFKTEITLANGEIRKRPLIETNGETGEIVWDKGRDFATVRKVLSMPQVNIVKKTEVQTGGFSKESILPKRNSDKLIARKKDWDPKKYGGFDSPTVAYSVLVVAKVEKGKSKKLKSVKELLGITIMERSSFEKNPIDFLEAKGYKEVKKDLIIKLPKYSLFELENGRKRMLASAGELQKGNELALPSKYVNFLYLASHYEKLKGSPEDNEQKQLFVEQHKHYLDEIIEQISEFSKRVILADANLDKVLSAYNKHRDKPIREQAENIIHLFTLTNLGAPAAFKYFDTTIDRKRYTSTKEVLDATLIHQSITGLYETRIDLSQLGGDGGEAAAKGSSGGGGGTLNIEDEYRLHETSKEPDVSLGSTWLSDFPQAWAETGGMGLAVRQAPLIIPLKATSTPVSIKQYPMSQEARLGIKPHIQRLLDQGILVPCQSPWNTPLLPVKKPGTNDYRPVQDLREVNKRVEDIHPTVPNPYNLLSGLPPSHQWYTVLDLKDAFFCLRLHPTSQPLFAFEWRDPEMGISGQLTWTRLPQGFKNSPTLFNEALHRDLADFRIQHPDLILLQYVDDLLLAATSELDCQQGTRALLQTLGNLGYRASAKKAQICQKQVKYLGYLLKEGQRWLTEARKETVMGQPTPKTPRQLREFLGKAGFCRLFIPGFAEMAAPLYPLTKPGTLFNWGPDQQKAYQEIKQALLTAPALGLPDLTKPFELFVDEKQGYAKGVLTQKLGPWRRPVAYLSKKLDPVAAGWPPCLRMVAAIAVLTKDAGKLTMGQPLVILAPHAVEALVKQPPDRWLSNARMTHYQALLLDTDRVQFGPVVALNPATLLPLPEEGLQHNCLDILAEAHGTRPDLTDQPLPDADHTWYTDGSSLLQEGQRKAGAAVTTETEVIWAKALPAGTSAQRAELIALTQALKMAEGKKLNVYTDSRYAFATAHIHGEIYRRRGWLTSEGKEIKNKDEILALLKALFLPKRLSIIHCPGHQKGHSAEARGNRMADQAARKAAITETPDTSTLLIENSSPSGGSKRTADGSEFEAGKRTADGSEFEKRTADGSEFESPKKKAKVE

SEQ ID NO: 2687 - protein, 2117 aa, synthetic construct
MPAAKRVKLDGGDKKYSIGLDIGTNSVGWAVITDEYKVPSKKFKVLGNTDRHSIKKNLIGALLFDSGETAEATRLKRTARRRYTRRKNRICYLQEIFSNEMAKVDDSFFHRLEESFLVEEDKKHERHPIFGNIVDEVAYHEKYPTIYHLRKKLVDSTDKADLRLIYLALAHMIKFRGHFLIEGDLNPDNSDVDKLFIQLVQTYNQLFEENPINASGVDAKAILSARLSKSRRLENLIAQLPGEKKNGLFGNLIALSLGLTPNFKSNFDLAEDAKLQLSKDTYDDDLDNLLAQIGDQYADLFLAAKNLSDAILLSDILRVNTEITKAPLSASMIKRYDEHHQDLTLLKALVRQQLPEKYKEIFFDQSKNGYAGYIDGGASQEEFYKFIKPILEKMDGTEELLVKLNREDLLRKQRTFDNGSIPHQIHLGELHAILRRQEDFYPFLKDNREKIEKILTFRIPYYVGPLARGNSRFAWMTRKSEETITPWNFEEVVDKGASAQSFIERMTNFDKNLPNEKVLPKHSLLYEYFTVYNELTKVKYVTEGMRKPAFLSGEQKKAIVDLLFKTNRKVTVKQLKEDYFKKIECFDSVEISGVEDRFNASLGTYHDLLKIIKDKDFLDNEENEDILEDIVLTLTLFEDREMIEERLKTYAHLFDDKVMKQLKRRRYTGWGRLSRKLINGIRDKQSGKTILDFLKSDGFANRNFMQLIHDDSLTFKEDIQKAQVSGQGDSLHEHIANLAGSPAIKKGILQTVKVVDELVKVMGRHKPENIVIEMARENQTTQKGQKNSRERMKRIEEGIKELGSQILKEHPVENTQLQNEKLYLYYLQNGRDMYVDQELDINRLSDYDVDHIVPQSFLKDDSIDNKVLTRSDKARGKSDNVPSEEVVKKMKNYWRQLLNAKLITQRKFDNLTKAERGGLSELDKAGFIKRQLVETRQITKHVAQILDSRMNTKYDENDKLIREVKVITLKSKLVSDFRKDFQFYKVREINNYHHAHDAYLNAVVGTALIKKYPKLESEFVYGDYKVYDVRKMIAKSEQEIGKATAKYFFYSNIMNFFKTEITLANGEIRKRPLIETNGETGEIVWDKGRDFATVRKVLSMPQVNIVKKTEVQTGGFSKESILPKRNSDKLIARKKDWDPKKYGGFDSPTVAYSVLVVAKVEKGKSKKLKSVKELLGITIMERSSFEKNPIDFLEAKGYKEVKKDLIIKLPKYSLFELENGRKRMLASAGELQKGNELALPSKYVNFLYLASHYEKLKGSPEDNEQKQLFVEQHKHYLDEIIEQISEFSKRVILADANLDKVLSAYNKHRDKPIREQAENIIHLFTLTNLGAPAAFKYFDTTIDRKRYTSTKEVLDATLIHQSITGLYETRIDLSQLGGDGGGGSGGSGGSGGSGGTLNIEDEYRLHETSKEPDVSLGSTWLSDFPQAWAETGGMGLAVRQAPLIIPLKATSTPVSIKQYPMSQEARLGIKPHIQRLLDQGILVPCQSPWNTPLLPVKKPGTNDYRPVQDLREVNKRVEDIHPTVPNPYNLLSGLPPSHQWYTVLDLKDAFFCLRLHPTSQPLFAFEWRDPEMGISGQLTWTRLPQGFKNSPTLFNEALHRDLADFRIQHPDLILLQYVDDLLLAATSELDCQQGTRALLQTLGNLGYRASAKKAQICQKQVKYLGYLLKEGQRWLTEARKETVMGQPTPKTPRQLREFLGKAGFCRLFIPGFAEMAAPLYPLTKPGTLFNWGPDQQKAYQEIKQALLTAPALGLPDLTKPFELFVDEKQGYAKGVLTQKLGPWRRPVAYLSKKLDPVAAGWPPCLRMVAAIAVLTKDAGKLTMGQPLVILAPHAVEALVKQPPDRWLSNARMTHYQALLLDTDRVQFGPVVALNPATLLPLPEEGLQHNCLDILAEAHGTRPDLTDQPLPDADHTWYTDGSSLLQEGQRKAGAAVTTETEVIWAKALPAGTSAQRAELIALTQALKMAEGKKLNVYTDSRYAFATAHIHGEIYRRRGWLTSEGKEIKNKDEILALLKALFLPKRLSIIHCPGHQKGHSAEARGNRMADQAARKAAITETPDTSTLLIENSSPSGGSKRTADGSEFEAGKRTADGSEFEKRTADGSEFESPKKKAKVE

SEQ ID NO: 2688 - protein, 2116 aa, synthetic construct
MPAAKRVKLDGGDKKYSIGLDIGTNSVGWAVITDEYKVPSKKFKVLGNTDRHSIKKNLIGALLFDSGETAEATRLKRTARRRYTRRKNRICYLQEIFSNEMAKVDDSFFHRLEESFLVEEDKKHERHPIFGNIVDEVAYHEKYPTIYHLRKKLVDSTDKADLRLIYLALAHMIKFRGHFLIEGDLNPDNSDVDKLFIQLVQTYNQLFEENPINASGVDAKAILSARLSKSRRLENLIAQLPGEKKNGLFGNLIALSLGLTPNFKSNFDLAEDAKLQLSKDTYDDDLDNLLAQIGDQYADLFLAAKNLSDAILLSDILRVNTEITKAPLSASMIKRYDEHHQDLTLLKALVRQQLPEKYKEIFFDQSKNGYAGYIDGGASQEEFYKFIKPILEKMDGTEELLVKLNREDLLRKQRTFDNGSIPHQIHLGELHAILRRQEDFYPFLKDNREKIEKILTFRIPYYVGPLARGNSRFAWMTRKSEETITPWNFEEVVDKGASAQSFIERMTNFDKNLPNEKVLPKHSLLYEYFTVYNELTKVKYVTEGMRKPAFLSGEQKKAIVDLLFKTNRKVTVKQLKEDYFKKIECFDSVEISGVEDRFNASLGTYHDLLKIIKDKDFLDNEENEDILEDIVLTLTLFEDREMIEERLKTYAHLFDDKVMKQLKRRRYTGWGRLSRKLINGIRDKQSGKTILDFLKSDGFANRNFMQLIHDDSLTFKEDIQKAQVSGQGDSLHEHIANLAGSPAIKKGILQTVKVVDELVKVMGRHKPENIVIEMARENQTTQKGQKNSRERMKRIEEGIKELGSQILKEHPVENTQLQNEKLYLYYLQNGRDMYVDQELDINRLSDYDVDHIVPQSFLKDDSIDNKVLTRSDKARGKSDNVPSEEVVKKMKNYWRQLLNAKLITQRKFDNLTKAERGGLSELDKAGFIKRQLVETRQITKHVAQILDSRMNTKYDENDKLIREVKVITLKSKLVSDFRKDFQFYKVREINNYHHAHDAYLNAVVGTALIKKYPKLESEFVYGDYKVYDVRKMIAKSEQEIGKATAKYFFYSNIMNFFKTEITLANGEIRKRPLIETNGETGEIVWDKGRDFATVRKVLSMPQVNIVKKTEVQTGGFSKESILPKRNSDKLIARKKDWDPKKYGGFDSPTVAYSVLVVAKVEKGKSKKLKSVKELLGITIMERSSFEKNPIDFLEAKGYKEVKKDLIIKLPKYSLFELENGRKRMLASAGELQKGNELALPSKYVNFLYLASHYEKLKGSPEDNEQKQLFVEQHKHYLDEIIEQISEFSKRVILADANLDKVLSAYNKHRDKPIREQAENIIHLFTLTNLGAPAAFKYFDTTIDRKRYTSTKEVLDATLIHQSITGLYETRIDLSQLGGDGGGGGGSSEAAAKGGTLNIEDEYRLHETSKEPDVSLGSTWLSDFPQAWAETGGMGLAVRQAPLIIPLKATSTPVSIKQYPMSQEARLGIKPHIQRLLDQGILVPCQSPWNTPLLPVKKPGTNDYRPVQDLREVNKRVEDIHPTVPNPYNLLSGLPPSHQWYTVLDLKDAFFCLRLHPTSQPLFAFEWRDPEMGISGQLTWTRLPQGFKNSPTLFNEALHRDLADFRIQHPDLILLQYVDDLLLAATSELDCQQGTRALLQTLGNLGYRASAKKAQICQKQVKYLGYLLKEGQRWLTEARKETVMGQPTPKTPRQLREFLGKAGFCRLFIPGFAEMAAPLYPLTKPGTLFNWGPDQQKAYQEIKQALLTAPALGLPDLTKPFELFVDEKQGYAKGVLTQKLGPWRRPVAYLSKKLDPVAAGWPPCLRMVAAIAVLTKDAGKLTMGQPLVILAPHAVEALVKQPPDRWLSNARMTHYQALLLDTDRVQFGPVVALNPATLLPLPEEGLQHNCLDILAEAHGTRPDLTDQPLPDADHTWYTDGSSLLQEGQRKAGAAVTTETEVIWAKALPAGTSAQRAELIALTQALKMAEGKKLNVYTDSRYAFATAHIHGEIYRRRGWLTSEGKEIKNKDEILALLKALFLPKRLSIIHCPGHQKGHSAEARGNRMADQAARKAAITETPDTSTLLIENSSPSGGSKRTADGSEFEAGKRTADGSEFEKRTADGSEFESPKKKAKVE

SEQ ID NO: 2689 - protein, 2114 aa, synthetic construct
MPAAKRVKLDGGDKKYSIGLDIGTNSVGWAVITDEYKVPSKKFKVLGNTDRHSIKKNLIGALLFDSGETAEATRLKRTARRRYTRRKNRICYLQEIFSNEMAKVDDSFFHRLEESFLVEEDKKHERHPIFGNIVDEVAYHEKYPTIYHLRKKLVDSTDKADLRLIYLALAHMIKFRGHFLIEGDLNPDNSDVDKLFIQLVQTYNQLFEENPINASGVDAKAILSARLSKSRRLENLIAQLPGEKKNGLFGNLIALSLGLTPNFKSNFDLAEDAKLQLSKDTYDDDLDNLLAQIGDQYADLFLAAKNLSDAILLSDILRVNTEITKAPLSASMIKRYDEHHQDLTLLKALVRQQLPEKYKEIFFDQSKNGYAGYIDGGASQEEFYKFIKPILEKMDGTEELLVKLNREDLLRKQRTFDNGSIPHQIHLGELHAILRRQEDFYPFLKDNREKIEKILTFRIPYYVGPLARGNSRFAWMTRKSEETITPWNFEEVVDKGASAQSFIERMTNFDKNLPNEKVLPKHSLLYEYFTVYNELTKVKYVTEGMRKPAFLSGEQKKAIVDLLFKTNRKVTVKQLKEDYFKKIECFDSVEISGVEDRFNASLGTYHDLLKIIKDKDFLDNEENEDILEDIVLTLTLFEDREMIEERLKTYAHLFDDKVMKQLKRRRYTGWGRLSRKLINGIRDKQSGKTILDFLKSDGFANRNFMQLIHDDSLTFKEDIQKAQVSGQGDSLHEHIANLAGSPAIKKGILQTVKVVDELVKVMGRHKPENIVIEMARENQTTQKGQKNSRERMKRIEEGIKELGSQILKEHPVENTQLQNEKLYLYYLQNGRDMYVDQELDINRLSDYDVDHIVPQSFLKDDSIDNKVLTRSDKARGKSDNVPSEEVVKKMKNYWRQLLNAKLITQRKFDNLTKAERGGLSELDKAGFIKRQLVETRQITKHVAQILDSRMNTKYDENDKLIREVKVITLKSKLVSDFRKDFQFYKVREINNYHHAHDAYLNAVVGTALIKKYPKLESEFVYGDYKVYDVRKMIAKSEQEIGKATAKYFFYSNIMNFFKTEITLANGEIRKRPLIETNGETGEIVWDKGRDFATVRKVLSMPQVNIVKKTEVQTGGFSKESILPKRNSDKLIARKKDWDPKKYGGFDSPTVAYSVLVVAKVEKGKSKKLKSVKELLGITIMERSSFEKNPIDFLEAKGYKEVKKDLIIKLPKYSLFELENGRKRMLASAGELQKGNELALPSKYVNFLYLASHYEKLKGSPEDNEQKQLFVEQHKHYLDEIIEQISEFSKRVILADANLDKVLSAYNKHRDKPIREQAENIIHLFTLTNLGAPAAFKYFDTTIDRKRYTSTKEVLDATLIHQSITGLYETRIDLSQLGGDGGGSSPAPGGSGGTLNIEDEYRLHETSKEPDVSLGSTWLSDFPQAWAETGGMGLAVRQAPLIIPLKATSTPVSIKQYPMSQEARLGIKPHIQRLLDQGILVPCQSPWNTPLLPVKKPGTNDYRPVQDLREVNKRVEDIHPTVPNPYNLLSGLPPSHQWYTVLDLKDAFFCLRLHPTSQPLFAFEWRDPEMGISGQLTWTRLPQGFKNSPTLFNEALHRDLADFRIQHPDLILLQYVDDLLLAATSELDCQQGTRALLQTLGNLGYRASAKKAQICQKQVKYLGYLLKEGQRWLTEARKETVMGQPTPKTPRQLREFLGKAGFCRLFIPGFAEMAAPLYPLTKPGTLFNWGPDQQKAYQEIKQALLTAPALGLPDLTKPFELFVDEKQGYAKGVLTQKLGPWRRPVAYLSKKLDPVAAGWPPCLRMVAAIAVLTKDAGKLTMGQPLVILAPHAVEALVKQPPDRWLSNARMTHYQALLLDTDRVQFGPVVALNPATLLPLPEEGLQHNCLDILAEAHGTRPDLTDQPLPDADHTWYTDGSSLLQEGQRKAGAAVTTETEVIWAKALPAGTSAQRAELIALTQALKMAEGKKLNVYTDSRYAFATAHIHGEIYRRRGWLTSEGKEIKNKDEILALLKALFLPKRLSIIHCPGHQKGHSAEARGNRMADQAARKAAITETPDTSTLLIENSSPSGGSKRTADGSEFEAGKRTADGSEFEKRTADGSEFESPKKKAKVE

SEQ ID NO: 2690 - protein, 2116 aa, synthetic construct
MPAAKRVKLDGGDKKYSIGLDIGTNSVGWAVITDEYKVPSKKFKVLGNTDRHSIKKNLIGALLFDSGETAEATRLKRTARRRYTRRKNRICYLQEIFSNEMAKVDDSFFHRLEESFLVEEDKKHERHPIFGNIVDEVAYHEKYPTIYHLRKKLVDSTDKADLRLIYLALAHMIKFRGHFLIEGDLNPDNSDVDKLFIQLVQTYNQLFEENPINASGVDAKAILSARLSKSRRLENLIAQLPGEKKNGLFGNLIALSLGLTPNFKSNFDLAEDAKLQLSKDTYDDDLDNLLAQIGDQYADLFLAAKNLSDAILLSDILRVNTEITKAPLSASMIKRYDEHHQDLTLLKALVRQQLPEKYKEIFFDQSKNGYAGYIDGGASQEEFYKFIKPILEKMDGTEELLVKLNREDLLRKQRTFDNGSIPHQIHLGELHAILRRQEDFYPFLKDNREKIEKILTFRIPYYVGPLARGNSRFAWMTRKSEETITPWNFEEVVDKGASAQSFIERMTNFDKNLPNEKVLPKHSLLYEYFTVYNELTKVKYVTEGMRKPAFLSGEQKKAIVDLLFKTNRKVTVKQLKEDYFKKIECFDSVEISGVEDRFNASLGTYHDLLKIIKDKDFLDNEENEDILEDIVLTLTLFEDREMIEERLKTYAHLFDDKVMKQLKRRRYTGWGRLSRKLINGIRDKQSGKTILDFLKSDGFANRNFMQLIHDDSLTFKEDIQKAQVSGQGDSLHEHIANLAGSPAIKKGILQTVKVVDELVKVMGRHKPENIVIEMARENQTTQKGQKNSRERMKRIEEGIKELGSQILKEHPVENTQLQNEKLYLYYLQNGRDMYVDQELDINRLSDYDVDHIVPQSFLKDDSIDNKVLTRSDKARGKSDNVPSEEVVKKMKNYWRQLLNAKLITQRKFDNLTKAERGGLSELDKAGFIKRQLVETRQITKHVAQILDSRMNTKYDENDKLIREVKVITLKSKLVSDFRKDFQFYKVREINNYHHAHDAYLNAVVGTALIKKYPKLESEFVYGDYKVYDVRKMIAKSEQEIGKATAKYFFYSNIMNFFKTEITLANGEIRKRPLIETNGETGEIVWDKGRDFATVRKVLSMPQVNIVKKTEVQTGGFSKESILPKRNSDKLIARKKDWDPKKYGGFDSPTVAYSVLVVAKVEKGKSKKLKSVKELLGITIMERSSFEKNPIDFLEAKGYKEVKKDLIIKLPKYSLFELENGRKRMLASAGELQKGNELALPSKYVNFLYLASHYEKLKGSPEDNEQKQLFVEQHKHYLDEIIEQISEFSKRVILADANLDKVLSAYNKHRDKPIREQAENIIHLFTLTNLGAPAAFKYFDTTIDRKRYTSTKEVLDATLIHQSITGLYETRIDLSQLGGDGGGGSEAAAKPAPGGTLNIEDEYRLHETSKEPDVSLGSTWLSDFPQAWAETGGMGLAVRQAPLIIPLKATSTPVSIKQYPMSQEARLGIKPHIQRLLDQGILVPCQSPWNTPLLPVKKPGTNDYRPVQDLREVNKRVEDIHPTVPNPYNLLSGLPPSHQWYTVLDLKDAFFCLRLHPTSQPLFAFEWRDPEMGISGQLTWTRLPQGFKNSPTLFNEALHRDLADFRIQHPDLILLQYVDDLLLAATSELDCQQGTRALLQTLGNLGYRASAKKAQICQKQVKYLGYLLKEGQRWLTEARKETVMGQPTPKTPRQLREFLGKAGFCRLFIPGFAEMAAPLYPLTKPGTLFNWGPDQQKAYQEIKQALLTAPALGLPDLTKPFELFVDEKQGYAKGVLTQKLGPWRRPVAYLSKKLDPVAAGWPPCLRMVAAIAVLTKDAGKLTMGQPLVILAPHAVEALVKQPPDRWLSNARMTHYQALLLDTDRVQFGPVVALNPATLLPLPEEGLQHNCLDILAEAHGTRPDLTDQPLPDADHTWYTDGSSLLQEGQRKAGAAVTTETEVIWAKALPAGTSAQRAELIALTQALKMAEGKKLNVYTDSRYAFATAHIHGEIYRRRGWLTSEGKEIKNKDEILALLKALFLPKRLSIIHCPGHQKGHSAEARGNRMADQAARKAAITETPDTSTLLIENSSPSGGSKRTADGSEFEAGKRTADGSEFEKRTADGSEFESPKKKAKVE

SEQ ID NO: 2691 - protein, 2110 aa, synthetic construct
MPAAKRVKLDGGDKKYSIGLDIGTNSVGWAVITDEYKVPSKKFKVLGNTDRHSIKKNLIGALLFDSGETAEATRLKRTARRRYTRRKNRICYLQEIFSNEMAKVDDSFFHRLEESFLVEEDKKHERHPIFGNIVDEVAYHEKYPTIYHLRKKLVDSTDKADLRLIYLALAHMIKFRGHFLIEGDLNPDNSDVDKLFIQLVQTYNQLFEENPINASGVDAKAILSARLSKSRRLENLIAQLPGEKKNGLFGNLIALSLGLTPNFKSNFDLAEDAKLQLSKDTYDDDLDNLLAQIGDQYADLFLAAKNLSDAILLSDILRVNTEITKAPLSASMIKRYDEHHQDLTLLKALVRQQLPEKYKEIFFDQSKNGYAGYIDGGASQEEFYKFIKPILEKMDGTEELLVKLNREDLLRKQRTFDNGSIPHQIHLGELHAILRRQEDFYPFLKDNREKIEKILTFRIPYYVGPLARGNSRFAWMTRKSEETITPWNFEEVVDKGASAQSFIERMTNFDKNLPNEKVLPKHSLLYEYFTVYNELTKVKYVTEGMRKPAFLSGEQKKAIVDLLFKTNRKVTVKQLKEDYFKKIECFDSVEISGVEDRFNASLGTYHDLLKIIKDKDFLDNEENEDILEDIVLTLTLFEDREMIEERLKTYAHLFDDKVMKQLKRRRYTGWGRLSRKLINGIRDKQSGKTILDFLKSDGFANRNFMQLIHDDSLTFKEDIQKAQVSGQGDSLHEHIANLAGSPAIKKGILQTVKVVDELVKVMGRHKPENIVIEMARENQTTQKGQKNSRERMKRIEEGIKELGSQILKEHPVENTQLQNEKLYLYYLQNGRDMYVDQELDINRLSDYDVDHIVPQSFLKDDSIDNKVLTRSDKARGKSDNVPSEEVVKKMKNYWRQLLNAKLITQRKFDNLTKAERGGLSELDKAGFIKRQLVETRQITKHVAQILDSRMNTKYDENDKLIREVKVITLKSKLVSDFRKDFQFYKVREINNYHHAHDAYLNAVVGTALIKKYPKLESEFVYGDYKVYDVRKMIAKSEQEIGKATAKYFFYSNIMNFFKTEITLANGEIRKRPLIETNGETGEIVWDKGRDFATVRKVLSMPQVNIVKKTEVQTGGFSKESILPKRNSDKLIARKKDWDPKKYGGFDSPTVAYSVLVVAKVEKGKSKKLKSVKELLGITIMERSSFEKNPIDFLEAKGYKEVKKDLIIKLPKYSLFELENGRKRMLASAGELQKGNELALPSKYVNFLYLASHYEKLKGSPEDNEQKQLFVEQHKHYLDEIIEQISEFSKRVILADANLDKVLSAYNKHRDKPIREQAENIIHLFTLTNLGAPAAFKYFDTTIDRKRYTSTKEVLDATLIHQSITGLYETRIDLSQLGGDGGGGGGSGGTLNIEDEYRLHETSKEPDVSLGSTWLSDFPQAWAETGGMGLAVRQAPLIIPLKATSTPVSIKQYPMSQEARLGIKPHIQRLLDQGILVPCQSPWNTPLLPVKKPGTNDYRPVQDLREVNKRVEDIHPTVPNPYNLLSGLPPSHQWYTVLDLKDAFFCLRLHPTSQPLFAFEWRDPEMGISGQLTWTRLPQGFKNSPTLFNEALHRDLADFRIQHPDLILLQYVDDLLLAATSELDCQQGTRALLQTLGNLGYRASAKKAQICQKQVKYLGYLLKEGQRWLTEARKETVMGQPTPKTPRQLREFLGKAGFCRLFIPGFAEMAAPLYPLTKPGTLFNWGPDQQKAYQEIKQALLTAPALGLPDLTKPFELFVDEKQGYAKGVLTQKLGPWRRPVAYLSKKLDPVAAGWPPCLRMVAAIAVLTKDAGKLTMGQPLVILAPHAVEALVKQPPDRWLSNARMTHYQALLLDTDRVQFGPVVALNPATLLPLPEEGLQHNCLDILAEAHGTRPDLTDQPLPDADHTWYTDGSSLLQEGQRKAGAAVTTETEVIWAKALPAGTSAQRAELIALTQALKMAEGKKLNVYTDSRYAFATAHIHGEIYRRRGWLTSEGKEIKNKDEILALLKALFLPKRLSIIHCPGHQKGHSAEARGNRMADQAARKAAITETPDTSTLLIENSSPSGGSKRTADGSEFEAGKRTADGSEFEKRTADGSEFESPKKKAKVE

SEQ ID NO: 2692 - protein, 2116 aa, synthetic construct
MPAAKRVKLDGGDKKYSIGLDIGTNSVGWAVITDEYKVPSKKFKVLGNTDRHSIKKNLIGALLFDSGETAEATRLKRTARRRYTRRKNRICYLQEIFSNEMAKVDDSFFHRLEESFLVEEDKKHERHPIFGNIVDEVAYHEKYPTIYHLRKKLVDSTDKADLRLIYLALAHMIKFRGHFLIEGDLNPDNSDVDKLFIQLVQTYNQLFEENPINASGVDAKAILSARLSKSRRLENLIAQLPGEKKNGLFGNLIALSLGLTPNFKSNFDLAEDAKLQLSKDTYDDDLDNLLAQIGDQYADLFLAAKNLSDAILLSDILRVNTEITKAPLSASMIKRYDEHHQDLTLLKALVRQQLPEKYKEIFFDQSKNGYAGYIDGGASQEEFYKFIKPILEKMDGTEELLVKLNREDLLRKQRTFDNGSIPHQIHLGELHAILRRQEDFYPFLKDNREKIEKILTFRIPYYVGPLARGNSRFAWMTRKSEETITPWNFEEVVDKGASAQSFIERMTNFDKNLPNEKVLPKHSLLYEYFTVYNELTKVKYVTEGMRKPAFLSGEQKKAIVDLLFKTNRKVTVKQLKEDYFKKIECFDSVEISGVEDRFNASLGTYHDLLKIIKDKDFLDNEENEDILEDIVLTLTLFEDREMIEERLKTYAHLFDDKVMKQLKRRRYTGWGRLSRKLINGIRDKQSGKTILDFLKSDGFANRNFMQLIHDDSLTFKEDIQKAQVSGQGDSLHEHIANLAGSPAIKKGILQTVKVVDELVKVMGRHKPENIVIEMARENQTTQKGQKNSRERMKRIEEGIKELGSQILKEHPVENTQLQNEKLYLYYLQNGRDMYVDQELDINRLSDYDVDHIVPQSFLKDDSIDNKVLTRSDKARGKSDNVPSEEVVKKMKNYWRQLLNAKLITQRKFDNLTKAERGGLSELDKAGFIKRQLVETRQITKHVAQILDSRMNTKYDENDKLIREVKVITLKSKLVSDFRKDFQFYKVREINNYHHAHDAYLNAVVGTALIKKYPKLESEFVYGDYKVYDVRKMIAKSEQEIGKATAKYFFYSNIMNFFKTEITLANGEIRKRPLIETNGETGEIVWDKGRDFATVRKVLSMPQVNIVKKTEVQTGGFSKESILPKRNSDKLIARKKDWDPKKYGGFDSPTVAYSVLVVAKVEKGKSKKLKSVKELLGITIMERSSFEKNPIDFLEAKGYKEVKKDLIIKLPKYSLFELENGRKRMLASAGELQKGNELALPSKYVNFLYLASHYEKLKGSPEDNEQKQLFVEQHKHYLDEIIEQISEFSKRVILADANLDKVLSAYNKHRDKPIREQAENIIHLFTLTNLGAPAAFKYFDTTIDRKRYTSTKEVLDATLIHQSITGLYETRIDLSQLGGDGGGGSGGGEAAAKGGTLNIEDEYRLHETSKEPDVSLGSTWLSDFPQAWAETGGMGLAVRQAPLIIPLKATSTPVSIKQYPMSQEARLGIKPHIQRLLDQGILVPCQSPWNTPLLPVKKPGTNDYRPVQDLREVNKRVEDIHPTVPNPYNLLSGLPPSHQWYTVLDLKDAFFCLRLHPTSQPLFAFEWRDPEMGISGQLTWTRLPQGFKNSPTLFNEALHRDLADFRIQHPDLILLQYVDDLLLAATSELDCQQGTRALLQTLGNLGYRASAKKAQICQKQVKYLGYLLKEGQRWLTEARKETVMGQPTPKTPRQLREFLGKAGFCRLFIPGFAEMAAPLYPLTKPGTLFNWGPDQQKAYQEIKQALLTAPALGLPDLTKPFELFVDEKQGYAKGVLTQKLGPWRRPVAYLSKKLDPVAAGWPPCLRMVAAIAVLTKDAGKLTMGQPLVILAPHAVEALVKQPPDRWLSNARMTHYQALLLDTDRVQFGPVVALNPATLLPLPEEGLQHNCLDILAEAHGTRPDLTDQPLPDADHTWYTDGSSLLQEGQRKAGAAVTTETEVIWAKALPAGTSAQRAELIALTQALKMAEGKKLNVYTDSRYAFATAHIHGEIYRRRGWLTSEGKEIKNKDEILALLKALFLPKRLSIIHCPGHQKGHSAEARGNRMADQAARKAAITETPDTSTLLIENSSPSGGSKRTADGSEFEAGKRTADGSEFEKRTADGSEFESPKKKAKVE

SEQ ID NO: 2693 - protein, 2111 aa, synthetic construct
MPAAKRVKLDGGDKKYSIGLDIGTNSVGWAVITDEYKVPSKKFKVLGNTDRHSIKKNLIGALLFDSGETAEATRLKRTARRRYTRRKNRICYLQEIFSNEMAKVDDSFFHRLEESFLVEEDKKHERHPIFGNIVDEVAYHEKYPTIYHLRKKLVDSTDKADLRLIYLALAHMIKFRGHFLIEGDLNPDNSDVDKLFIQLVQTYNQLFEENPINASGVDAKAILSARLSKSRRLENLIAQLPGEKKNGLFGNLIALSLGLTPNFKSNFDLAEDAKLQLSKDTYDDDLDNLLAQIGDQYADLFLAAKNLSDAILLSDILRVNTEITKAPLSASMIKRYDEHHQDLTLLKALVRQQLPEKYKEIFFDQSKNGYAGYIDGGASQEEFYKFIKPILEKMDGTEELLVKLNREDLLRKQRTFDNGSIPHQIHLGELHAILRRQEDFYPFLKDNREKIEKILTFRIPYYVGPLARGNSRFAWMTRKSEETITPWNFEEVVDKGASAQSFIERMTNFDKNLPNEKVLPKHSLLYEYFTVYNELTKVKYVTEGMRKPAFLSGEQKKAIVDLLFKTNRKVTVKQLKEDYFKKIECFDSVEISGVEDRFNASLGTYHDLLKIIKDKDFLDNEENEDILEDIVLTLTLFEDREMIEERLKTYAHLFDDKVMKQLKRRRYTGWGRLSRKLINGIRDKQSGKTILDFLKSDGFANRNFMQLIHDDSLTFKEDIQKAQVSGQGDSLHEHIANLAGSPAIKKGILQTVKVVDELVKVMGRHKPENIVIEMARENQTTQKGQKNSRERMKRIEEGIKELGSQILKEHPVENTQLQNEKLYLYYLQNGRDMYVDQELDINRLSDYDVDHIVPQSFLKDDSIDNKVLTRSDKARGKSDNVPSEEVVKKMKNYWRQLLNAKLITQRKFDNLTKAERGGLSELDKAGFIKRQLVETRQITKHVAQILDSRMNTKYDENDKLIREVKVITLKSKLVSDFRKDFQFYKVREINNYHHAHDAYLNAVVGTALIKKYPKLESEFVYGDYKVYDVRKMIAKSEQEIGKATAKYFFYSNIMNFFKTEITLANGEIRKRPLIETNGETGEIVWDKGRDFATVRKVLSMPQVNIVKKTEVQTGGFSKESILPKRNSDKLIARKKDWDPKKYGGFDSPTVAYSVLVVAKVEKGKSKKLKSVKELLGITIMERSSFEKNPIDFLEAKGYKEVKKDLIIKLPKYSLFELENGRKRMLASAGELQKGNELALPSKYVNFLYLASHYEKLKGSPEDNEQKQLFVEQHKHYLDEIIEQISEFSKRVILADANLDKVLSAYNKHRDKPIREQAENIIHLFTLTNLGAPAAFKYFDTTIDRKRYTSTKEVLDATLIHQSITGLYETRIDLSQLGGDGGGGSGGSGGTLNIEDEYRLHETSKEPDVSLGSTWLSDFPQAWAETGGMGLAVRQAPLIIPLKATSTPVSIKQYPMSQEARLGIKPHIQRLLDQGILVPCQSPWNTPLLPVKKPGTNDYRPVQDLREVNKRVEDIHPTVPNPYNLLSGLPPSHQWYTVLDLKDAFFCLRLHPTSQPLFAFEWRDPEMGISGQLTWTRLPQGFKNSPTLFNEALHRDLADFRIQHPDLILLQYVDDLLLAATSELDCQQGTRALLQTLGNLGYRASAKKAQICQKQVKYLGYLLKEGQRWLTEARKETVMGQPTPKTPRQLREFLGKAGFCRLFIPGFAEMAAPLYPLTKPGTLFNWGPDQQKAYQEIKQALLTAPALGLPDLTKPFELFVDEKQGYAKGVLTQKLGPWRRPVAYLSKKLDPVAAGWPPCLRMVAAIAVLTKDAGKLTMGQPLVILAPHAVEALVKQPPDRWLSNARMTHYQALLLDTDRVQFGPVVALNPATLLPLPEEGLQHNCLDILAEAHGTRPDLTDQPLPDADHTWYTDGSSLLQEGQRKAGAAVTTETEVIWAKALPAGTSAQRAELIALTQALKMAEGKKLNVYTDSRYAFATAHIHGEIYRRRGWLTSEGKEIKNKDEILALLKALFLPKRLSIIHCPGHQKGHSAEARGNRMADQAARKAAITETPDTSTLLIENSSPSGGSKRTADGSEFEAGKRTADGSEFEKRTADGSEFESPKKKAKVE

SEQ ID NO: 2694 - protein, 2114 aa, synthetic construct
MPAAKRVKLDGGDKKYSIGLDIGTNSVGWAVITDEYKVPSKKFKVLGNTDRHSIKKNLIGALLFDSGETAEATRLKRTARRRYTRRKNRICYLQEIFSNEMAKVDDSFFHRLEESFLVEEDKKHERHPIFGNIVDEVAYHEKYPTIYHLRKKLVDSTDKADLRLIYLALAHMIKFRGHFLIEGDLNPDNSDVDKLFIQLVQTYNQLFEENPINASGVDAKAILSARLSKSRRLENLIAQLPGEKKNGLFGNLIALSLGLTPNFKSNFDLAEDAKLQLSKDTYDDDLDNLLAQIGDQYADLFLAAKNLSDAILLSDILRVNTEITKAPLSASMIKRYDEHHQDLTLLKALVRQQLPEKYKEIFFDQSKNGYAGYIDGGASQEEFYKFIKPILEKMDGTEELLVKLNREDLLRKQRTFDNGSIPHQIHLGELHAILRRQEDFYPFLKDNREKIEKILTFRIPYYVGPLARGNSRFAWMTRKSEETITPWNFEEVVDKGASAQSFIERMTNFDKNLPNEKVLPKHSLLYEYFTVYNELTKVKYVTEGMRKPAFLSGEQKKAIVDLLFKTNRKVTVKQLKEDYFKKIECFDSVEISGVEDRFNASLGTYHDLLKIIKDKDFLDNEENEDILEDIVLTLTLFEDREMIEERLKTYAHLFDDKVMKQLKRRRYTGWGRLSRKLINGIRDKQSGKTILDFLKSDGFANRNFMQLIHDDSLTFKEDIQKAQVSGQGDSLHEHIANLAGSPAIKKGILQTVKVVDELVKVMGRHKPENIVIEMARENQTTQKGQKNSRERMKRIEEGIKELGSQILKEHPVENTQLQNEKLYLYYLQNGRDMYVDQELDINRLSDYDVDHIVPQSFLKDDSIDNKVLTRSDKARGKSDNVPSEEVVKKMKNYWRQLLNAKLITQRKFDNLTKAERGGLSELDKAGFIKRQLVETRQITKHVAQILDSRMNTKYDENDKLIREVKVITLKSKLVSDFRKDFQFYKVREINNYHHAHDAYLNAVVGTALIKKYPKLESEFVYGDYKVYDVRKMIAKSEQEIGKATAKYFFYSNIMNFFKTEITLANGEIRKRPLIETNGETGEIVWDKGRDFATVRKVLSMPQVNIVKKTEVQTGGFSKESILPKRNSDKLIARKKDWDPKKYGGFDSPTVAYSVLVVAKVEKGKSKKLKSVKELLGITIMERSSFEKNPIDFLEAKGYKEVKKDLIIKLPKYSLFELENGRKRMLASAGELQKGNELALPSKYVNFLYLASHYEKLKGSPEDNEQKQLFVEQHKHYLDEIIEQISEFSKRVILADANLDKVLSAYNKHRDKPIREQAENIIHLFTLTNLGAPAAFKYFDTTIDRKRYTSTKEVLDATLIHQSITGLYETRIDLSQLGGDGGGSSGGSGGGGGTLNIEDEYRLHETSKEPDVSLGSTWLSDFPQAWAETGGMGLAVRQAPLIIPLKATSTPVSIKQYPMSQEARLGIKPHIQRLLDQGILVPCQSPWNTPLLPVKKPGTNDYRPVQDLREVNKRVEDIHPTVPNPYNLLSGLPPSHQWYTVLDLKDAFFCLRLHPTSQPLFAFEWRDPEMGISGQLTWTRLPQGFKNSPTLFNEALHRDLADFRIQHPDLILLQYVDDLLLAATSELDCQQGTRALLQTLGNLGYRASAKKAQICQKQVKYLGYLLKEGQRWLTEARKETVMGQPTPKTPRQLREFLGKAGFCRLFIPGFAEMAAPLYPLTKPGTLFNWGPDQQKAYQEIKQALLTAPALGLPDLTKPFELFVDEKQGYAKGVLTQKLGPWRRPVAYLSKKLDPVAAGWPPCLRMVAAIAVLTKDAGKLTMGQPLVILAPHAVEALVKQPPDRWLSNARMTHYQALLLDTDRVQFGPVVALNPATLLPLPEEGLQHNCLDILAEAHGTRPDLTDQPLPDADHTWYTDGSSLLQEGQRKAGAAVTTETEVIWAKALPAGTSAQRAELIALTQALKMAEGKKLNVYTDSRYAFATAHIHGEIYRRRGWLTSEGKEIKNKDEILALLKALFLPKRLSIIHCPGHQKGHSAEARGNRMADQAARKAAITETPDTSTLLIENSSPSGGSKRTADGSEFEAGKRTADGSEFEKRTADGSEFESPKKKAKVE

SEQ ID NO: 2695 - protein, 2116 aa, synthetic construct
MPAAKRVKLDGGDKKYSIGLDIGTNSVGWAVITDEYKVPSKKFKVLGNTDRHSIKKNLIGALLFDSGETAEATRLKRTARRRYTRRKNRICYLQEIFSNEMAKVDDSFFHRLEESFLVEEDKKHERHPIFGNIVDEVAYHEKYPTIYHLRKKLVDSTDKADLRLIYLALAHMIKFRGHFLIEGDLNPDNSDVDKLFIQLVQTYNQLFEENPINASGVDAKAILSARLSKSRRLENLIAQLPGEKKNGLFGNLIALSLGLTPNFKSNFDLAEDAKLQLSKDTYDDDLDNLLAQIGDQYADLFLAAKNLSDAILLSDILRVNTEITKAPLSASMIKRYDEHHQDLTLLKALVRQQLPEKYKEIFFDQSKNGYAGYIDGGASQEEFYKFIKPILEKMDGTEELLVKLNREDLLRKQRTFDNGSIPHQIHLGELHAILRRQEDFYPFLKDNREKIEKILTFRIPYYVGPLARGNSRFAWMTRKSEETITPWNFEEVVDKGASAQSFIERMTNFDKNLPNEKVLPKHSLLYEYFTVYNELTKVKYVTEGMRKPAFLSGEQKKAIVDLLFKTNRKVTVKQLKEDYFKKIECFDSVEISGVEDRFNASLGTYHDLLKIIKDKDFLDNEENEDILEDIVLTLTLFEDREMIEERLKTYAHLFDDKVMKQLKRRRYTGWGRLSRKLINGIRDKQSGKTILDFLKSDGFANRNFMQLIHDDSLTFKEDIQKAQVSGQGDSLHEHIANLAGSPAIKKGILQTVKVVDELVKVMGRHKPENIVIEMARENQTTQKGQKNSRERMKRIEEGIKELGSQILKEHPVENTQLQNEKLYLYYLQNGRDMYVDQELDINRLSDYDVDHIVPQSFLKDDSIDNKVLTRSDKARGKSDNVPSEEVVKKMKNYWRQLLNAKLITQRKFDNLTKAERGGLSELDKAGFIKRQLVETRQITKHVAQILDSRMNTKYDENDKLIREVKVITLKSKLVSDFRKDFQFYKVREINNYHHAHDAYLNAVVGTALIKKYPKLESEFVYGDYKVYDVRKMIAKSEQEIGKATAKYFFYSNIMNFFKTEITLANGEIRKRPLIETNGETGEIVWDKGRDFATVRKVLSMPQVNIVKKTEVQTGGFSKESILPKRNSDKLIARKKDWDPKKYGGFDSPTVAYSVLVVAKVEKGKSKKLKSVKELLGITIMERSSFEKNPIDFLEAKGYKEVKKDLIIKLPKYSLFELENGRKRMLASAGELQKGNELALPSKYVNFLYLASHYEKLKGSPEDNEQKQLFVEQHKHYLDEIIEQISEFSKRVILADANLDKVLSAYNKHRDKPIREQAENIIHLFTLTNLGAPAAFKYFDTTIDRKRYTSTKEVLDATLIHQSITGLYETRIDLSQLGGDGGEAAAKGGGGSSGGTLNIEDEYRLHETSKEPDVSLGSTWLSDFPQAWAETGGMGLAVRQAPLIIPLKATSTPVSIKQYPMSQEARLGIKPHIQRLLDQGILVPCQSPWNTPLLPVKKPGTNDYRPVQDLREVNKRVEDIHPTVPNPYNLLSGLPPSHQWYTVLDLKDAFFCLRLHPTSQPLFAFEWRDPEMGISGQLTWTRLPQGFKNSPTLFNEALHRDLADFRIQHPDLILLQYVDDLLLAATSELDCQQGTRALLQTLGNLGYRASAKKAQICQKQVKYLGYLLKEGQRWLTEARKETVMGQPTPKTPRQLREFLGKAGFCRLFIPGFAEMAAPLYPLTKPGTLFNWGPDQQKAYQEIKQALLTAPALGLPDLTKPFELFVDEKQGYAKGVLTQKLGPWRRPVAYLSKKLDPVAAGWPPCLRMVAAIAVLTKDAGKLTMGQPLVILAPHAVEALVKQPPDRWLSNARMTHYQALLLDTDRVQFGPVVALNPATLLPLPEEGLQHNCLDILAEAHGTRPDLTDQPLPDADHTWYTDGSSLLQEGQRKAGAAVTTETEVIWAKALPAGTSAQRAELIALTQALKMAEGKKLNVYTDSRYAFATAHIHGEIYRRRGWLTSEGKEIKNKDEILALLKALFLPKRLSIIHCPGHQKGHSAEARGNRMADQAARKAAITETPDTSTLLIENSSPSGGSKRTADGSEFEAGKRTADGSEFEKRTADGSEFESPKKKAKVE

SEQ ID NO: 2696 - protein, 2117 aa, synthetic construct
MPAAKRVKLDGGDKKYSIGLDIGTNSVGWAVITDEYKVPSKKFKVLGNTDRHSIKKNLIGALLFDSGETAEATRLKRTARRRYTRRKNRICYLQEIFSNEMAKVDDSFFHRLEESFLVEEDKKHERHPIFGNIVDEVAYHEKYPTIYHLRKKLVDSTDKADLRLIYLALAHMIKFRGHFLIEGDLNPDNSDVDKLFIQLVQTYNQLFEENPINASGVDAKAILSARLSKSRRLENLIAQLPGEKKNGLFGNLIALSLGLTPNFKSNFDLAEDAKLQLSKDTYDDDLDNLLAQIGDQYADLFLAAKNLSDAILLSDILRVNTEITKAPLSASMIKRYDEHHQDLTLLKALVRQQLPEKYKEIFFDQSKNGYAGYIDGGASQEEFYKFIKPILEKMDGTEELLVKLNREDLLRKQRTFDNGSIPHQIHLGELHAILRRQEDFYPFLKDNREKIEKILTFRIPYYVGPLARGNSRFAWMTRKSEETITPWNFEEVVDKGASAQSFIERMTNFDKNLPNEKVLPKHSLLYEYFTVYNELTKVKYVTEGMRKPAFLSGEQKKAIVDLLFKTNRKVTVKQLKEDYFKKIECFDSVEISGVEDRFNASLGTYHDLLKIIKDKDFLDNEENEDILEDIVLTLTLFEDREMIEERLKTYAHLFDDKVMKQLKRRRYTGWGRLSRKLINGIRDKQSGKTILDFLKSDGFANRNFMQLIHDDSLTFKEDIQKAQVSGQGDSLHEHIANLAGSPAIKKGILQTVKVVDELVKVMGRHKPENIVIEMARENQTTQKGQKNSRERMKRIEEGIKELGSQILKEHPVENTQLQNEKLYLYYLQNGRDMYVDQELDINRLSDYDVDHIVPQSFLKDDSIDNKVLTRSDKARGKSDNVPSEEVVKKMKNYWRQLLNAKLITQRKFDNLTKAERGGLSELDKAGFIKRQLVETRQITKHVAQILDSRMNTKYDENDKLIREVKVITLKSKLVSDFRKDFQFYKVREINNYHHAHDAYLNAVVGTALIKKYPKLESEFVYGDYKVYDVRKMIAKSEQEIGKATAKYFFYSNIMNFFKTEITLANGEIRKRPLIETNGETGEIVWDKGRDFATVRKVLSMPQVNIVKKTEVQTGGFSKESILPKRNSDKLIARKKDWDPKKYGGFDSPTVAYSVLVVAKVEKGKSKKLKSVKELLGITIMERSSFEKNPIDFLEAKGYKEVKKDLIIKLPKYSLFELENGRKRMLASAGELQKGNELALPSKYVNFLYLASHYEKLKGSPEDNEQKQLFVEQHKHYLDEIIEQISEFSKRVILADANLDKVLSAYNKHRDKPIREQAENIIHLFTLTNLGAPAAFKYFDTTIDRKRYTSTKEVLDATLIHQSITGLYETRIDLSQLGGDGGGSAGSAAGSGEFGGTLNIEDEYRLHETSKEPDVSLGSTWLSDFPQAWAETGGMGLAVRQAPLIIPLKATSTPVSIKQYPMSQEARLGIKPHIQRLLDQGILVPCQSPWNTPLLPVKKPGTNDYRPVQDLREVNKRVEDIHPTVPNPYNLLSGLPPSHQWYTVLDLKDAFFCLRLHPTSQPLFAFEWRDPEMGISGQLTWTRLPQGFKNSPTLFNEALHRDLADFRIQHPDLILLQYVDDLLLAATSELDCQQGTRALLQTLGNLGYRASAKKAQICQKQVKYLGYLLKEGQRWLTEARKETVMGQPTPKTPRQLREFLGKAGFCRLFIPGFAEMAAPLYPLTKPGTLFNWGPDQQKAYQEIKQALLTAPALGLPDLTKPFELFVDEKQGYAKGVLTQKLGPWRRPVAYLSKKLDPVAAGWPPCLRMVAAIAVLTKDAGKLTMGQPLVILAPHAVEALVKQPPDRWLSNARMTHYQALLLDTDRVQFGPVVALNPATLLPLPEEGLQHNCLDILAEAHGTRPDLTDQPLPDADHTWYTDGSSLLQEGQRKAGAAVTTETEVIWAKALPAGTSAQRAELIALTQALKMAEGKKLNVYTDSRYAFATAHIHGEIYRRRGWLTSEGKEIKNKDEILALLKALFLPKRLSIIHCPGHQKGHSAEARGNRMADQAARKAAITETPDTSTLLIENSSPSGGSKRTADGSEFEAGKRTADGSEFEKRTADGSEFESPKKKAKVE

SEQ ID NO: 2697 - protein, 2114 aa, synthetic construct
MPAAKRVKLDGGDKKYSIGLDIGTNSVGWAVITDEYKVPSKKFKVLGNTDRHSIKKNLIGALLFDSGETAEATRLKRTARRRYTRRKNRICYLQEIFSNEMAKVDDSFFHRLEESFLVEEDKKHERHPIFGNIVDEVAYHEKYPTIYHLRKKLVDSTDKADLRLIYLALAHMIKFRGHFLIEGDLNPDNSDVDKLFIQLVQTYNQLFEENPINASGVDAKAILSARLSKSRRLENLIAQLPGEKKNGLFGNLIALSLGLTPNFKSNFDLAEDAKLQLSKDTYDDDLDNLLAQIGDQYADLFLAAKNLSDAILLSDILRVNTEITKAPLSASMIKRYDEHHQDLTLLKALVRQQLPEKYKEIFFDQSKNGYAGYIDGGASQEEFYKFIKPILEKMDGTEELLVKLNREDLLRKQRTFDNGSIPHQIHLGELHAILRRQEDFYPFLKDNREKIEKILTFRIPYYVGPLARGNSRFAWMTRKSEETITPWNFEEVVDKGASAQSFIERMTNFDKNLPNEKVLPKHSLLYEYFTVYNELTKVKYVTEGMRKPAFLSGEQKKAIVDLLFKTNRKVTVKQLKEDYFKKIECFDSVEISGVEDRFNASLGTYHDLLKIIKDKDFLDNEENEDILEDIVLTLTLFEDREMIEERLKTYAHLFDDKVMKQLKRRRYTGWGRLSRKLINGIRDKQSGKTILDFLKSDGFANRNFMQLIHDDSLTFKEDIQKAQVSGQGDSLHEHIANLAGSPAIKKGILQTVKVVDELVKVMGRHKPENIVIEMARENQTTQKGQKNSRERMKRIEEGIKELGSQILKEHPVENTQLQNEKLYLYYLQNGRDMYVDQELDINRLSDYDVDHIVPQSFLKDDSIDNKVLTRSDKARGKSDNVPSEEVVKKMKNYWRQLLNAKLITQRKFDNLTKAERGGLSELDKAGFIKRQLVETRQITKHVAQILDSRMNTKYDENDKLIREVKVITLKSKLVSDFRKDFQFYKVREINNYHHAHDAYLNAVVGTALIKKYPKLESEFVYGDYKVYDVRKMIAKSEQEIGKATAKYFFYSNIMNFFKTEITLANGEIRKRPLIETNGETGEIVWDKGRDFATVRKVLSMPQVNIVKKTEVQTGGFSKESILPKRNSDKLIARKKDWDPKKYGGFDSPTVAYSVLVVAKVEKGKSKKLKSVKELLGITIMERSSFEKNPIDFLEAKGYKEVKKDLIIKLPKYSLFELENGRKRMLASAGELQKGNELALPSKYVNFLYLASHYEKLKGSPEDNEQKQLFVEQHKHYLDEIIEQISEFSKRVILADANLDKVLSAYNKHRDKPIREQAENIIHLFTLTNLGAPAAFKYFDTTIDRKRYTSTKEVLDATLIHQSITGLYETRIDLSQLGGDGGGGSGGSGGSGGTLNIEDEYRLHETSKEPDVSLGSTWLSDFPQAWAETGGMGLAVRQAPLIIPLKATSTPVSIKQYPMSQEARLGIKPHIQRLLDQGILVPCQSPWNTPLLPVKKPGTNDYRPVQDLREVNKRVEDIHPTVPNPYNLLSGLPPSHQWYTVLDLKDAFFCLRLHPTSQPLFAFEWRDPEMGISGQLTWTRLPQGFKNSPTLFNEALHRDLADFRIQHPDLILLQYVDDLLLAATSELDCQQGTRALLQTLGNLGYRASAKKAQICQKQVKYLGYLLKEGQRWLTEARKETVMGQPTPKTPRQLREFLGKAGFCRLFIPGFAEMAAPLYPLTKPGTLFNWGPDQQKAYQEIKQALLTAPALGLPDLTKPFELFVDEKQGYAKGVLTQKLGPWRRPVAYLSKKLDPVAAGWPPCLRMVAAIAVLTKDAGKLTMGQPLVILAPHAVEALVKQPPDRWLSNARMTHYQALLLDTDRVQFGPVVALNPATLLPLPEEGLQHNCLDILAEAHGTRPDLTDQPLPDADHTWYTDGSSLLQEGQRKAGAAVTTETEVIWAKALPAGTSAQRAELIALTQALKMAEGKKLNVYTDSRYAFATAHIHGEIYRRRGWLTSEGKEIKNKDEILALLKALFLPKRLSIIHCPGHQKGHSAEARGNRMADQAARKAAITETPDTSTLLIENSSPSGGSKRTADGSEFEAGKRTADGSEFEKRTADGSEFESPKKKAKVE

SEQ ID NO: 2698 - protein, 2114 aa, synthetic construct
MPAAKRVKLDGGDKKYSIGLDIGTNSVGWAVITDEYKVPSKKFKVLGNTDRHSIKKNLIGALLFDSGETAEATRLKRTARRRYTRRKNRICYLQEIFSNEMAKVDDSFFHRLEESFLVEEDKKHERHPIFGNIVDEVAYHEKYPTIYHLRKKLVDSTDKADLRLIYLALAHMIKFRGHFLIEGDLNPDNSDVDKLFIQLVQTYNQLFEENPINASGVDAKAILSARLSKSRRLENLIAQLPGEKKNGLFGNLIALSLGLTPNFKSNFDLAEDAKLQLSKDTYDDDLDNLLAQIGDQYADLFLAAKNLSDAILLSDILRVNTEITKAPLSASMIKRYDEHHQDLTLLKALVRQQLPEKYKEIFFDQSKNGYAGYIDGGASQEEFYKFIKPILEKMDGTEELLVKLNREDLLRKQRTFDNGSIPHQIHLGELHAILRRQEDFYPFLKDNREKIEKILTFRIPYYVGPLARGNSRFAWMTRKSEETITPWNFEEVVDKGASAQSFIERMTNFDKNLPNEKVLPKHSLLYEYFTVYNELTKVKYVTEGMRKPAFLSGEQKKAIVDLLFKTNRKVTVKQLKEDYFKKIECFDSVEISGVEDRFNASLGTYHDLLKIIKDKDFLDNEENEDILEDIVLTLTLFEDREMIEERLKTYAHLFDDKVMKQLKRRRYTGWGRLSRKLINGIRDKQSGKTILDFLKSDGFANRNFMQLIHDDSLTFKEDIQKAQVSGQGDSLHEHIANLAGSPAIKKGILQTVKVVDELVKVMGRHKPENIVIEMARENQTTQKGQKNSRERMKRIEEGIKELGSQILKEHPVENTQLQNEKLYLYYLQNGRDMYVDQELDINRLSDYDVDHIVPQSFLKDDSIDNKVLTRSDKARGKSDNVPSEEVVKKMKNYWRQLLNAKLITQRKFDNLTKAERGGLSELDKAGFIKRQLVETRQITKHVAQILDSRMNTKYDENDKLIREVKVITLKSKLVSDFRKDFQFYKVREINNYHHAHDAYLNAVVGTALIKKYPKLESEFVYGDYKVYDVRKMIAKSEQEIGKATAKYFFYSNIMNFFKTEITLANGEIRKRPLIETNGETGEIVWDKGRDFATVRKVLSMPQVNIVKKTEVQTGGFSKESILPKRNSDKLIARKKDWDPKKYGGFDSPTVAYSVLVVAKVEKGKSKKLKSVKELLGITIMERSSFEKNPIDFLEAKGYKEVKKDLIIKLPKYSLFELENGRKRMLASAGELQKGNELALPSKYVNFLYLASHYEKLKGSPEDNEQKQLFVEQHKHYLDEIIEQISEFSKRVILADANLDKVLSAYNKHRDKPIREQAENIIHLFTLTNLGAPAAFKYFDTTIDRKRYTSTKEVLDATLIHQSITGLYETRIDLSQLGGDGGGGGPAPGSSGGTLNIEDEYRLHETSKEPDVSLGSTWLSDFPQAWAETGGMGLAVRQAPLIIPLKATSTPVSIKQYPMSQEARLGIKPHIQRLLDQGILVPCQSPWNTPLLPVKKPGTNDYRPVQDLREVNKRVEDIHPTVPNPYNLLSGLPPSHQWYTVLDLKDAFFCLRLHPTSQPLFAFEWRDPEMGISGQLTWTRLPQGFKNSPTLFNEALHRDLADFRIQHPDLILLQYVDDLLLAATSELDCQQGTRALLQTLGNLGYRASAKKAQICQKQVKYLGYLLKEGQRWLTEARKETVMGQPTPKTPRQLREFLGKAGFCRLFIPGFAEMAAPLYPLTKPGTLFNWGPDQQKAYQEIKQALLTAPALGLPDLTKPFELFVDEKQGYAKGVLTQKLGPWRRPVAYLSKKLDPVAAGWPPCLRMVAAIAVLTKDAGKLTMGQPLVILAPHAVEALVKQPPDRWLSNARMTHYQALLLDTDRVQFGPVVALNPATLLPLPEEGLQHNCLDILAEAHGTRPDLTDQPLPDADHTWYTDGSSLLQEGQRKAGAAVTTETEVIWAKALPAGTSAQRAELIALTQALKMAEGKKLNVYTDSRYAFATAHIHGEIYRRRGWLTSEGKEIKNKDEILALLKALFLPKRLSIIHCPGHQKGHSAEARGNRMADQAARKAAITETPDTSTLLIENSSPSGGSKRTADGSEFEAGKRTADGSEFEKRTADGSEFESPKKKAKVE

SEQ ID NO: 2699 - protein, 2114 aa, synthetic construct
MPAAKRVKLDGGDKKYSIGLDIGTNSVGWAVITDEYKVPSKKFKVLGNTDRHSIKKNLIGALLFDSGETAEATRLKRTARRRYTRRKNRICYLQEIFSNEMAKVDDSFFHRLEESFLVEEDKKHERHPIFGNIVDEVAYHEKYPTIYHLRKKLVDSTDKADLRLIYLALAHMIKFRGHFLIEGDLNPDNSDVDKLFIQLVQTYNQLFEENPINASGVDAKAILSARLSKSRRLENLIAQLPGEKKNGLFGNLIALSLGLTPNFKSNFDLAEDAKLQLSKDTYDDDLDNLLAQIGDQYADLFLAAKNLSDAILLSDILRVNTEITKAPLSASMIKRYDEHHQDLTLLKALVRQQLPEKYKEIFFDQSKNGYAGYIDGGASQEEFYKFIKPILEKMDGTEELLVKLNREDLLRKQRTFDNGSIPHQIHLGELHAILRRQEDFYPFLKDNREKIEKILTFRIPYYVGPLARGNSRFAWMTRKSEETITPWNFEEVVDKGASAQSFIERMTNFDKNLPNEKVLPKHSLLYEYFTVYNELTKVKYVTEGMRKPAFLSGEQKKAIVDLLFKTNRKVTVKQLKEDYFKKIECFDSVEISGVEDRFNASLGTYHDLLKIIKDKDFLDNEENEDILEDIVLTLTLFEDREMIEERLKTYAHLFDDKVMKQLKRRRYTGWGRLSRKLINGIRDKQSGKTILDFLKSDGFANRNFMQLIHDDSLTFKEDIQKAQVSGQGDSLHEHIANLAGSPAIKKGILQTVKVVDELVKVMGRHKPENIVIEMARENQTTQKGQKNSRERMKRIEEGIKELGSQILKEHPVENTQLQNEKLYLYYLQNGRDMYVDQELDINRLSDYDVDHIVPQSFLKDDSIDNKVLTRSDKARGKSDNVPSEEVVKKMKNYWRQLLNAKLITQRKFDNLTKAERGGLSELDKAGFIKRQLVETRQITKHVAQILDSRMNTKYDENDKLIREVKVITLKSKLVSDFRKDFQFYKVREINNYHHAHDAYLNAVVGTALIKKYPKLESEFVYGDYKVYDVRKMIAKSEQEIGKATAKYFFYSNIMNFFKTEITLANGEIRKRPLIETNGETGEIVWDKGRDFATVRKVLSMPQVNIVKKTEVQTGGFSKESILPKRNSDKLIARKKDWDPKKYGGFDSPTVAYSVLVVAKVEKGKSKKLKSVKELLGITIMERSSFEKNPIDFLEAKGYKEVKKDLIIKLPKYSLFELENGRKRMLASAGELQKGNELALPSKYVNFLYLASHYEKLKGSPEDNEQKQLFVEQHKHYLDEIIEQISEFSKRVILADANLDKVLSAYNKHRDKPIREQAENIIHLFTLTNLGAPAAFKYFDTTIDRKRYTSTKEVLDATLIHQSITGLYETRIDLSQLGGDGGGSSGGSPAPGGTLNIEDEYRLHETSKEPDVSLGSTWLSDFPQAWAETGGMGLAVRQAPLIIPLKATSTPVSIKQYPMSQEARLGIKPHIQRLLDQGILVPCQSPWNTPLLPVKKPGTNDYRPVQDLREVNKRVEDIHPTVPNPYNLLSGLPPSHQWYTVLDLKDAFFCLRLHPTSQPLFAFEWRDPEMGISGQLTWTRLPQGFKNSPTLFNEALHRDLADFRIQHPDLILLQYVDDLLLAATSELDCQQGTRALLQTLGNLGYRASAKKAQICQKQVKYLGYLLKEGQRWLTEARKETVMGQPTPKTPRQLREFLGKAGFCRLFIPGFAEMAAPLYPLTKPGTLFNWGPDQQKAYQEIKQALLTAPALGLPDLTKPFELFVDEKQGYAKGVLTQKLGPWRRPVAYLSKKLDPVAAGWPPCLRMVAAIAVLTKDAGKLTMGQPLVILAPHAVEALVKQPPDRWLSNARMTHYQALLLDTDRVQFGPVVALNPATLLPLPEEGLQHNCLDILAEAHGTRPDLTDQPLPDADHTWYTDGSSLLQEGQRKAGAAVTTETEVIWAKALPAGTSAQRAELIALTQALKMAEGKKLNVYTDSRYAFATAHIHGEIYRRRGWLTSEGKEIKNKDEILALLKALFLPKRLSIIHCPGHQKGHSAEARGNRMADQAARKAAITETPDTSTLLIENSSPSGGSKRTADGSEFEAGKRTADGSEFEKRTADGSEFESPKKKAKVE

SEQ ID NO: 2700 - protein, 2113 aa, synthetic construct
MPAAKRVKLDGGDKKYSIGLDIGTNSVGWAVITDEYKVPSKKFKVLGNTDRHSIKKNLIGALLFDSGETAEATRLKRTARRRYTRRKNRICYLQEIFSNEMAKVDDSFFHRLEESFLVEEDKKHERHPIFGNIVDEVAYHEKYPTIYHLRKKLVDSTDKADLRLIYLALAHMIKFRGHFLIEGDLNPDNSDVDKLFIQLVQTYNQLFEENPINASGVDAKAILSARLSKSRRLENLIAQLPGEKKNGLFGNLIALSLGLTPNFKSNFDLAEDAKLQLSKDTYDDDLDNLLAQIGDQYADLFLAAKNLSDAILLSDILRVNTEITKAPLSASMIKRYDEHHQDLTLLKALVRQQLPEKYKEIFFDQSKNGYAGYIDGGASQEEFYKFIKPILEKMDGTEELLVKLNREDLLRKQRTFDNGSIPHQIHLGELHAILRRQEDFYPFLKDNREKIEKILTFRIPYYVGPLARGNSRFAWMTRKSEETITPWNFEEVVDKGASAQSFIERMTNFDKNLPNEKVLPKHSLLYEYFTVYNELTKVKYVTEGMRKPAFLSGEQKKAIVDLLFKTNRKVTVKQLKEDYFKKIECFDSVEISGVEDRFNASLGTYHDLLKIIKDKDFLDNEENEDILEDIVLTLTLFEDREMIEERLKTYAHLFDDKVMKQLKRRRYTGWGRLSRKLINGIRDKQSGKTILDFLKSDGFANRNFMQLIHDDSLTFKEDIQKAQVSGQGDSLHEHIANLAGSPAIKKGILQTVKVVDELVKVMGRHKPENIVIEMARENQTTQKGQKNSRERMKRIEEGIKELGSQILKEHPVENTQLQNEKLYLYYLQNGRDMYVDQELDINRLSDYDVDHIVPQSFLKDDSIDNKVLTRSDKARGKSDNVPSEEVVKKMKNYWRQLLNAKLITQRKFDNLTKAERGGLSELDKAGFIKRQLVETRQITKHVAQILDSRMNTKYDENDKLIREVKVITLKSKLVSDFRKDFQFYKVREINNYHHAHDAYLNAVVGTALIKKYPKLESEFVYGDYKVYDVRKMIAKSEQEIGKATAKYFFYSNIMNFFKTEITLANGEIRKRPLIETNGETGEIVWDKGRDFATVRKVLSMPQVNIVKKTEVQTGGFSKESILPKRNSDKLIARKKDWDPKKYGGFDSPTVAYSVLVVAKVEKGKSKKLKSVKELLGITIMERSSFEKNPIDFLEAKGYKEVKKDLIIKLPKYSLFELENGRKRMLASAGELQKGNELALPSKYVNFLYLASHYEKLKGSPEDNEQKQLFVEQHKHYLDEIIEQISEFSKRVILADANLDKVLSAYNKHRDKPIREQAENIIHLFTLTNLGAPAAFKYFDTTIDRKRYTSTKEVLDATLIHQSITGLYETRIDLSQLGGDGGGGSEAAAKGGTLNIEDEYRLHETSKEPDVSLGSTWLSDFPQAWAETGGMGLAVRQAPLIIPLKATSTPVSIKQYPMSQEARLGIKPHIQRLLDQGILVPCQSPWNTPLLPVKKPGTNDYRPVQDLREVNKRVEDIHPTVPNPYNLLSGLPPSHQWYTVLDLKDAFFCLRLHPTSQPLFAFEWRDPEMGISGQLTWTRLPQGFKNSPTLFNEALHRDLADFRIQHPDLILLQYVDDLLLAATSELDCQQGTRALLQTLGNLGYRASAKKAQICQKQVKYLGYLLKEGQRWLTEARKETVMGQPTPKTPRQLREFLGKAGFCRLFIPGFAEMAAPLYPLTKPGTLFNWGPDQQKAYQEIKQALLTAPALGLPDLTKPFELFVDEKQGYAKGVLTQKLGPWRRPVAYLSKKLDPVAAGWPPCLRMVAAIAVLTKDAGKLTMGQPLVILAPHAVEALVKQPPDRWLSNARMTHYQALLLDTDRVQFGPVVALNPATLLPLPEEGLQHNCLDILAEAHGTRPDLTDQPLPDADHTWYTDGSSLLQEGQRKAGAAVTTETEVIWAKALPAGTSAQRAELIALTQALKMAEGKKLNVYTDSRYAFATAHIHGEIYRRRGWLTSEGKEIKNKDEILALLKALFLPKRLSIIHCPGHQKGHSAEARGNRMADQAARKAAITETPDTSTLLIENSSPSGGSKRTADGSEFEAGKRTADGSEFEKRTADGSEFESPKKKAKVE

SEQ ID NO: 2701 - protein, 2116 aa, synthetic construct
MPAAKRVKLDGGDKKYSIGLDIGTNSVGWAVITDEYKVPSKKFKVLGNTDRHSIKKNLIGALLFDSGETAEATRLKRTARRRYTRRKNRICYLQEIFSNEMAKVDDSFFHRLEESFLVEEDKKHERHPIFGNIVDEVAYHEKYPTIYHLRKKLVDSTDKADLRLIYLALAHMIKFRGHFLIEGDLNPDNSDVDKLFIQLVQTYNQLFEENPINASGVDAKAILSARLSKSRRLENLIAQLPGEKKNGLFGNLIALSLGLTPNFKSNFDLAEDAKLQLSKDTYDDDLDNLLAQIGDQYADLFLAAKNLSDAILLSDILRVNTEITKAPLSASMIKRYDEHHQDLTLLKALVRQQLPEKYKEIFFDQSKNGYAGYIDGGASQEEFYKFIKPILEKMDGTEELLVKLNREDLLRKQRTFDNGSIPHQIHLGELHAILRRQEDFYPFLKDNREKIEKILTFRIPYYVGPLARGNSRFAWMTRKSEETITPWNFEEVVDKGASAQSFIERMTNFDKNLPNEKVLPKHSLLYEYFTVYNELTKVKYVTEGMRKPAFLSGEQKKAIVDLLFKTNRKVTVKQLKEDYFKKIECFDSVEISGVEDRFNASLGTYHDLLKIIKDKDFLDNEENEDILEDIVLTLTLFEDREMIEERLKTYAHLFDDKVMKQLKRRRYTGWGRLSRKLINGIRDKQSGKTILDFLKSDGFANRNFMQLIHDDSLTFKEDIQKAQVSGQGDSLHEHIANLAGSPAIKKGILQTVKVVDELVKVMGRHKPENIVIEMARENQTTQKGQKNSRERMKRIEEGIKELGSQILKEHPVENTQLQNEKLYLYYLQNGRDMYVDQELDINRLSDYDVDHIVPQSFLKDDSIDNKVLTRSDKARGKSDNVPSEEVVKKMKNYWRQLLNAKLITQRKFDNLTKAERGGLSELDKAGFIKRQLVETRQITKHVAQILDSRMNTKYDENDKLIREVKVITLKSKLVSDFRKDFQFYKVREINNYHHAHDAYLNAVVGTALIKKYPKLESEFVYGDYKVYDVRKMIAKSEQEIGKATAKYFFYSNIMNFFKTEITLANGEIRKRPLIETNGETGEIVWDKGRDFATVRKVLSMPQVNIVKKTEVQTGGFSKESILPKRNSDKLIARKKDWDPKKYGGFDSPTVAYSVLVVAKVEKGKSKKLKSVKELLGITIMERSSFEKNPIDFLEAKGYKEVKKDLIIKLPKYSLFELENGRKRMLASAGELQKGNELALPSKYVNFLYLASHYEKLKGSPEDNEQKQLFVEQHKHYLDEIIEQISEFSKRVILADANLDKVLSAYNKHRDKPIREQAENIIHLFTLTNLGAPAAFKYFDTTIDRKRYTSTKEVLDATLIHQSITGLYETRIDLSQLGGDGGGGSPAPEAAAKGGTLNIEDEYRLHETSKEPDVSLGSTWLSDFPQAWAETGGMGLAVRQAPLIIPLKATSTPVSIKQYPMSQEARLGIKPHIQRLLDQGILVPCQSPWNTPLLPVKKPGTNDYRPVQDLREVNKRVEDIHPTVPNPYNLLSGLPPSHQWYTVLDLKDAFFCLRLHPTSQPLFAFEWRDPEMGISGQLTWTRLPQGFKNSPTLFNEALHRDLADFRIQHPDLILLQYVDDLLLAATSELDCQQGTRALLQTLGNLGYRASAKKAQICQKQVKYLGYLLKEGQRWLTEARKETVMGQPTPKTPRQLREFLGKAGFCRLFIPGFAEMAAPLYPLTKPGTLFNWGPDQQKAYQEIKQALLTAPALGLPDLTKPFELFVDEKQGYAKGVLTQKLGPWRRPVAYLSKKLDPVAAGWPPCLRMVAAIAVLTKDAGKLTMGQPLVILAPHAVEALVKQPPDRWLSNARMTHYQALLLDTDRVQFGPVVALNPATLLPLPEEGLQHNCLDILAEAHGTRPDLTDQPLPDADHTWYTDGSSLLQEGQRKAGAAVTTETEVIWAKALPAGTSAQRAELIALTQALKMAEGKKLNVYTDSRYAFATAHIHGEIYRRRGWLTSEGKEIKNKDEILALLKALFLPKRLSIIHCPGHQKGHSAEARGNRMADQAARKAAITETPDTSTLLIENSSPSGGSKRTADGSEFEAGKRTADGSEFEKRTADGSEFESPKKKAKVE

SEQ ID NO: 2702 - protein, 2114 aa, synthetic construct
MPAAKRVKLDGGDKKYSIGLDIGTNSVGWAVITDEYKVPSKKFKVLGNTDRHSIKKNLIGALLFDSGETAEATRLKRTARRRYTRRKNRICYLQEIFSNEMAKVDDSFFHRLEESFLVEEDKKHERHPIFGNIVDEVAYHEKYPTIYHLRKKLVDSTDKADLRLIYLALAHMIKFRGHFLIEGDLNPDNSDVDKLFIQLVQTYNQLFEENPINASGVDAKAILSARLSKSRRLENLIAQLPGEKKNGLFGNLIALSLGLTPNFKSNFDLAEDAKLQLSKDTYDDDLDNLLAQIGDQYADLFLAAKNLSDAILLSDILRVNTEITKAPLSASMIKRYDEHHQDLTLLKALVRQQLPEKYKEIFFDQSKNGYAGYIDGGASQEEFYKFIKPILEKMDGTEELLVKLNREDLLRKQRTFDNGSIPHQIHLGELHAILRRQEDFYPFLKDNREKIEKILTFRIPYYVGPLARGNSRFAWMTRKSEETITPWNFEEVVDKGASAQSFIERMTNFDKNLPNEKVLPKHSLLYEYFTVYNELTKVKYVTEGMRKPAFLSGEQKKAIVDLLFKTNRKVTVKQLKEDYFKKIECFDSVEISGVEDRFNASLGTYHDLLKIIKDKDFLDNEENEDILEDIVLTLTLFEDREMIEERLKTYAHLFDDKVMKQLKRRRYTGWGRLSRKLINGIRDKQSGKTILDFLKSDGFANRNFMQLIHDDSLTFKEDIQKAQVSGQGDSLHEHIANLAGSPAIKKGILQTVKVVDELVKVMGRHKPENIVIEMARENQTTQKGQKNSRERMKRIEEGIKELGSQILKEHPVENTQLQNEKLYLYYLQNGRDMYVDQELDINRLSDYDVDHIVPQSFLKDDSIDNKVLTRSDKARGKSDNVPSEEVVKKMKNYWRQLLNAKLITQRKFDNLTKAERGGLSELDKAGFIKRQLVETRQITKHVAQILDSRMNTKYDENDKLIREVKVITLKSKLVSDFRKDFQFYKVREINNYHHAHDAYLNAVVGTALIKKYPKLESEFVYGDYKVYDVRKMIAKSEQEIGKATAKYFFYSNIMNFFKTEITLANGEIRKRPLIETNGETGEIVWDKGRDFATVRKVLSMPQVNIVKKTEVQTGGFSKESILPKRNSDKLIARKKDWDPKKYGGFDSPTVAYSVLVVAKVEKGKSKKLKSVKELLGITIMERSSFEKNPIDFLEAKGYKEVKKDLIIKLPKYSLFELENGRKRMLASAGELQKGNELALPSKYVNFLYLASHYEKLKGSPEDNEQKQLFVEQHKHYLDEIIEQISEFSKRVILADANLDKVLSAYNKHRDKPIREQAENIIHLFTLTNLGAPAAFKYFDTTIDRKRYTSTKEVLDATLIHQSITGLYETRIDLSQLGGDGGGGSGGGGSSGGTLNIEDEYRLHETSKEPDVSLGSTWLSDFPQAWAETGGMGLAVRQAPLIIPLKATSTPVSIKQYPMSQEARLGIKPHIQRLLDQGILVPCQSPWNTPLLPVKKPGTNDYRPVQDLREVNKRVEDIHPTVPNPYNLLSGLPPSHQWYTVLDLKDAFFCLRLHPTSQPLFAFEWRDPEMGISGQLTWTRLPQGFKNSPTLFNEALHRDLADFRIQHPDLILLQYVDDLLLAATSELDCQQGTRALLQTLGNLGYRASAKKAQICQKQVKYLGYLLKEGQRWLTEARKETVMGQPTPKTPRQLREFLGKAGFCRLFIPGFAEMAAPLYPLTKPGTLFNWGPDQQKAYQEIKQALLTAPALGLPDLTKPFELFVDEKQGYAKGVLTQKLGPWRRPVAYLSKKLDPVAAGWPPCLRMVAAIAVLTKDAGKLTMGQPLVILAPHAVEALVKQPPDRWLSNARMTHYQALLLDTDRVQFGPVVALNPATLLPLPEEGLQHNCLDILAEAHGTRPDLTDQPLPDADHTWYTDGSSLLQEGQRKAGAAVTTETEVIWAKALPAGTSAQRAELIALTQALKMAEGKKLNVYTDSRYAFATAHIHGEIYRRRGWLTSEGKEIKNKDEILALLKALFLPKRLSIIHCPGHQKGHSAEARGNRMADQAARKAAITETPDTSTLLIENSSPSGGSKRTADGSEFEAGKRTADGSEFEKRTADGSEFESPKKKAKVE

SEQ ID NO: 2703 - protein, 2116 aa, synthetic construct
MPAAKRVKLDGGDKKYSIGLDIGTNSVGWAVITDEYKVPSKKFKVLGNTDRHSIKKNLIGALLFDSGETAEATRLKRTARRRYTRRKNRICYLQEIFSNEMAKVDDSFFHRLEESFLVEEDKKHERHPIFGNIVDEVAYHEKYPTIYHLRKKLVDSTDKADLRLIYLALAHMIKFRGHFLIEGDLNPDNSDVDKLFIQLVQTYNQLFEENPINASGVDAKAILSARLSKSRRLENLIAQLPGEKKNGLFGNLIALSLGLTPNFKSNFDLAEDAKLQLSKDTYDDDLDNLLAQIGDQYADLFLAAKNLSDAILLSDILRVNTEITKAPLSASMIKRYDEHHQDLTLLKALVRQQLPEKYKEIFFDQSKNGYAGYIDGGASQEEFYKFIKPILEKMDGTEELLVKLNREDLLRKQRTFDNGSIPHQIHLGELHAILRRQEDFYPFLKDNREKIEKILTFRIPYYVGPLARGNSRFAWMTRKSEETITPWNFEEVVDKGASAQSFIERMTNFDKNLPNEKVLPKHSLLYEYFTVYNELTKVKYVTEGMRKPAFLSGEQKKAIVDLLFKTNRKVTVKQLKEDYFKKIECFDSVEISGVEDRFNASLGTYHDLLKIIKDKDFLDNEENEDILEDIVLTLTLFEDREMIEERLKTYAHLFDDKVMKQLKRRRYTGWGRLSRKLINGIRDKQSGKTILDFLKSDGFANRNFMQLIHDDSLTFKEDIQKAQVSGQGDSLHEHIANLAGSPAIKKGILQTVKVVDELVKVMGRHKPENIVIEMARENQTTQKGQKNSRERMKRIEEGIKELGSQILKEHPVENTQLQNEKLYLYYLQNGRDMYVDQELDINRLSDYDVDHIVPQSFLKDDSIDNKVLTRSDKARGKSDNVPSEEVVKKMKNYWRQLLNAKLITQRKFDNLTKAERGGLSELDKAGFIKRQLVETRQITKHVAQILDSRMNTKYDENDKLIREVKVITLKSKLVSDFRKDFQFYKVREINNYHHAHDAYLNAVVGTALIKKYPKLESEFVYGDYKVYDVRKMIAKSEQEIGKATAKYFFYSNIMNFFKTEITLANGEIRKRPLIETNGETGEIVWDKGRDFATVRKVLSMPQVNIVKKTEVQTGGFSKESILPKRNSDKLIARKKDWDPKKYGGFDSPTVAYSVLVVAKVEKGKSKKLKSVKELLGITIMERSSFEKNPIDFLEAKGYKEVKKDLIIKLPKYSLFELENGRKRMLASAGELQKGNELALPSKYVNFLYLASHYEKLKGSPEDNEQKQLFVEQHKHYLDEIIEQISEFSKRVILADANLDKVLSAYNKHRDKPIREQAENIIHLFTLTNLGAPAAFKYFDTTIDRKRYTSTKEVLDATLIHQSITGLYETRIDLSQLGGDGGGSSEAAAKGGSGGTLNIEDEYRLHETSKEPDVSLGSTWLSDFPQAWAETGGMGLAVRQAPLIIPLKATSTPVSIKQYPMSQEARLGIKPHIQRLLDQGILVPCQSPWNTPLLPVKKPGTNDYRPVQDLREVNKRVEDIHPTVPNPYNLLSGLPPSHQWYTVLDLKDAFFCLRLHPTSQPLFAFEWRDPEMGISGQLTWTRLPQGFKNSPTLFNEALHRDLADFRIQHPDLILLQYVDDLLLAATSELDCQQGTRALLQTLGNLGYRASAKKAQICQKQVKYLGYLLKEGQRWLTEARKETVMGQPTPKTPRQLREFLGKAGFCRLFIPGFAEMAAPLYPLTKPGTLFNWGPDQQKAYQEIKQALLTAPALGLPDLTKPFELFVDEKQGYAKGVLTQKLGPWRRPVAYLSKKLDPVAAGWPPCLRMVAAIAVLTKDAGKLTMGQPLVILAPHAVEALVKQPPDRWLSNARMTHYQALLLDTDRVQFGPVVALNPATLLPLPEEGLQHNCLDILAEAHGTRPDLTDQPLPDADHTWYTDGSSLLQEGQRKAGAAVTTETEVIWAKALPAGTSAQRAELIALTQALKMAEGKKLNVYTDSRYAFATAHIHGEIYRRRGWLTSEGKEIKNKDEILALLKALFLPKRLSIIHCPGHQKGHSAEARGNRMADQAARKAAITETPDTSTLLIENSSPSGGSKRTADGSEFEAGKRTADGSEFEKRTADGSEFESPKKKAKVE

SEQ ID NO: 2704 - protein, 2094 aa, synthetic construct
MPAAKRVKLDGGDKKYSIGLDIGTNSVGWAVITDEYKVPSKKFKVLGNTDRHSIKKNLIGALLFDSGETAEATRLKRTARRRYTRRKNRICYLQEIFSNEMAKVDDSFFHRLEESFLVEEDKKHERHPIFGNIVDEVAYHEKYPTIYHLRKKLVDSTDKADLRLIYLALAHMIKFRGHFLIEGDLNPDNSDVDKLFIQLVQTYNQLFEENPINASGVDAKAILSARLSKSRRLENLIAQLPGEKKNGLFGNLIALSLGLTPNFKSNFDLAEDAKLQLSKDTYDDDLDNLLAQIGDQYADLFLAAKNLSDAILLSDILRVNTEITKAPLSASMIKRYDEHHQDLTLLKALVRQQLPEKYKEIFFDQSKNGYAGYIDGGASQEEFYKFIKPILEKMDGTEELLVKLNREDLLRKQRTFDNGSIPHQIHLGELHAILRRQEDFYPFLKDNREKIEKILTFRIPYYVGPLARGNSRFAWMTRKSEETITPWNFEEVVDKGASAQSFIERMTNFDKNLPNEKVLPKHSLLYEYFTVYNELTKVKYVTEGMRKPAFLSGEQKKAIVDLLFKTNRKVTVKQLKEDYFKKIECFDSVEISGVEDRFNASLGTYHDLLKIIKDKDFLDNEENEDILEDIVLTLTLFEDREMIEERLKTYAHLFDDKVMKQLKRRRYTGWGRLSRKLINGIRDKQSGKTILDFLKSDGFANRNFMQLIHDDSLTFKEDIQKAQVSGQGDSLHEHIANLAGSPAIKKGILQTVKVVDELVKVMGRHKPENIVIEMARENQTTQKGQKNSRERMKRIEEGIKELGSQILKEHPVENTQLQNEKLYLYYLQNGRDMYVDQELDINRLSDYDVDHIVPQSFLKDDSIDNKVLTRSDKARGKSDNVPSEEVVKKMKNYWRQLLNAKLITQRKFDNLTKAERGGLSELDKAGFIKRQLVETRQITKHVAQILDSRMNTKYDENDKLIREVKVITLKSKLVSDFRKDFQFYKVREINNYHHAHDAYLNAVVGTALIKKYPKLESEFVYGDYKVYDVRKMIAKSEQEIGKATAKYFFYSNIMNFFKTEITLANGEIRKRPLIETNGETGEIVWDKGRDFATVRKVLSMPQVNIVKKTEVQTGGFSKESILPKRNSDKLIARKKDWDPKKYGGFDSPTVAYSVLVVAKVEKGKSKKLKSVKELLGITIMERSSFEKNPIDFLEAKGYKEVKKDLIIKLPKYSLFELENGRKRMLASAGELQKGNELALPSKYVNFLYLASHYEKLKGSPEDNEQKQLFVEQHKHYLDEIIEQISEFSKRVILADANLDKVLSAYNKHRDKPIREQAENIIHLFTLTNLGAPAAFKYFDTTIDRKRYTSTKEVLDATLIHQSITGLYETRIDLSQLGGDGGGGSPAPGSSGGTLNIEDEHRLHETSKEPDVSLGSTWLSDFPQAWAETGGMGLAVRQAPLIIPLKATSTPVSIKQYPMSQEARLGIKPHIQRLLDQGILVPCQSPWNTPLLPVKKPGTNDYRPVQDLREVNKRVEDIHPTVPNPYNLLSGLPPSHQWYTVLDLKDAFFCLRLHPTSQPLFAFEWRDPEMGISGQLTWTRLPQGFKNSPTLFDEALHRDLADFRIQHPDLILLQYVDDLLLAATSELDCQQGTRALLQTLGNLGYRASAKKAQICQKQVKYLGYLLKEGQRWLTEARKETVMGQPTPKTPRQLREFLGTAGFCRLWIPGFAEMAAPLYPLTKTGTLFNWGPDQQKAYQEIKQALLTAPALGLPDLTKPFELFVDEKQGYAKGVLTQKLGPWRRPVAYLSKKLDPVAAGWPPCLRMVAAIAVLTKDAGKLTMGQPLVILAPHAVEALVKQPPDRWLSNARMTHYQALLLDTDRVQFGPVVALNPATLLPLPEEGLQHNCLDILAEAHGTRPDLTDQPLPDADHTWYTDGSSLLQEGQRKAGAAVTTETEVIWAKALPAGTSAQRAELIALTQALKMAEGKKLNVYTDSRYAFATAHIHGEIYRRRGLLTSEGKEIKNKDEILALLKALFLPKRLSIIHCPGHQKGHSAEARGNRMADQAARKAAITETPDTSTLLAGKRTADGSEFEKRTADGSEFESPKKKAKVE

SEQ ID NO: 2705 - protein, 2096 aa, synthetic construct
MPAAKRVKLDGGDKKYSIGLDIGTNSVGWAVITDEYKVPSKKFKVLGNTDRHSIKKNLIGALLFDSGETAEATRLKRTARRRYTRRKNRICYLQEIFSNEMAKVDDSFFHRLEESFLVEEDKKHERHPIFGNIVDEVAYHEKYPTIYHLRKKLVDSTDKADLRLIYLALAHMIKFRGHFLIEGDLNPDNSDVDKLFIQLVQTYNQLFEENPINASGVDAKAILSARLSKSRRLENLIAQLPGEKKNGLFGNLIALSLGLTPNFKSNFDLAEDAKLQLSKDTYDDDLDNLLAQIGDQYADLFLAAKNLSDAILLSDILRVNTEITKAPLSASMIKRYDEHHQDLTLLKALVRQQLPEKYKEIFFDQSKNGYAGYIDGGASQEEFYKFIKPILEKMDGTEELLVKLNREDLLRKQRTFDNGSIPHQIHLGELHAILRRQEDFYPFLKDNREKIEKILTFRIPYYVGPLARGNSRFAWMTRKSEETITPWNFEEVVDKGASAQSFIERMTNFDKNLPNEKVLPKHSLLYEYFTVYNELTKVKYVTEGMRKPAFLSGEQKKAIVDLLFKTNRKVTVKQLKEDYFKKIECFDSVEISGVEDRFNASLGTYHDLLKIIKDKDFLDNEENEDILEDIVLTLTLFEDREMIEERLKTYAHLFDDKVMKQLKRRRYTGWGRLSRKLINGIRDKQSGKTILDFLKSDGFANRNFMQLIHDDSLTFKEDIQKAQVSGQGDSLHEHIANLAGSPAIKKGILQTVKVVDELVKVMGRHKPENIVIEMARENQTTQKGQKNSRERMKRIEEGIKELGSQILKEHPVENTQLQNEKLYLYYLQNGRDMYVDQELDINRLSDYDVDHIVPQSFLKDDSIDNKVLTRSDKARGKSDNVPSEEVVKKMKNYWRQLLNAKLITQRKFDNLTKAERGGLSELDKAGFIKRQLVETRQITKHVAQILDSRMNTKYDENDKLIREVKVITLKSKLVSDFRKDFQFYKVREINNYHHAHDAYLNAVVGTALIKKYPKLESEFVYGDYKVYDVRKMIAKSEQEIGKATAKYFFYSNIMNFFKTEITLANGEIRKRPLIETNGETGEIVWDKGRDFATVRKVLSMPQVNIVKKTEVQTGGFSKESILPKRNSDKLIARKKDWDPKKYGGFDSPTVAYSVLVVAKVEKGKSKKLKSVKELLGITIMERSSFEKNPIDFLEAKGYKEVKKDLIIKLPKYSLFELENGRKRMLASAGELQKGNELALPSKYVNFLYLASHYEKLKGSPEDNEQKQLFVEQHKHYLDEIIEQISEFSKRVILADANLDKVLSAYNKHRDKPIREQAENIIHLFTLTNLGAPAAFKYFDTTIDRKRYTSTKEVLDATLIHQSITGLYETRIDLSQLGGDGGEAAAKGSSGGGGGTLNIEDEHRLHETSKEPDVSLGSTWLSDFPQAWAETGGMGLAVRQAPLIIPLKATSTPVSIKQYPMSQEARLGIKPHIQRLLDQGILVPCQSPWNTPLLPVKKPGTNDYRPVQDLREVNKRVEDIHPTVPNPYNLLSGLPPSHQWYTVLDLKDAFFCLRLHPTSQPLFAFEWRDPEMGISGQLTWTRLPQGFKNSPTLFDEALHRDLADFRIQHPDLILLQYVDDLLLAATSELDCQQGTRALLQTLGNLGYRASAKKAQICQKQVKYLGYLLKEGQRWLTEARKETVMGQPTPKTPRQLREFLGTAGFCRLWIPGFAEMAAPLYPLTKTGTLFNWGPDQQKAYQEIKQALLTAPALGLPDLTKPFELFVDEKQGYAKGVLTQKLGPWRRPVAYLSKKLDPVAAGWPPCLRMVAAIAVLTKDAGKLTMGQPLVILAPHAVEALVKQPPDRWLSNARMTHYQALLLDTDRVQFGPVVALNPATLLPLPEEGLQHNCLDILAEAHGTRPDLTDQPLPDADHTWYTDGSSLLQEGQRKAGAAVTTETEVIWAKALPAGTSAQRAELIALTQALKMAEGKKLNVYTDSRYAFATAHIHGEIYRRRGLLTSEGKEIKNKDEILALLKALFLPKRLSIIHCPGHQKGHSAEARGNRMADQAARKAAITETPDTSTLLAGKRTADGSEFEKRTADGSEFESPKKKAKVE

SEQ ID NO: 2706 - protein, 2096 aa, synthetic construct
MPAAKRVKLDGGDKKYSIGLDIGTNSVGWAVITDEYKVPSKKFKVLGNTDRHSIKKNLIGALLFDSGETAEATRLKRTARRRYTRRKNRICYLQEIFSNEMAKVDDSFFHRLEESFLVEEDKKHERHPIFGNIVDEVAYHEKYPTIYHLRKKLVDSTDKADLRLIYLALAHMIKFRGHFLIEGDLNPDNSDVDKLFIQLVQTYNQLFEENPINASGVDAKAILSARLSKSRRLENLIAQLPGEKKNGLFGNLIALSLGLTPNFKSNFDLAEDAKLQLSKDTYDDDLDNLLAQIGDQYADLFLAAKNLSDAILLSDILRVNTEITKAPLSASMIKRYDEHHQDLTLLKALVRQQLPEKYKEIFFDQSKNGYAGYIDGGASQEEFYKFIKPILEKMDGTEELLVKLNREDLLRKQRTFDNGSIPHQIHLGELHAILRRQEDFYPFLKDNREKIEKILTFRIPYYVGPLARGNSRFAWMTRKSEETITPWNFEEVVDKGASAQSFIERMTNFDKNLPNEKVLPKHSLLYEYFTVYNELTKVKYVTEGMRKPAFLSGEQKKAIVDLLFKTNRKVTVKQLKEDYFKKIECFDSVEISGVEDRFNASLGTYHDLLKIIKDKDFLDNEENEDILEDIVLTLTLFEDREMIEERLKTYAHLFDDKVMKQLKRRRYTGWGRLSRKLINGIRDKQSGKTILDFLKSDGFANRNFMQLIHDDSLTFKEDIQKAQVSGQGDSLHEHIANLAGSPAIKKGILQTVKVVDELVKVMGRHKPENIVIEMARENQTTQKGQKNSRERMKRIEEGIKELGSQILKEHPVENTQLQNEKLYLYYLQNGRDMYVDQELDINRLSDYDVDHIVPQSFLKDDSIDNKVLTRSDKARGKSDNVPSEEVVKKMKNYWRQLLNAKLITQRKFDNLTKAERGGLSELDKAGFIKRQLVETRQITKHVAQILDSRMNTKYDENDKLIREVKVITLKSKLVSDFRKDFQFYKVREINNYHHAHDAYLNAVVGTALIKKYPKLESEFVYGDYKVYDVRKMIAKSEQEIGKATAKYFFYSNIMNFFKTEITLANGEIRKRPLIETNGETGEIVWDKGRDFATVRKVLSMPQVNIVKKTEVQTGGFSKESILPKRNSDKLIARKKDWDPKKYGGFDSPTVAYSVLVVAKVEKGKSKKLKSVKELLGITIMERSSFEKNPIDFLEAKGYKEVKKDLIIKLPKYSLFELENGRKRMLASAGELQKGNELALPSKYVNFLYLASHYEKLKGSPEDNEQKQLFVEQHKHYLDEIIEQISEFSKRVILADANLDKVLSAYNKHRDKPIREQAENIIHLFTLTNLGAPAAFKYFDTTIDRKRYTSTKEVLDATLIHQSITGLYETRIDLSQLGGDGGGSSGGGEAAAKGGTLNIEDEHRLHETSKEPDVSLGSTWLSDFPQAWAETGGMGLAVRQAPLIIPLKATSTPVSIKQYPMSQEARLGIKPHIQRLLDQGILVPCQSPWNTPLLPVKKPGTNDYRPVQDLREVNKRVEDIHPTVPNPYNLLSGLPPSHQWYTVLDLKDAFFCLRLHPTSQPLFAFEWRDPEMGISGQLTWTRLPQGFKNSPTLFDEALHRDLADFRIQHPDLILLQYVDDLLLAATSELDCQQGTRALLQTLGNLGYRASAKKAQICQKQVKYLGYLLKEGQRWLTEARKETVMGQPTPKTPRQLREFLGTAGFCRLWIPGFAEMAAPLYPLTKTGTLFNWGPDQQKAYQEIKQALLTAPALGLPDLTKPFELFVDEKQGYAKGVLTQKLGPWRRPVAYLSKKLDPVAAGWPPCLRMVAAIAVLTKDAGKLTMGQPLVILAPHAVEALVKQPPDRWLSNARMTHYQALLLDTDRVQFGPVVALNPATLLPLPEEGLQHNCLDILAEAHGTRPDLTDQPLPDADHTWYTDGSSLLQEGQRKAGAAVTTETEVIWAKALPAGTSAQRAELIALTQALKMAEGKKLNVYTDSRYAFATAHIHGEIYRRRGLLTSEGKEIKNKDEILALLKALFLPKRLSIIHCPGHQKGHSAEARGNRMADQAARKAAITETPDTSTLLAGKRTADGSEFEKRTADGSEFESPKKKAKVE

SEQ ID NO: 2707 - protein, 2093 aa, synthetic construct
MPAAKRVKLDGGDKKYSIGLDIGTNSVGWAVITDEYKVPSKKFKVLGNTDRHSIKKNLIGALLFDSGETAEATRLKRTARRRYTRRKNRICYLQEIFSNEMAKVDDSFFHRLEESFLVEEDKKHERHPIFGNIVDEVAYHEKYPTIYHLRKKLVDSTDKADLRLIYLALAHMIKFRGHFLIEGDLNPDNSDVDKLFIQLVQTYNQLFEENPINASGVDAKAILSARLSKSRRLENLIAQLPGEKKNGLFGNLIALSLGLTPNFKSNFDLAEDAKLQLSKDTYDDDLDNLLAQIGDQYADLFLAAKNLSDAILLSDILRVNTEITKAPLSASMIKRYDEHHQDLTLLKALVRQQLPEKYKEIFFDQSKNGYAGYIDGGASQEEFYKFIKPILEKMDGTEELLVKLNREDLLRKQRTFDNGSIPHQIHLGELHAILRRQEDFYPFLKDNREKIEKILTFRIPYYVGPLARGNSRFAWMTRKSEETITPWNFEEVVDKGASAQSFIERMTNFDKNLPNEKVLPKHSLLYEYFTVYNELTKVKYVTEGMRKPAFLSGEQKKAIVDLLFKTNRKVTVKQLKEDYFKKIECFDSVEISGVEDRFNASLGTYHDLLKIIKDKDFLDNEENEDILEDIVLTLTLFEDREMIEERLKTYAHLFDDKVMKQLKRRRYTGWGRLSRKLINGIRDKQSGKTILDFLKSDGFANRNFMQLIHDDSLTFKEDIQKAQVSGQGDSLHEHIANLAGSPAIKKGILQTVKVVDELVKVMGRHKPENIVIEMARENQTTQKGQKNSRERMKRIEEGIKELGSQILKEHPVENTQLQNEKLYLYYLQNGRDMYVDQELDINRLSDYDVDHIVPQSFLKDDSIDNKVLTRSDKARGKSDNVPSEEVVKKMKNYWRQLLNAKLITQRKFDNLTKAERGGLSELDKAGFIKRQLVETRQITKHVAQILDSRMNTKYDENDKLIREVKVITLKSKLVSDFRKDFQFYKVREINNYHHAHDAYLNAVVGTALIKKYPKLESEFVYGDYKVYDVRKMIAKSEQEIGKATAKYFFYSNIMNFFKTEITLANGEIRKRPLIETNGETGEIVWDKGRDFATVRKVLSMPQVNIVKKTEVQTGGFSKESILPKRNSDKLIARKKDWDPKKYGGFDSPTVAYSVLVVAKVEKGKSKKLKSVKELLGITIMERSSFEKNPIDFLEAKGYKEVKKDLIIKLPKYSLFELENGRKRMLASAGELQKGNELALPSKYVNFLYLASHYEKLKGSPEDNEQKQLFVEQHKHYLDEIIEQISEFSKRVILADANLDKVLSAYNKHRDKPIREQAENIIHLFTLTNLGAPAAFKYFDTTIDRKRYTSTKEVLDATLIHQSITGLYETRIDLSQLGGDGGEAAAKGSSGGTLNIEDEHRLHETSKEPDVSLGSTWLSDFPQAWAETGGMGLAVRQAPLIIPLKATSTPVSIKQYPMSQEARLGIKPHIQRLLDQGILVPCQSPWNTPLLPVKKPGTNDYRPVQDLREVNKRVEDIHPTVPNPYNLLSGLPPSHQWYTVLDLKDAFFCLRLHPTSQPLFAFEWRDPEMGISGQLTWTRLPQGFKNSPTLFDEALHRDLADFRIQHPDLILLQYVDDLLLAATSELDCQQGTRALLQTLGNLGYRASAKKAQICQKQVKYLGYLLKEGQRWLTEARKETVMGQPTPKTPRQLREFLGTAGFCRLWIPGFAEMAAPLYPLTKTGTLFNWGPDQQKAYQEIKQALLTAPALGLPDLTKPFELFVDEKQGYAKGVLTQKLGPWRRPVAYLSKKLDPVAAGWPPCLRMVAAIAVLTKDAGKLTMGQPLVILAPHAVEALVKQPPDRWLSNARMTHYQALLLDTDRVQFGPVVALNPATLLPLPEEGLQHNCLDILAEAHGTRPDLTDQPLPDADHTWYTDGSSLLQEGQRKAGAAVTTETEVIWAKALPAGTSAQRAELIALTQALKMAEGKKLNVYTDSRYAFATAHIHGEIYRRRGLLTSEGKEIKNKDEILALLKALFLPKRLSIIHCPGHQKGHSAEARGNRMADQAARKAAITETPDTSTLLAGKRTADGSEFEKRTADGSEFESPKKKAKVE

SEQ ID NO: 2708 - protein, 2096 aa, synthetic construct
MPAAKRVKLDGGDKKYSIGLDIGTNSVGWAVITDEYKVPSKKFKVLGNTDRHSIKKNLIGALLFDSGETAEATRLKRTARRRYTRRKNRICYLQEIFSNEMAKVDDSFFHRLEESFLVEEDKKHERHPIFGNIVDEVAYHEKYPTIYHLRKKLVDSTDKADLRLIYLALAHMIKFRGHFLIEGDLNPDNSDVDKLFIQLVQTYNQLFEENPINASGVDAKAILSARLSKSRRLENLIAQLPGEKKNGLFGNLIALSLGLTPNFKSNFDLAEDAKLQLSKDTYDDDLDNLLAQIGDQYADLFLAAKNLSDAILLSDILRVNTEITKAPLSASMIKRYDEHHQDLTLLKALVRQQLPEKYKEIFFDQSKNGYAGYIDGGASQEEFYKFIKPILEKMDGTEELLVKLNREDLLRKQRTFDNGSIPHQIHLGELHAILRRQEDFYPFLKDNREKIEKILTFRIPYYVGPLARGNSRFAWMTRKSEETITPWNFEEVVDKGASAQSFIERMTNFDKNLPNEKVLPKHSLLYEYFTVYNELTKVKYVTEGMRKPAFLSGEQKKAIVDLLFKTNRKVTVKQLKEDYFKKIECFDSVEISGVEDRFNASLGTYHDLLKIIKDKDFLDNEENEDILEDIVLTLTLFEDREMIEERLKTYAHLFDDKVMKQLKRRRYTGWGRLSRKLINGIRDKQSGKTILDFLKSDGFANRNFMQLIHDDSLTFKEDIQKAQVSGQGDSLHEHIANLAGSPAIKKGILQTVKVVDELVKVMGRHKPENIVIEMARENQTTQKGQKNSRERMKRIEEGIKELGSQILKEHPVENTQLQNEKLYLYYLQNGRDMYVDQELDINRLSDYDVDHIVPQSFLKDDSIDNKVLTRSDKARGKSDNVPSEEVVKKMKNYWRQLLNAKLITQRKFDNLTKAERGGLSELDKAGFIKRQLVETRQITKHVAQILDSRMNTKYDENDKLIREVKVITLKSKLVSDFRKDFQFYKVREINNYHHAHDAYLNAVVGTALIKKYPKLESEFVYGDYKVYDVRKMIAKSEQEIGKATAKYFFYSNIMNFFKTEITLANGEIRKRPLIETNGETGEIVWDKGRDFATVRKVLSMPQVNIVKKTEVQTGGFSKESILPKRNSDKLIARKKDWDPKKYGGFDSPTVAYSVLVVAKVEKGKSKKLKSVKELLGITIMERSSFEKNPIDFLEAKGYKEVKKDLIIKLPKYSLFELENGRKRMLASAGELQKGNELALPSKYVNFLYLASHYEKLKGSPEDNEQKQLFVEQHKHYLDEIIEQISEFSKRVILADANLDKVLSAYNKHRDKPIREQAENIIHLFTLTNLGAPAAFKYFDTTIDRKRYTSTKEVLDATLIHQSITGLYETRIDLSQLGGDGGGGGGGSEAAAKGGTLNIEDEHRLHETSKEPDVSLGSTWLSDFPQAWAETGGMGLAVRQAPLIIPLKATSTPVSIKQYPMSQEARLGIKPHIQRLLDQGILVPCQSPWNTPLLPVKKPGTNDYRPVQDLREVNKRVEDIHPTVPNPYNLLSGLPPSHQWYTVLDLKDAFFCLRLHPTSQPLFAFEWRDPEMGISGQLTWTRLPQGFKNSPTLFDEALHRDLADFRIQHPDLILLQYVDDLLLAATSELDCQQGTRALLQTLGNLGYRASAKKAQICQKQVKYLGYLLKEGQRWLTEARKETVMGQPTPKTPRQLREFLGTAGFCRLWIPGFAEMAAPLYPLTKTGTLFNWGPDQQKAYQEIKQALLTAPALGLPDLTKPFELFVDEKQGYAKGVLTQKLGPWRRPVAYLSKKLDPVAAGWPPCLRMVAAIAVLTKDAGKLTMGQPLVILAPHAVEALVKQPPDRWLSNARMTHYQALLLDTDRVQFGPVVALNPATLLPLPEEGLQHNCLDILAEAHGTRPDLTDQPLPDADHTWYTDGSSLLQEGQRKAGAAVTTETEVIWAKALPAGTSAQRAELIALTQALKMAEGKKLNVYTDSRYAFATAHIHGEIYRRRGLLTSEGKEIKNKDEILALLKALFLPKRLSIIHCPGHQKGHSAEARGNRMADQAARKAAITETPDTSTLLAGKRTADGSEFEKRTADGSEFESPKKKAKVE

SEQ ID NO: 2709 - protein, 2096 aa, synthetic construct
MPAAKRVKLDGGDKKYSIGLDIGTNSVGWAVITDEYKVPSKKFKVLGNTDRHSIKKNLIGALLFDSGETAEATRLKRTARRRYTRRKNRICYLQEIFSNEMAKVDDSFFHRLEESFLVEEDKKHERHPIFGNIVDEVAYHEKYPTIYHLRKKLVDSTDKADLRLIYLALAHMIKFRGHFLIEGDLNPDNSDVDKLFIQLVQTYNQLFEENPINASGVDAKAILSARLSKSRRLENLIAQLPGEKKNGLFGNLIALSLGLTPNFKSNFDLAEDAKLQLSKDTYDDDLDNLLAQIGDQYADLFLAAKNLSDAILLSDILRVNTEITKAPLSASMIKRYDEHHQDLTLLKALVRQQLPEKYKEIFFDQSKNGYAGYIDGGASQEEFYKFIKPILEKMDGTEELLVKLNREDLLRKQRTFDNGSIPHQIHLGELHAILRRQEDFYPFLKDNREKIEKILTFRIPYYVGPLARGNSRFAWMTRKSEETITPWNFEEVVDKGASAQSFIERMTNFDKNLPNEKVLPKHSLLYEYFTVYNELTKVKYVTEGMRKPAFLSGEQKKAIVDLLFKTNRKVTVKQLKEDYFKKIECFDSVEISGVEDRFNASLGTYHDLLKIIKDKDFLDNEENEDILEDIVLTLTLFEDREMIEERLKTYAHLFDDKVMKQLKRRRYTGWGRLSRKLINGIRDKQSGKTILDFLKSDGFANRNFMQLIHDDSLTFKEDIQKAQVSGQGDSLHEHIANLAGSPAIKKGILQTVKVVDELVKVMGRHKPENIVIEMARENQTTQKGQKNSRERMKRIEEGIKELGSQILKEHPVENTQLQNEKLYLYYLQNGRDMYVDQELDINRLSDYDVDHIVPQSFLKDDSIDNKVLTRSDKARGKSDNVPSEEVVKKMKNYWRQLLNAKLITQRKFDNLTKAERGGLSELDKAGFIKRQLVETRQITKHVAQILDSRMNTKYDENDKLIREVKVITLKSKLVSDFRKDFQFYKVREINNYHHAHDAYLNAVVGTALIKKYPKLESEFVYGDYKVYDVRKMIAKSEQEIGKATAKYFFYSNIMNFFKTEITLANGEIRKRPLIETNGETGEIVWDKGRDFATVRKVLSMPQVNIVKKTEVQTGGFSKESILPKRNSDKLIARKKDWDPKKYGGFDSPTVAYSVLVVAKVEKGKSKKLKSVKELLGITIMERSSFEKNPIDFLEAKGYKEVKKDLIIKLPKYSLFELENGRKRMLASAGELQKGNELALPSKYVNFLYLASHYEKLKGSPEDNEQKQLFVEQHKHYLDEIIEQISEFSKRVILADANLDKVLSAYNKHRDKPIREQAENIIHLFTLTNLGAPAAFKYFDTTIDRKRYTSTKEVLDATLIHQSITGLYETRIDLSQLGGDGGPAPAPAPAPAPGGTLNIEDEHRLHETSKEPDVSLGSTWLSDFPQAWAETGGMGLAVRQAPLIIPLKATSTPVSIKQYPMSQEARLGIKPHIQRLLDQGILVPCQSPWNTPLLPVKKPGTNDYRPVQDLREVNKRVEDIHPTVPNPYNLLSGLPPSHQWYTVLDLKDAFFCLRLHPTSQPLFAFEWRDPEMGISGQLTWTRLPQGFKNSPTLFDEALHRDLADFRIQHPDLILLQYVDDLLLAATSELDCQQGTRALLQTLGNLGYRASAKKAQICQKQVKYLGYLLKEGQRWLTEARKETVMGQPTPKTPRQLREFLGTAGFCRLWIPGFAEMAAPLYPLTKTGTLFNWGPDQQKAYQEIKQALLTAPALGLPDLTKPFELFVDEKQGYAKGVLTQKLGPWRRPVAYLSKKLDPVAAGWPPCLRMVAAIAVLTKDAGKLTMGQPLVILAPHAVEALVKQPPDRWLSNARMTHYQALLLDTDRVQFGPVVALNPATLLPLPEEGLQHNCLDILAEAHGTRPDLTDQPLPDADHTWYTDGSSLLQEGQRKAGAAVTTETEVIWAKALPAGTSAQRAELIALTQALKMAEGKKLNVYTDSRYAFATAHIHGEIYRRRGLLTSEGKEIKNKDEILALLKALFLPKRLSIIHCPGHQKGHSAEARGNRMADQAARKAAITETPDTSTLLAGKRTADGSEFEKRTADGSEFESPKKKAKVE

SEQ ID NO: 2710 - protein, 2091 aa, synthetic construct
MPAAKRVKLDGGDKKYSIGLDIGTNSVGWAVITDEYKVPSKKFKVLGNTDRHSIKKNLIGALLFDSGETAEATRLKRTARRRYTRRKNRICYLQEIFSNEMAKVDDSFFHRLEESFLVEEDKKHERHPIFGNIVDEVAYHEKYPTIYHLRKKLVDSTDKADLRLIYLALAHMIKFRGHFLIEGDLNPDNSDVDKLFIQLVQTYNQLFEENPINASGVDAKAILSARLSKSRRLENLIAQLPGEKKNGLFGNLIALSLGLTPNFKSNFDLAEDAKLQLSKDTYDDDLDNLLAQIGDQYADLFLAAKNLSDAILLSDILRVNTEITKAPLSASMIKRYDEHHQDLTLLKALVRQQLPEKYKEIFFDQSKNGYAGYIDGGASQEEFYKFIKPILEKMDGTEELLVKLNREDLLRKQRTFDNGSIPHQIHLGELHAILRRQEDFYPFLKDNREKIEKILTFRIPYYVGPLARGNSRFAWMTRKSEETITPWNFEEVVDKGASAQSFIERMTNFDKNLPNEKVLPKHSLLYEYFTVYNELTKVKYVTEGMRKPAFLSGEQKKAIVDLLFKTNRKVTVKQLKEDYFKKIECFDSVEISGVEDRFNASLGTYHDLLKIIKDKDFLDNEENEDILEDIVLTLTLFEDREMIEERLKTYAHLFDDKVMKQLKRRRYTGWGRLSRKLINGIRDKQSGKTILDFLKSDGFANRNFMQLIHDDSLTFKEDIQKAQVSGQGDSLHEHIANLAGSPAIKKGILQTVKVVDELVKVMGRHKPENIVIEMARENQTTQKGQKNSRERMKRIEEGIKELGSQILKEHPVENTQLQNEKLYLYYLQNGRDMYVDQELDINRLSDYDVDHIVPQSFLKDDSIDNKVLTRSDKARGKSDNVPSEEVVKKMKNYWRQLLNAKLITQRKFDNLTKAERGGLSELDKAGFIKRQLVETRQITKHVAQILDSRMNTKYDENDKLIREVKVITLKSKLVSDFRKDFQFYKVREINNYHHAHDAYLNAVVGTALIKKYPKLESEFVYGDYKVYDVRKMIAKSEQEIGKATAKYFFYSNIMNFFKTEITLANGEIRKRPLIETNGETGEIVWDKGRDFATVRKVLSMPQVNIVKKTEVQTGGFSKESILPKRNSDKLIARKKDWDPKKYGGFDSPTVAYSVLVVAKVEKGKSKKLKSVKELLGITIMERSSFEKNPIDFLEAKGYKEVKKDLIIKLPKYSLFELENGRKRMLASAGELQKGNELALPSKYVNFLYLASHYEKLKGSPEDNEQKQLFVEQHKHYLDEIIEQISEFSKRVILADANLDKVLSAYNKHRDKPIREQAENIIHLFTLTNLGAPAAFKYFDTTIDRKRYTSTKEVLDATLIHQSITGLYETRIDLSQLGGDGGGSSPAPGGTLNIEDEHRLHETSKEPDVSLGSTWLSDFPQAWAETGGMGLAVRQAPLIIPLKATSTPVSIKQYPMSQEARLGIKPHIQRLLDQGILVPCQSPWNTPLLPVKKPGTNDYRPVQDLREVNKRVEDIHPTVPNPYNLLSGLPPSHQWYTVLDLKDAFFCLRLHPTSQPLFAFEWRDPEMGISGQLTWTRLPQGFKNSPTLFDEALHRDLADFRIQHPDLILLQYVDDLLLAATSELDCQQGTRALLQTLGNLGYRASAKKAQICQKQVKYLGYLLKEGQRWLTEARKETVMGQPTPKTPRQLREFLGTAGFCRLWIPGFAEMAAPLYPLTKTGTLFNWGPDQQKAYQEIKQALLTAPALGLPDLTKPFELFVDEKQGYAKGVLTQKLGPWRRPVAYLSKKLDPVAAGWPPCLRMVAAIAVLTKDAGKLTMGQPLVILAPHAVEALVKQPPDRWLSNARMTHYQALLLDTDRVQFGPVVALNPATLLPLPEEGLQHNCLDILAEAHGTRPDLTDQPLPDADHTWYTDGSSLLQEGQRKAGAAVTTETEVIWAKALPAGTSAQRAELIALTQALKMAEGKKLNVYTDSRYAFATAHIHGEIYRRRGLLTSEGKEIKNKDEILALLKALFLPKRLSIIHCPGHQKGHSAEARGNRMADQAARKAAITETPDTSTLLAGKRTADGSEFEKRTADGSEFESPKKKAKVE

SEQ ID NO: 2711 - protein, 2131 aa, synthetic construct
MPAAKRVKLDGGDKKYSIGLDIGTNSVGWAVITDEYKVPSKKFKVLGNTDRHSIKKNLIGALLFDSGETAEATRLKRTARRRYTRRKNRICYLQEIFSNEMAKVDDSFFHRLEESFLVEEDKKHERHPIFGNIVDEVAYHEKYPTIYHLRKKLVDSTDKADLRLIYLALAHMIKFRGHFLIEGDLNPDNSDVDKLFIQLVQTYNQLFEENPINASGVDAKAILSARLSKSRRLENLIAQLPGEKKNGLFGNLIALSLGLTPNFKSNFDLAEDAKLQLSKDTYDDDLDNLLAQIGDQYADLFLAAKNLSDAILLSDILRVNTEITKAPLSASMIKRYDEHHQDLTLLKALVRQQLPEKYKEIFFDQSKNGYAGYIDGGASQEEFYKFIKPILEKMDGTEELLVKLNREDLLRKQRTFDNGSIPHQIHLGELHAILRRQEDFYPFLKDNREKIEKILTFRIPYYVGPLARGNSRFAWMTRKSEETITPWNFEEVVDKGASAQSFIERMTNFDKNLPNEKVLPKHSLLYEYFTVYNELTKVKYVTEGMRKPAFLSGEQKKAIVDLLFKTNRKVTVKQLKEDYFKKIECFDSVEISGVEDRFNASLGTYHDLLKIIKDKDFLDNEENEDILEDIVLTLTLFEDREMIEERLKTYAHLFDDKVMKQLKRRRYTGWGRLSRKLINGIRDKQSGKTILDFLKSDGFANRNFMQLIHDDSLTFKEDIQKAQVSGQGDSLHEHIANLAGSPAIKKGILQTVKVVDELVKVMGRHKPENIVIEMARENQTTQKGQKNSRERMKRIEEGIKELGSQILKEHPVENTQLQNEKLYLYYLQNGRDMYVDQELDINRLSDYDVDHIVPQSFLKDDSIDNKVLTRSDKARGKSDNVPSEEVVKKMKNYWRQLLNAKLITQRKFDNLTKAERGGLSELDKAGFIKRQLVETRQITKHVAQILDSRMNTKYDENDKLIREVKVITLKSKLVSDFRKDFQFYKVREINNYHHAHDAYLNAVVGTALIKKYPKLESEFVYGDYKVYDVRKMIAKSEQEIGKATAKYFFYSNIMNFFKTEITLANGEIRKRPLIETNGETGEIVWDKGRDFATVRKVLSMPQVNIVKKTEVQTGGFSKESILPKRNSDKLIARKKDWDPKKYGGFDSPTVAYSVLVVAKVEKGKSKKLKSVKELLGITIMERSSFEKNPIDFLEAKGYKEVKKDLIIKLPKYSLFELENGRKRMLASAGELQKGNELALPSKYVNFLYLASHYEKLKGSPEDNEQKQLFVEQHKHYLDEIIEQISEFSKRVILADANLDKVLSAYNKHRDKPIREQAENIIHLFTLTNLGAPAAFKYFDTTIDRKRYTSTKEVLDATLIHQSITGLYETRIDLSQLGGDGGAEAAAKEAAAKEAAAKEAAAKALEAEAAAKEAAAKEAAAKEAAAKAGGTLNIEDEHRLHETSKEPDVSLGSTWLSDFPQAWAETGGMGLAVRQAPLIIPLKATSTPVSIKQYPMSQEARLGIKPHIQRLLDQGILVPCQSPWNTPLLPVKKPGTNDYRPVQDLREVNKRVEDIHPTVPNPYNLLSGLPPSHQWYTVLDLKDAFFCLRLHPTSQPLFAFEWRDPEMGISGQLTWTRLPQGFKNSPTLFNEALHRDLADFRIQHPDLILLQYVDDLLLAATSELDCQQGTRALLQTLGNLGYRASAKKAQICQKQVKYLGYLLKEGQRWLTEARKETVMGQPTPKTPRQLREFLGTAGFCRLWIPGFAEMAAPLYPLTKPGTLFNWGPDQQKAYQEIKQALLTAPALGLPDLTKPFELFVDEKQGYAKGVLTQKLGPWRRPVAYLSKKLDPVAAGWPPCLRMVAAIAVLTKDAGKLTMGQPLVILAPHAVEALVKQPPDRWLSNARMTHYQALLLDTDRVQFGPVVALNPATLLPLPEEGLQHNCLDILAEAHGTRPDLTDQPLPDADHTWYTDGSSLLQEGQRKAGAAVTTETEVIWAKALPAGTSAQRAELIALTQALKMAEGKKLNVYTDSRYAFATAHIHGEIYRRRGWLTSEGKEIKNKDEILALLKALFLPKRLSIIHCPGHQKGHSAEARGNRMADQAARKAAITETPDTSTLLAGKRTADGSEFEKRTADGSEFESPKKKAKVE

SEQ ID NO: 2712 - protein, 2100 aa, synthetic construct
MPAAKRVKLDGGDKKYSIGLDIGTNSVGWAVITDEYKVPSKKFKVLGNTDRHSIKKNLIGALLFDSGETAEATRLKRTARRRYTRRKNRICYLQEIFSNEMAKVDDSFFHRLEESFLVEEDKKHERHPIFGNIVDEVAYHEKYPTIYHLRKKLVDSTDKADLRLIYLALAHMIKFRGHFLIEGDLNPDNSDVDKLFIQLVQTYNQLFEENPINASGVDAKAILSARLSKSRRLENLIAQLPGEKKNGLFGNLIALSLGLTPNFKSNFDLAEDAKLQLSKDTYDDDLDNLLAQIGDQYADLFLAAKNLSDAILLSDILRVNTEITKAPLSASMIKRYDEHHQDLTLLKALVRQQLPEKYKEIFFDQSKNGYAGYIDGGASQEEFYKFIKPILEKMDGTEELLVKLNREDLLRKQRTFDNGSIPHQIHLGELHAILRRQEDFYPFLKDNREKIEKILTFRIPYYVGPLARGNSRFAWMTRKSEETITPWNFEEVVDKGASAQSFIERMTNFDKNLPNEKVLPKHSLLYEYFTVYNELTKVKYVTEGMRKPAFLSGEQKKAIVDLLFKTNRKVTVKQLKEDYFKKIECFDSVEISGVEDRFNASLGTYHDLLKIIKDKDFLDNEENEDILEDIVLTLTLFEDREMIEERLKTYAHLFDDKVMKQLKRRRYTGWGRLSRKLINGIRDKQSGKTILDFLKSDGFANRNFMQLIHDDSLTFKEDIQKAQVSGQGDSLHEHIANLAGSPAIKKGILQTVKVVDELVKVMGRHKPENIVIEMARENQTTQKGQKNSRERMKRIEEGIKELGSQILKEHPVENTQLQNEKLYLYYLQNGRDMYVDQELDINRLSDYDVDHIVPQSFLKDDSIDNKVLTRSDKARGKSDNVPSEEVVKKMKNYWRQLLNAKLITQRKFDNLTKAERGGLSELDKAGFIKRQLVETRQITKHVAQILDSRMNTKYDENDKLIREVKVITLKSKLVSDFRKDFQFYKVREINNYHHAHDAYLNAVVGTALIKKYPKLESEFVYGDYKVYDVRKMIAKSEQEIGKATAKYFFYSNIMNFFKTEITLANGEIRKRPLIETNGETGEIVWDKGRDFATVRKVLSMPQVNIVKKTEVQTGGFSKESILPKRNSDKLIARKKDWDPKKYGGFDSPTVAYSVLVVAKVEKGKSKKLKSVKELLGITIMERSSFEKNPIDFLEAKGYKEVKKDLIIKLPKYSLFELENGRKRMLASAGELQKGNELALPSKYVNFLYLASHYEKLKGSPEDNEQKQLFVEQHKHYLDEIIEQISEFSKRVILADANLDKVLSAYNKHRDKPIREQAENIIHLFTLTNLGAPAAFKYFDTTIDRKRYTSTKEVLDATLIHQSITGLYETRIDLSQLGGDGGEAAAKGGGGSEAAAKGGTLNIEDEHRLHETSKEPDVSLGSTWLSDFPQAWAETGGMGLAVRQAPLIIPLKATSTPVSIKQYPMSQEARLGIKPHIQRLLDQGILVPCQSPWNTPLLPVKKPGTNDYRPVQDLREVNKRVEDIHPTVPNPYNLLSGLPPSHQWYTVLDLKDAFFCLRLHPTSQPLFAFEWRDPEMGISGQLTWTRLPQGFKNSPTLFNEALHRDLADFRIQHPDLILLQYVDDLLLAATSELDCQQGTRALLQTLGNLGYRASAKKAQICQKQVKYLGYLLKEGQRWLTEARKETVMGQPTPKTPRQLREFLGTAGFCRLWIPGFAEMAAPLYPLTKPGTLFNWGPDQQKAYQEIKQALLTAPALGLPDLTKPFELFVDEKQGYAKGVLTQKLGPWRRPVAYLSKKLDPVAAGWPPCLRMVAAIAVLTKDAGKLTMGQPLVILAPHAVEALVKQPPDRWLSNARMTHYQALLLDTDRVQFGPVVALNPATLLPLPEEGLQHNCLDILAEAHGTRPDLTDQPLPDADHTWYTDGSSLLQEGQRKAGAAVTTETEVIWAKALPAGTSAQRAELIALTQALKMAEGKKLNVYTDSRYAFATAHIHGEIYRRRGWLTSEGKEIKNKDEILALLKALFLPKRLSIIHCPGHQKGHSAEARGNRMADQAARKAAITETPDTSTLLAGKRTADGSEFEKRTADGSEFESPKKKAKVE

SEQ ID NO: 2713 - protein, 2096 aa, synthetic construct
MPAAKRVKLDGGDKKYSIGLDIGTNSVGWAVITDEYKVPSKKFKVLGNTDRHSIKKNLIGALLFDSGETAEATRLKRTARRRYTRRKNRICYLQEIFSNEMAKVDDSFFHRLEESFLVEEDKKHERHPIFGNIVDEVAYHEKYPTIYHLRKKLVDSTDKADLRLIYLALAHMIKFRGHFLIEGDLNPDNSDVDKLFIQLVQTYNQLFEENPINASGVDAKAILSARLSKSRRLENLIAQLPGEKKNGLFGNLIALSLGLTPNFKSNFDLAEDAKLQLSKDTYDDDLDNLLAQIGDQYADLFLAAKNLSDAILLSDILRVNTEITKAPLSASMIKRYDEHHQDLTLLKALVRQQLPEKYKEIFFDQSKNGYAGYIDGGASQEEFYKFIKPILEKMDGTEELLVKLNREDLLRKQRTFDNGSIPHQIHLGELHAILRRQEDFYPFLKDNREKIEKILTFRIPYYVGPLARGNSRFAWMTRKSEETITPWNFEEVVDKGASAQSFIERMTNFDKNLPNEKVLPKHSLLYEYFTVYNELTKVKYVTEGMRKPAFLSGEQKKAIVDLLFKTNRKVTVKQLKEDYFKKIECFDSVEISGVEDRFNASLGTYHDLLKIIKDKDFLDNEENEDILEDIVLTLTLFEDREMIEERLKTYAHLFDDKVMKQLKRRRYTGWGRLSRKLINGIRDKQSGKTILDFLKSDGFANRNFMQLIHDDSLTFKEDIQKAQVSGQGDSLHEHIANLAGSPAIKKGILQTVKVVDELVKVMGRHKPENIVIEMARENQTTQKGQKNSRERMKRIEEGIKELGSQILKEHPVENTQLQNEKLYLYYLQNGRDMYVDQELDINRLSDYDVDHIVPQSFLKDDSIDNKVLTRSDKARGKSDNVPSEEVVKKMKNYWRQLLNAKLITQRKFDNLTKAERGGLSELDKAGFIKRQLVETRQITKHVAQILDSRMNTKYDENDKLIREVKVITLKSKLVSDFRKDFQFYKVREINNYHHAHDAYLNAVVGTALIKKYPKLESEFVYGDYKVYDVRKMIAKSEQEIGKATAKYFFYSNIMNFFKTEITLANGEIRKRPLIETNGETGEIVWDKGRDFATVRKVLSMPQVNIVKKTEVQTGGFSKESILPKRNSDKLIARKKDWDPKKYGGFDSPTVAYSVLVVAKVEKGKSKKLKSVKELLGITIMERSSFEKNPIDFLEAKGYKEVKKDLIIKLPKYSLFELENGRKRMLASAGELQKGNELALPSKYVNFLYLASHYEKLKGSPEDNEQKQLFVEQHKHYLDEIIEQISEFSKRVILADANLDKVLSAYNKHRDKPIREQAENIIHLFTLTNLGAPAAFKYFDTTIDRKRYTSTKEVLDATLIHQSITGLYETRIDLSQLGGDGGGGSEAAAKGGGGGTLNIEDEHRLHETSKEPDVSLGSTWLSDFPQAWAETGGMGLAVRQAPLIIPLKATSTPVSIKQYPMSQEARLGIKPHIQRLLDQGILVPCQSPWNTPLLPVKKPGTNDYRPVQDLREVNKRVEDIHPTVPNPYNLLSGLPPSHQWYTVLDLKDAFFCLRLHPTSQPLFAFEWRDPEMGISGQLTWTRLPQGFKNSPTLFNEALHRDLADFRIQHPDLILLQYVDDLLLAATSELDCQQGTRALLQTLGNLGYRASAKKAQICQKQVKYLGYLLKEGQRWLTEARKETVMGQPTPKTPRQLREFLGTAGFCRLWIPGFAEMAAPLYPLTKPGTLFNWGPDQQKAYQEIKQALLTAPALGLPDLTKPFELFVDEKQGYAKGVLTQKLGPWRRPVAYLSKKLDPVAAGWPPCLRMVAAIAVLTKDAGKLTMGQPLVILAPHAVEALVKQPPDRWLSNARMTHYQALLLDTDRVQFGPVVALNPATLLPLPEEGLQHNCLDILAEAHGTRPDLTDQPLPDADHTWYTDGSSLLQEGQRKAGAAVTTETEVIWAKALPAGTSAQRAELIALTQALKMAEGKKLNVYTDSRYAFATAHIHGEIYRRRGWLTSEGKEIKNKDEILALLKALFLPKRLSIIHCPGHQKGHSAEARGNRMADQAARKAAITETPDTSTLLAGKRTADGSEFEKRTADGSEFESPKKKAKVE

SEQ ID NO: 2714 - protein, 2096 aa, synthetic construct
MPAAKRVKLDGGDKKYSIGLDIGTNSVGWAVITDEYKVPSKKFKVLGNTDRHSIKKNLIGALLFDSGETAEATRLKRTARRRYTRRKNRICYLQEIFSNEMAKVDDSFFHRLEESFLVEEDKKHERHPIFGNIVDEVAYHEKYPTIYHLRKKLVDSTDKADLRLIYLALAHMIKFRGHFLIEGDLNPDNSDVDKLFIQLVQTYNQLFEENPINASGVDAKAILSARLSKSRRLENLIAQLPGEKKNGLFGNLIALSLGLTPNFKSNFDLAEDAKLQLSKDTYDDDLDNLLAQIGDQYADLFLAAKNLSDAILLSDILRVNTEITKAPLSASMIKRYDEHHQDLTLLKALVRQQLPEKYKEIFFDQSKNGYAGYIDGGASQEEFYKFIKPILEKMDGTEELLVKLNREDLLRKQRTFDNGSIPHQIHLGELHAILRRQEDFYPFLKDNREKIEKILTFRIPYYVGPLARGNSRFAWMTRKSEETITPWNFEEVVDKGASAQSFIERMTNFDKNLPNEKVLPKHSLLYEYFTVYNELTKVKYVTEGMRKPAFLSGEQKKAIVDLLFKTNRKVTVKQLKEDYFKKIECFDSVEISGVEDRFNASLGTYHDLLKIIKDKDFLDNEENEDILEDIVLTLTLFEDREMIEERLKTYAHLFDDKVMKQLKRRRYTGWGRLSRKLINGIRDKQSGKTILDFLKSDGFANRNFMQLIHDDSLTFKEDIQKAQVSGQGDSLHEHIANLAGSPAIKKGILQTVKVVDELVKVMGRHKPENIVIEMARENQTTQKGQKNSRERMKRIEEGIKELGSQILKEHPVENTQLQNEKLYLYYLQNGRDMYVDQELDINRLSDYDVDHIVPQSFLKDDSIDNKVLTRSDKARGKSDNVPSEEVVKKMKNYWRQLLNAKLITQRKFDNLTKAERGGLSELDKAGFIKRQLVETRQITKHVAQILDSRMNTKYDENDKLIREVKVITLKSKLVSDFRKDFQFYKVREINNYHHAHDAYLNAVVGTALIKKYPKLESEFVYGDYKVYDVRKMIAKSEQEIGKATAKYFFYSNIMNFFKTEITLANGEIRKRPLIETNGETGEIVWDKGRDFATVRKVLSMPQVNIVKKTEVQTGGFSKESILPKRNSDKLIARKKDWDPKKYGGFDSPTVAYSVLVVAKVEKGKSKKLKSVKELLGITIMERSSFEKNPIDFLEAKGYKEVKKDLIIKLPKYSLFELENGRKRMLASAGELQKGNELALPSKYVNFLYLASHYEKLKGSPEDNEQKQLFVEQHKHYLDEIIEQISEFSKRVILADANLDKVLSAYNKHRDKPIREQAENIIHLFTLTNLGAPAAFKYFDTTIDRKRYTSTKEVLDATLIHQSITGLYETRIDLSQLGGDGGEAAAKPAPGGSGGTLNIEDEHRLHETSKEPDVSLGSTWLSDFPQAWAETGGMGLAVRQAPLIIPLKATSTPVSIKQYPMSQEARLGIKPHIQRLLDQGILVPCQSPWNTPLLPVKKPGTNDYRPVQDLREVNKRVEDIHPTVPNPYNLLSGLPPSHQWYTVLDLKDAFFCLRLHPTSQPLFAFEWRDPEMGISGQLTWTRLPQGFKNSPTLFNEALHRDLADFRIQHPDLILLQYVDDLLLAATSELDCQQGTRALLQTLGNLGYRASAKKAQICQKQVKYLGYLLKEGQRWLTEARKETVMGQPTPKTPRQLREFLGTAGFCRLWIPGFAEMAAPLYPLTKPGTLFNWGPDQQKAYQEIKQALLTAPALGLPDLTKPFELFVDEKQGYAKGVLTQKLGPWRRPVAYLSKKLDPVAAGWPPCLRMVAAIAVLTKDAGKLTMGQPLVILAPHAVEALVKQPPDRWLSNARMTHYQALLLDTDRVQFGPVVALNPATLLPLPEEGLQHNCLDILAEAHGTRPDLTDQPLPDADHTWYTDGSSLLQEGQRKAGAAVTTETEVIWAKALPAGTSAQRAELIALTQALKMAEGKKLNVYTDSRYAFATAHIHGEIYRRRGWLTSEGKEIKNKDEILALLKALFLPKRLSIIHCPGHQKGHSAEARGNRMADQAARKAAITETPDTSTLLAGKRTADGSEFEKRTADGSEFESPKKKAKVE

SEQ ID NO: 2715 - protein, 2094 aa, synthetic construct
MPAAKRVKLDGGDKKYSIGLDIGTNSVGWAVITDEYKVPSKKFKVLGNTDRHSIKKNLIGALLFDSGETAEATRLKRTARRRYTRRKNRICYLQEIFSNEMAKVDDSFFHRLEESFLVEEDKKHERHPIFGNIVDEVAYHEKYPTIYHLRKKLVDSTDKADLRLIYLALAHMIKFRGHFLIEGDLNPDNSDVDKLFIQLVQTYNQLFEENPINASGVDAKAILSARLSKSRRLENLIAQLPGEKKNGLFGNLIALSLGLTPNFKSNFDLAEDAKLQLSKDTYDDDLDNLLAQIGDQYADLFLAAKNLSDAILLSDILRVNTEITKAPLSASMIKRYDEHHQDLTLLKALVRQQLPEKYKEIFFDQSKNGYAGYIDGGASQEEFYKFIKPILEKMDGTEELLVKLNREDLLRKQRTFDNGSIPHQIHLGELHAILRRQEDFYPFLKDNREKIEKILTFRIPYYVGPLARGNSRFAWMTRKSEETITPWNFEEVVDKGASAQSFIERMTNFDKNLPNEKVLPKHSLLYEYFTVYNELTKVKYVTEGMRKPAFLSGEQKKAIVDLLFKTNRKVTVKQLKEDYFKKIECFDSVEISGVEDRFNASLGTYHDLLKIIKDKDFLDNEENEDILEDIVLTLTLFEDREMIEERLKTYAHLFDDKVMKQLKRRRYTGWGRLSRKLINGIRDKQSGKTILDFLKSDGFANRNFMQLIHDDSLTFKEDIQKAQVSGQGDSLHEHIANLAGSPAIKKGILQTVKVVDELVKVMGRHKPENIVIEMARENQTTQKGQKNSRERMKRIEEGIKELGSQILKEHPVENTQLQNEKLYLYYLQNGRDMYVDQELDINRLSDYDVDHIVPQSFLKDDSIDNKVLTRSDKARGKSDNVPSEEVVKKMKNYWRQLLNAKLITQRKFDNLTKAERGGLSELDKAGFIKRQLVETRQITKHVAQILDSRMNTKYDENDKLIREVKVITLKSKLVSDFRKDFQFYKVREINNYHHAHDAYLNAVVGTALIKKYPKLESEFVYGDYKVYDVRKMIAKSEQEIGKATAKYFFYSNIMNFFKTEITLANGEIRKRPLIETNGETGEIVWDKGRDFATVRKVLSMPQVNIVKKTEVQTGGFSKESILPKRNSDKLIARKKDWDPKKYGGFDSPTVAYSVLVVAKVEKGKSKKLKSVKELLGITIMERSSFEKNPIDFLEAKGYKEVKKDLIIKLPKYSLFELENGRKRMLASAGELQKGNELALPSKYVNFLYLASHYEKLKGSPEDNEQKQLFVEQHKHYLDEIIEQISEFSKRVILADANLDKVLSAYNKHRDKPIREQAENIIHLFTLTNLGAPAAFKYFDTTIDRKRYTSTKEVLDATLIHQSITGLYETRIDLSQLGGDGGGSSGGGGGSGGTLNIEDEHRLHETSKEPDVSLGSTWLSDFPQAWAETGGMGLAVRQAPLIIPLKATSTPVSIKQYPMSQEARLGIKPHIQRLLDQGILVPCQSPWNTPLLPVKKPGTNDYRPVQDLREVNKRVEDIHPTVPNPYNLLSGLPPSHQWYTVLDLKDAFFCLRLHPTSQPLFAFEWRDPEMGISGQLTWTRLPQGFKNSPTLFNEALHRDLADFRIQHPDLILLQYVDDLLLAATSELDCQQGTRALLQTLGNLGYRASAKKAQICQKQVKYLGYLLKEGQRWLTEARKETVMGQPTPKTPRQLREFLGTAGFCRLWIPGFAEMAAPLYPLTKPGTLFNWGPDQQKAYQEIKQALLTAPALGLPDLTKPFELFVDEKQGYAKGVLTQKLGPWRRPVAYLSKKLDPVAAGWPPCLRMVAAIAVLTKDAGKLTMGQPLVILAPHAVEALVKQPPDRWLSNARMTHYQALLLDTDRVQFGPVVALNPATLLPLPEEGLQHNCLDILAEAHGTRPDLTDQPLPDADHTWYTDGSSLLQEGQRKAGAAVTTETEVIWAKALPAGTSAQRAELIALTQALKMAEGKKLNVYTDSRYAFATAHIHGEIYRRRGWLTSEGKEIKNKDEILALLKALFLPKRLSIIHCPGHQKGHSAEARGNRMADQAARKAAITETPDTSTLLAGKRTADGSEFEKRTADGSEFESPKKKAKVE

SEQ ID NO: 2716 - protein, 2110 aa, synthetic construct
MPAAKRVKLDGGDKKYSIGLDIGTNSVGWAVITDEYKVPSKKFKVLGNTDRHSIKKNLIGALLFDSGETAEATRLKRTARRRYTRRKNRICYLQEIFSNEMAKVDDSFFHRLEESFLVEEDKKHERHPIFGNIVDEVAYHEKYPTIYHLRKKLVDSTDKADLRLIYLALAHMIKFRGHFLIEGDLNPDNSDVDKLFIQLVQTYNQLFEENPINASGVDAKAILSARLSKSRRLENLIAQLPGEKKNGLFGNLIALSLGLTPNFKSNFDLAEDAKLQLSKDTYDDDLDNLLAQIGDQYADLFLAAKNLSDAILLSDILRVNTEITKAPLSASMIKRYDEHHQDLTLLKALVRQQLPEKYKEIFFDQSKNGYAGYIDGGASQEEFYKFIKPILEKMDGTEELLVKLNREDLLRKQRTFDNGSIPHQIHLGELHAILRRQEDFYPFLKDNREKIEKILTFRIPYYVGPLARGNSRFAWMTRKSEETITPWNFEEVVDKGASAQSFIERMTNFDKNLPNEKVLPKHSLLYEYFTVYNELTKVKYVTEGMRKPAFLSGEQKKAIVDLLFKTNRKVTVKQLKEDYFKKIECFDSVEISGVEDRFNASLGTYHDLLKIIKDKDFLDNEENEDILEDIVLTLTLFEDREMIEERLKTYAHLFDDKVMKQLKRRRYTGWGRLSRKLINGIRDKQSGKTILDFLKSDGFANRNFMQLIHDDSLTFKEDIQKAQVSGQGDSLHEHIANLAGSPAIKKGILQTVKVVDELVKVMGRHKPENIVIEMARENQTTQKGQKNSRERMKRIEEGIKELGSQILKEHPVENTQLQNEKLYLYYLQNGRDMYVDQELDINRLSDYDVDHIVPQSFLKDDSIDNKVLTRSDKARGKSDNVPSEEVVKKMKNYWRQLLNAKLITQRKFDNLTKAERGGLSELDKAGFIKRQLVETRQITKHVAQILDSRMNTKYDENDKLIREVKVITLKSKLVSDFRKDFQFYKVREINNYHHAHDAYLNAVVGTALIKKYPKLESEFVYGDYKVYDVRKMIAKSEQEIGKATAKYFFYSNIMNFFKTEITLANGEIRKRPLIETNGETGEIVWDKGRDFATVRKVLSMPQVNIVKKTEVQTGGFSKESILPKRNSDKLIARKKDWDPKKYGGFDSPTVAYSVLVVAKVEKGKSKKLKSVKELLGITIMERSSFEKNPIDFLEAKGYKEVKKDLIIKLPKYSLFELENGRKRMLASAGELQKGNELALPSKYVNFLYLASHYEKLKGSPEDNEQKQLFVEQHKHYLDEIIEQISEFSKRVILADANLDKVLSAYNKHRDKPIREQAENIIHLFTLTNLGAPAAFKYFDTTIDRKRYTSTKEVLDATLIHQSITGLYETRIDLSQLGGDGGEAAAKEAAAKEAAAKEAAAKEAAAKGGTLNIEDEHRLHETSKEPDVSLGSTWLSDFPQAWAETGGMGLAVRQAPLIIPLKATSTPVSIKQYPMSQEARLGIKPHIQRLLDQGILVPCQSPWNTPLLPVKKPGTNDYRPVQDLREVNKRVEDIHPTVPNPYNLLSGLPPSHQWYTVLDLKDAFFCLRLHPTSQPLFAFEWRDPEMGISGQLTWTRLPQGFKNSPTLFNEALHRDLADFRIQHPDLILLQYVDDLLLAATSELDCQQGTRALLQTLGNLGYRASAKKAQICQKQVKYLGYLLKEGQRWLTEARKETVMGQPTPKTPRQLREFLGTAGFCRLWIPGFAEMAAPLYPLTKPGTLFNWGPDQQKAYQEIKQALLTAPALGLPDLTKPFELFVDEKQGYAKGVLTQKLGPWRRPVAYLSKKLDPVAAGWPPCLRMVAAIAVLTKDAGKLTMGQPLVILAPHAVEALVKQPPDRWLSNARMTHYQALLLDTDRVQFGPVVALNPATLLPLPEEGLQHNCLDILAEAHGTRPDLTDQPLPDADHTWYTDGSSLLQEGQRKAGAAVTTETEVIWAKALPAGTSAQRAELIALTQALKMAEGKKLNVYTDSRYAFATAHIHGEIYRRRGWLTSEGKEIKNKDEILALLKALFLPKRLSIIHCPGHQKGHSAEARGNRMADQAARKAAITETPDTSTLLAGKRTADGSEFEKRTADGSEFESPKKKAKVE

SEQ ID NO: 2717 - protein, 2091 aa, synthetic construct
MPAAKRVKLDGGDKKYSIGLDIGTNSVGWAVITDEYKVPSKKFKVLGNTDRHSIKKNLIGALLFDSGETAEATRLKRTARRRYTRRKNRICYLQEIFSNEMAKVDDSFFHRLEESFLVEEDKKHERHPIFGNIVDEVAYHEKYPTIYHLRKKLVDSTDKADLRLIYLALAHMIKFRGHFLIEGDLNPDNSDVDKLFIQLVQTYNQLFEENPINASGVDAKAILSARLSKSRRLENLIAQLPGEKKNGLFGNLIALSLGLTPNFKSNFDLAEDAKLQLSKDTYDDDLDNLLAQIGDQYADLFLAAKNLSDAILLSDILRVNTEITKAPLSASMIKRYDEHHQDLTLLKALVRQQLPEKYKEIFFDQSKNGYAGYIDGGASQEEFYKFIKPILEKMDGTEELLVKLNREDLLRKQRTFDNGSIPHQIHLGELHAILRRQEDFYPFLKDNREKIEKILTFRIPYYVGPLARGNSRFAWMTRKSEETITPWNFEEVVDKGASAQSFIERMTNFDKNLPNEKVLPKHSLLYEYFTVYNELTKVKYVTEGMRKPAFLSGEQKKAIVDLLFKTNRKVTVKQLKEDYFKKIECFDSVEISGVEDRFNASLGTYHDLLKIIKDKDFLDNEENEDILEDIVLTLTLFEDREMIEERLKTYAHLFDDKVMKQLKRRRYTGWGRLSRKLINGIRDKQSGKTILDFLKSDGFANRNFMQLIHDDSLTFKEDIQKAQVSGQGDSLHEHIANLAGSPAIKKGILQTVKVVDELVKVMGRHKPENIVIEMARENQTTQKGQKNSRERMKRIEEGIKELGSQILKEHPVENTQLQNEKLYLYYLQNGRDMYVDQELDINRLSDYDVDHIVPQSFLKDDSIDNKVLTRSDKARGKSDNVPSEEVVKKMKNYWRQLLNAKLITQRKFDNLTKAERGGLSELDKAGFIKRQLVETRQITKHVAQILDSRMNTKYDENDKLIREVKVITLKSKLVSDFRKDFQFYKVREINNYHHAHDAYLNAVVGTALIKKYPKLESEFVYGDYKVYDVRKMIAKSEQEIGKATAKYFFYSNIMNFFKTEITLANGEIRKRPLIETNGETGEIVWDKGRDFATVRKVLSMPQVNIVKKTEVQTGGFSKESILPKRNSDKLIARKKDWDPKKYGGFDSPTVAYSVLVVAKVEKGKSKKLKSVKELLGITIMERSSFEKNPIDFLEAKGYKEVKKDLIIKLPKYSLFELENGRKRMLASAGELQKGNELALPSKYVNFLYLASHYEKLKGSPEDNEQKQLFVEQHKHYLDEIIEQISEFSKRVILADANLDKVLSAYNKHRDKPIREQAENIIHLFTLTNLGAPAAFKYFDTTIDRKRYTSTKEVLDATLIHQSITGLYETRIDLSQLGGDGGGGGGGSGGTLNIEDEHRLHETSKEPDVSLGSTWLSDFPQAWAETGGMGLAVRQAPLIIPLKATSTPVSIKQYPMSQEARLGIKPHIQRLLDQGILVPCQSPWNTPLLPVKKPGTNDYRPVQDLREVNKRVEDIHPTVPNPYNLLSGLPPSHQWYTVLDLKDAFFCLRLHPTSQPLFAFEWRDPEMGISGQLTWTRLPQGFKNSPTLFNEALHRDLADFRIQHPDLILLQYVDDLLLAATSELDCQQGTRALLQTLGNLGYRASAKKAQICQKQVKYLGYLLKEGQRWLTEARKETVMGQPTPKTPRQLREFLGTAGFCRLWIPGFAEMAAPLYPLTKPGTLFNWGPDQQKAYQEIKQALLTAPALGLPDLTKPFELFVDEKQGYAKGVLTQKLGPWRRPVAYLSKKLDPVAAGWPPCLRMVAAIAVLTKDAGKLTMGQPLVILAPHAVEALVKQPPDRWLSNARMTHYQALLLDTDRVQFGPVVALNPATLLPLPEEGLQHNCLDILAEAHGTRPDLTDQPLPDADHTWYTDGSSLLQEGQRKAGAAVTTETEVIWAKALPAGTSAQRAELIALTQALKMAEGKKLNVYTDSRYAFATAHIHGEIYRRRGWLTSEGKEIKNKDEILALLKALFLPKRLSIIHCPGHQKGHSAEARGNRMADQAARKAAITETPDTSTLLAGKRTADGSEFEKRTADGSEFESPKKKAKVE

SEQ ID NO: 2718 - protein, 2093 aa, synthetic construct
MPAAKRVKLDGGDKKYSIGLDIGTNSVGWAVITDEYKVPSKKFKVLGNTDRHSIKKNLIGALLFDSGETAEATRLKRTARRRYTRRKNRICYLQEIFSNEMAKVDDSFFHRLEESFLVEEDKKHERHPIFGNIVDEVAYHEKYPTIYHLRKKLVDSTDKADLRLIYLALAHMIKFRGHFLIEGDLNPDNSDVDKLFIQLVQTYNQLFEENPINASGVDAKAILSARLSKSRRLENLIAQLPGEKKNGLFGNLIALSLGLTPNFKSNFDLAEDAKLQLSKDTYDDDLDNLLAQIGDQYADLFLAAKNLSDAILLSDILRVNTEITKAPLSASMIKRYDEHHQDLTLLKALVRQQLPEKYKEIFFDQSKNGYAGYIDGGASQEEFYKFIKPILEKMDGTEELLVKLNREDLLRKQRTFDNGSIPHQIHLGELHAILRRQEDFYPFLKDNREKIEKILTFRIPYYVGPLARGNSRFAWMTRKSEETITPWNFEEVVDKGASAQSFIERMTNFDKNLPNEKVLPKHSLLYEYFTVYNELTKVKYVTEGMRKPAFLSGEQKKAIVDLLFKTNRKVTVKQLKEDYFKKIECFDSVEISGVEDRFNASLGTYHDLLKIIKDKDFLDNEENEDILEDIVLTLTLFEDREMIEERLKTYAHLFDDKVMKQLKRRRYTGWGRLSRKLINGIRDKQSGKTILDFLKSDGFANRNFMQLIHDDSLTFKEDIQKAQVSGQGDSLHEHIANLAGSPAIKKGILQTVKVVDELVKVMGRHKPENIVIEMARENQTTQKGQKNSRERMKRIEEGIKELGSQILKEHPVENTQLQNEKLYLYYLQNGRDMYVDQELDINRLSDYDVDHIVPQSFLKDDSIDNKVLTRSDKARGKSDNVPSEEVVKKMKNYWRQLLNAKLITQRKFDNLTKAERGGLSELDKAGFIKRQLVETRQITKHVAQILDSRMNTKYDENDKLIREVKVITLKSKLVSDFRKDFQFYKVREINNYHHAHDAYLNAVVGTALIKKYPKLESEFVYGDYKVYDVRKMIAKSEQEIGKATAKYFFYSNIMNFFKTEITLANGEIRKRPLIETNGETGEIVWDKGRDFATVRKVLSMPQVNIVKKTEVQTGGFSKESILPKRNSDKLIARKKDWDPKKYGGFDSPTVAYSVLVVAKVEKGKSKKLKSVKELLGITIMERSSFEKNPIDFLEAKGYKEVKKDLIIKLPKYSLFELENGRKRMLASAGELQKGNELALPSKYVNFLYLASHYEKLKGSPEDNEQKQLFVEQHKHYLDEIIEQISEFSKRVILADANLDKVLSAYNKHRDKPIREQAENIIHLFTLTNLGAPAAFKYFDTTIDRKRYTSTKEVLDATLIHQSITGLYETRIDLSQLGGDGGGSSEAAAKGGTLNIEDEHRLHETSKEPDVSLGSTWLSDFPQAWAETGGMGLAVRQAPLIIPLKATSTPVSIKQYPMSQEARLGIKPHIQRLLDQGILVPCQSPWNTPLLPVKKPGTNDYRPVQDLREVNKRVEDIHPTVPNPYNLLSGLPPSHQWYTVLDLKDAFFCLRLHPTSQPLFAFEWRDPEMGISGQLTWTRLPQGFKNSPTLFNEALHRDLADFRIQHPDLILLQYVDDLLLAATSELDCQQGTRALLQTLGNLGYRASAKKAQICQKQVKYLGYLLKEGQRWLTEARKETVMGQPTPKTPRQLREFLGTAGFCRLWIPGFAEMAAPLYPLTKPGTLFNWGPDQQKAYQEIKQALLTAPALGLPDLTKPFELFVDEKQGYAKGVLTQKLGPWRRPVAYLSKKLDPVAAGWPPCLRMVAAIAVLTKDAGKLTMGQPLVILAPHAVEALVKQPPDRWLSNARMTHYQALLLDTDRVQFGPVVALNPATLLPLPEEGLQHNCLDILAEAHGTRPDLTDQPLPDADHTWYTDGSSLLQEGQRKAGAAVTTETEVIWAKALPAGTSAQRAELIALTQALKMAEGKKLNVYTDSRYAFATAHIHGEIYRRRGWLTSEGKEIKNKDEILALLKALFLPKRLSIIHCPGHQKGHSAEARGNRMADQAARKAAITETPDTSTLLAGKRTADGSEFEKRTADGSEFESPKKKAKVE

SEQ ID NO: 2719 - protein, 2096 aa, synthetic construct
MPAAKRVKLDGGDKKYSIGLDIGTNSVGWAVITDEYKVPSKKFKVLGNTDRHSIKKNLIGALLFDSGETAEATRLKRTARRRYTRRKNRICYLQEIFSNEMAKVDDSFFHRLEESFLVEEDKKHERHPIFGNIVDEVAYHEKYPTIYHLRKKLVDSTDKADLRLIYLALAHMIKFRGHFLIEGDLNPDNSDVDKLFIQLVQTYNQLFEENPINASGVDAKAILSARLSKSRRLENLIAQLPGEKKNGLFGNLIALSLGLTPNFKSNFDLAEDAKLQLSKDTYDDDLDNLLAQIGDQYADLFLAAKNLSDAILLSDILRVNTEITKAPLSASMIKRYDEHHQDLTLLKALVRQQLPEKYKEIFFDQSKNGYAGYIDGGASQEEFYKFIKPILEKMDGTEELLVKLNREDLLRKQRTFDNGSIPHQIHLGELHAILRRQEDFYPFLKDNREKIEKILTFRIPYYVGPLARGNSRFAWMTRKSEETITPWNFEEVVDKGASAQSFIERMTNFDKNLPNEKVLPKHSLLYEYFTVYNELTKVKYVTEGMRKPAFLSGEQKKAIVDLLFKTNRKVTVKQLKEDYFKKIECFDSVEISGVEDRFNASLGTYHDLLKIIKDKDFLDNEENEDILEDIVLTLTLFEDREMIEERLKTYAHLFDDKVMKQLKRRRYTGWGRLSRKLINGIRDKQSGKTILDFLKSDGFANRNFMQLIHDDSLTFKEDIQKAQVSGQGDSLHEHIANLAGSPAIKKGILQTVKVVDELVKVMGRHKPENIVIEMARENQTTQKGQKNSRERMKRIEEGIKELGSQILKEHPVENTQLQNEKLYLYYLQNGRDMYVDQELDINRLSDYDVDHIVPQSFLKDDSIDNKVLTRSDKARGKSDNVPSEEVVKKMKNYWRQLLNAKLITQRKFDNLTKAERGGLSELDKAGFIKRQLVETRQITKHVAQILDSRMNTKYDENDKLIREVKVITLKSKLVSDFRKDFQFYKVREINNYHHAHDAYLNAVVGTALIKKYPKLESEFVYGDYKVYDVRKMIAKSEQEIGKATAKYFFYSNIMNFFKTEITLANGEIRKRPLIETNGETGEIVWDKGRDFATVRKVLSMPQVNIVKKTEVQTGGFSKESILPKRNSDKLIARKKDWDPKKYGGFDSPTVAYSVLVVAKVEKGKSKKLKSVKELLGITIMERSSFEKNPIDFLEAKGYKEVKKDLIIKLPKYSLFELENGRKRMLASAGELQKGNELALPSKYVNFLYLASHYEKLKGSPEDNEQKQLFVEQHKHYLDEIIEQISEFSKRVILADANLDKVLSAYNKHRDKPIREQAENIIHLFTLTNLGAPAAFKYFDTTIDRKRYTSTKEVLDATLIHQSITGLYETRIDLSQLGGDGGGGGEAAAKPAPGGTLNIEDEHRLHETSKEPDVSLGSTWLSDFPQAWAETGGMGLAVRQAPLIIPLKATSTPVSIKQYPMSQEARLGIKPHIQRLLDQGILVPCQSPWNTPLLPVKKPGTNDYRPVQDLREVNKRVEDIHPTVPNPYNLLSGLPPSHQWYTVLDLKDAFFCLRLHPTSQPLFAFEWRDPEMGISGQLTWTRLPQGFKNSPTLFNEALHRDLADFRIQHPDLILLQYVDDLLLAATSELDCQQGTRALLQTLGNLGYRASAKKAQICQKQVKYLGYLLKEGQRWLTEARKETVMGQPTPKTPRQLREFLGTAGFCRLWIPGFAEMAAPLYPLTKPGTLFNWGPDQQKAYQEIKQALLTAPALGLPDLTKPFELFVDEKQGYAKGVLTQKLGPWRRPVAYLSKKLDPVAAGWPPCLRMVAAIAVLTKDAGKLTMGQPLVILAPHAVEALVKQPPDRWLSNARMTHYQALLLDTDRVQFGPVVALNPATLLPLPEEGLQHNCLDILAEAHGTRPDLTDQPLPDADHTWYTDGSSLLQEGQRKAGAAVTTETEVIWAKALPAGTSAQRAELIALTQALKMAEGKKLNVYTDSRYAFATAHIHGEIYRRRGWLTSEGKEIKNKDEILALLKALFLPKRLSIIHCPGHQKGHSAEARGNRMADQAARKAAITETPDTSTLLAGKRTADGSEFEKRTADGSEFESPKKKAKVE

SEQ ID NO: 2720 - protein, 2105 aa, synthetic construct
MPAAKRVKLDGGDKKYSIGLDIGTNSVGWAVITDEYKVPSKKFKVLGNTDRHSIKKNLIGALLFDSGETAEATRLKRTARRRYTRRKNRICYLQEIFSNEMAKVDDSFFHRLEESFLVEEDKKHERHPIFGNIVDEVAYHEKYPTIYHLRKKLVDSTDKADLRLIYLALAHMIKFRGHFLIEGDLNPDNSDVDKLFIQLVQTYNQLFEENPINASGVDAKAILSARLSKSRRLENLIAQLPGEKKNGLFGNLIALSLGLTPNFKSNFDLAEDAKLQLSKDTYDDDLDNLLAQIGDQYADLFLAAKNLSDAILLSDILRVNTEITKAPLSASMIKRYDEHHQDLTLLKALVRQQLPEKYKEIFFDQSKNGYAGYIDGGASQEEFYKFIKPILEKMDGTEELLVKLNREDLLRKQRTFDNGSIPHQIHLGELHAILRRQEDFYPFLKDNREKIEKILTFRIPYYVGPLARGNSRFAWMTRKSEETITPWNFEEVVDKGASAQSFIERMTNFDKNLPNEKVLPKHSLLYEYFTVYNELTKVKYVTEGMRKPAFLSGEQKKAIVDLLFKTNRKVTVKQLKEDYFKKIECFDSVEISGVEDRFNASLGTYHDLLKIIKDKDFLDNEENEDILEDIVLTLTLFEDREMIEERLKTYAHLFDDKVMKQLKRRRYTGWGRLSRKLINGIRDKQSGKTILDFLKSDGFANRNFMQLIHDDSLTFKEDIQKAQVSGQGDSLHEHIANLAGSPAIKKGILQTVKVVDELVKVMGRHKPENIVIEMARENQTTQKGQKNSRERMKRIEEGIKELGSQILKEHPVENTQLQNEKLYLYYLQNGRDMYVDQELDINRLSDYDVDHIVPQSFLKDDSIDNKVLTRSDKARGKSDNVPSEEVVKKMKNYWRQLLNAKLITQRKFDNLTKAERGGLSELDKAGFIKRQLVETRQITKHVAQILDSRMNTKYDENDKLIREVKVITLKSKLVSDFRKDFQFYKVREINNYHHAHDAYLNAVVGTALIKKYPKLESEFVYGDYKVYDVRKMIAKSEQEIGKATAKYFFYSNIMNFFKTEITLANGEIRKRPLIETNGETGEIVWDKGRDFATVRKVLSMPQVNIVKKTEVQTGGFSKESILPKRNSDKLIARKKDWDPKKYGGFDSPTVAYSVLVVAKVEKGKSKKLKSVKELLGITIMERSSFEKNPIDFLEAKGYKEVKKDLIIKLPKYSLFELENGRKRMLASAGELQKGNELALPSKYVNFLYLASHYEKLKGSPEDNEQKQLFVEQHKHYLDEIIEQISEFSKRVILADANLDKVLSAYNKHRDKPIREQAENIIHLFTLTNLGAPAAFKYFDTTIDRKRYTSTKEVLDATLIHQSITGLYETRIDLSQLGGDGGEAAAKEAAAKEAAAKEAAAKGGTLNIEDEHRLHETSKEPDVSLGSTWLSDFPQAWAETGGMGLAVRQAPLIIPLKATSTPVSIKQYPMSQEARLGIKPHIQRLLDQGILVPCQSPWNTPLLPVKKPGTNDYRPVQDLREVNKRVEDIHPTVPNPYNLLSGLPPSHQWYTVLDLKDAFFCLRLHPTSQPLFAFEWRDPEMGISGQLTWTRLPQGFKNSPTLFNEALHRDLADFRIQHPDLILLQYVDDLLLAATSELDCQQGTRALLQTLGNLGYRASAKKAQICQKQVKYLGYLLKEGQRWLTEARKETVMGQPTPKTPRQLREFLGTAGFCRLWIPGFAEMAAPLYPLTKPGTLFNWGPDQQKAYQEIKQALLTAPALGLPDLTKPFELFVDEKQGYAKGVLTQKLGPWRRPVAYLSKKLDPVAAGWPPCLRMVAAIAVLTKDAGKLTMGQPLVILAPHAVEALVKQPPDRWLSNARMTHYQALLLDTDRVQFGPVVALNPATLLPLPEEGLQHNCLDILAEAHGTRPDLTDQPLPDADHTWYTDGSSLLQEGQRKAGAAVTTETEVIWAKALPAGTSAQRAELIALTQALKMAEGKKLNVYTDSRYAFATAHIHGEIYRRRGWLTSEGKEIKNKDEILALLKALFLPKRLSIIHCPGHQKGHSAEARGNRMADQAARKAAITETPDTSTLLAGKRTADGSEFEKRTADGSEFESPKKKAKVE

SEQ ID NO: 2721 - protein, 2096 aa, synthetic construct
MPAAKRVKLDGGDKKYSIGLDIGTNSVGWAVITDEYKVPSKKFKVLGNTDRHSIKKNLIGALLFDSGETAEATRLKRTARRRYTRRKNRICYLQEIFSNEMAKVDDSFFHRLEESFLVEEDKKHERHPIFGNIVDEVAYHEKYPTIYHLRKKLVDSTDKADLRLIYLALAHMIKFRGHFLIEGDLNPDNSDVDKLFIQLVQTYNQLFEENPINASGVDAKAILSARLSKSRRLENLIAQLPGEKKNGLFGNLIALSLGLTPNFKSNFDLAEDAKLQLSKDTYDDDLDNLLAQIGDQYADLFLAAKNLSDAILLSDILRVNTEITKAPLSASMIKRYDEHHQDLTLLKALVRQQLPEKYKEIFFDQSKNGYAGYIDGGASQEEFYKFIKPILEKMDGTEELLVKLNREDLLRKQRTFDNGSIPHQIHLGELHAILRRQEDFYPFLKDNREKIEKILTFRIPYYVGPLARGNSRFAWMTRKSEETITPWNFEEVVDKGASAQSFIERMTNFDKNLPNEKVLPKHSLLYEYFTVYNELTKVKYVTEGMRKPAFLSGEQKKAIVDLLFKTNRKVTVKQLKEDYFKKIECFDSVEISGVEDRFNASLGTYHDLLKIIKDKDFLDNEENEDILEDIVLTLTLFEDREMIEERLKTYAHLFDDKVMKQLKRRRYTGWGRLSRKLINGIRDKQSGKTILDFLKSDGFANRNFMQLIHDDSLTFKEDIQKAQVSGQGDSLHEHIANLAGSPAIKKGILQTVKVVDELVKVMGRHKPENIVIEMARENQTTQKGQKNSRERMKRIEEGIKELGSQILKEHPVENTQLQNEKLYLYYLQNGRDMYVDQELDINRLSDYDVDHIVPQSFLKDDSIDNKVLTRSDKARGKSDNVPSEEVVKKMKNYWRQLLNAKLITQRKFDNLTKAERGGLSELDKAGFIKRQLVETRQITKHVAQILDSRMNTKYDENDKLIREVKVITLKSKLVSDFRKDFQFYKVREINNYHHAHDAYLNAVVGTALIKKYPKLESEFVYGDYKVYDVRKMIAKSEQEIGKATAKYFFYSNIMNFFKTEITLANGEIRKRPLIETNGETGEIVWDKGRDFATVRKVLSMPQVNIVKKTEVQTGGFSKESILPKRNSDKLIARKKDWDPKKYGGFDSPTVAYSVLVVAKVEKGKSKKLKSVKELLGITIMERSSFEKNPIDFLEAKGYKEVKKDLIIKLPKYSLFELENGRKRMLASAGELQKGNELALPSKYVNFLYLASHYEKLKGSPEDNEQKQLFVEQHKHYLDEIIEQISEFSKRVILADANLDKVLSAYNKHRDKPIREQAENIIHLFTLTNLGAPAAFKYFDTTIDRKRYTSTKEVLDATLIHQSITGLYETRIDLSQLGGDGGGGGEAAAKGGSGGTLNIEDEHRLHETSKEPDVSLGSTWLSDFPQAWAETGGMGLAVRQAPLIIPLKATSTPVSIKQYPMSQEARLGIKPHIQRLLDQGILVPCQSPWNTPLLPVKKPGTNDYRPVQDLREVNKRVEDIHPTVPNPYNLLSGLPPSHQWYTVLDLKDAFFCLRLHPTSQPLFAFEWRDPEMGISGQLTWTRLPQGFKNSPTLFNEALHRDLADFRIQHPDLILLQYVDDLLLAATSELDCQQGTRALLQTLGNLGYRASAKKAQICQKQVKYLGYLLKEGQRWLTEARKETVMGQPTPKTPRQLREFLGTAGFCRLWIPGFAEMAAPLYPLTKPGTLFNWGPDQQKAYQEIKQALLTAPALGLPDLTKPFELFVDEKQGYAKGVLTQKLGPWRRPVAYLSKKLDPVAAGWPPCLRMVAAIAVLTKDAGKLTMGQPLVILAPHAVEALVKQPPDRWLSNARMTHYQALLLDTDRVQFGPVVALNPATLLPLPEEGLQHNCLDILAEAHGTRPDLTDQPLPDADHTWYTDGSSLLQEGQRKAGAAVTTETEVIWAKALPAGTSAQRAELIALTQALKMAEGKKLNVYTDSRYAFATAHIHGEIYRRRGWLTSEGKEIKNKDEILALLKALFLPKRLSIIHCPGHQKGHSAEARGNRMADQAARKAAITETPDTSTLLAGKRTADGSEFEKRTADGSEFESPKKKAKVE

SEQ ID NO: 2722 - protein, 2096 aa, synthetic construct
MPAAKRVKLDGGDKKYSIGLDIGTNSVGWAVITDEYKVPSKKFKVLGNTDRHSIKKNLIGALLFDSGETAEATRLKRTARRRYTRRKNRICYLQEIFSNEMAKVDDSFFHRLEESFLVEEDKKHERHPIFGNIVDEVAYHEKYPTIYHLRKKLVDSTDKADLRLIYLALAHMIKFRGHFLIEGDLNPDNSDVDKLFIQLVQTYNQLFEENPINASGVDAKAILSARLSKSRRLENLIAQLPGEKKNGLFGNLIALSLGLTPNFKSNFDLAEDAKLQLSKDTYDDDLDNLLAQIGDQYADLFLAAKNLSDAILLSDILRVNTEITKAPLSASMIKRYDEHHQDLTLLKALVRQQLPEKYKEIFFDQSKNGYAGYIDGGASQEEFYKFIKPILEKMDGTEELLVKLNREDLLRKQRTFDNGSIPHQIHLGELHAILRRQEDFYPFLKDNREKIEKILTFRIPYYVGPLARGNSRFAWMTRKSEETITPWNFEEVVDKGASAQSFIERMTNFDKNLPNEKVLPKHSLLYEYFTVYNELTKVKYVTEGMRKPAFLSGEQKKAIVDLLFKTNRKVTVKQLKEDYFKKIECFDSVEISGVEDRFNASLGTYHDLLKIIKDKDFLDNEENEDILEDIVLTLTLFEDREMIEERLKTYAHLFDDKVMKQLKRRRYTGWGRLSRKLINGIRDKQSGKTILDFLKSDGFANRNFMQLIHDDSLTFKEDIQKAQVSGQGDSLHEHIANLAGSPAIKKGILQTVKVVDELVKVMGRHKPENIVIEMARENQTTQKGQKNSRERMKRIEEGIKELGSQILKEHPVENTQLQNEKLYLYYLQNGRDMYVDQELDINRLSDYDVDHIVPQSFLKDDSIDNKVLTRSDKARGKSDNVPSEEVVKKMKNYWRQLLNAKLITQRKFDNLTKAERGGLSELDKAGFIKRQLVETRQITKHVAQILDSRMNTKYDENDKLIREVKVITLKSKLVSDFRKDFQFYKVREINNYHHAHDAYLNAVVGTALIKKYPKLESEFVYGDYKVYDVRKMIAKSEQEIGKATAKYFFYSNIMNFFKTEITLANGEIRKRPLIETNGETGEIVWDKGRDFATVRKVLSMPQVNIVKKTEVQTGGFSKESILPKRNSDKLIARKKDWDPKKYGGFDSPTVAYSVLVVAKVEKGKSKKLKSVKELLGITIMERSSFEKNPIDFLEAKGYKEVKKDLIIKLPKYSLFELENGRKRMLASAGELQKGNELALPSKYVNFLYLASHYEKLKGSPEDNEQKQLFVEQHKHYLDEIIEQISEFSKRVILADANLDKVLSAYNKHRDKPIREQAENIIHLFTLTNLGAPAAFKYFDTTIDRKRYTSTKEVLDATLIHQSITGLYETRIDLSQLGGDGGGGGGGSEAAAKGGTLNIEDEHRLHETSKEPDVSLGSTWLSDFPQAWAETGGMGLAVRQAPLIIPLKATSTPVSIKQYPMSQEARLGIKPHIQRLLDQGILVPCQSPWNTPLLPVKKPGTNDYRPVQDLREVNKRVEDIHPTVPNPYNLLSGLPPSHQWYTVLDLKDAFFCLRLHPTSQPLFAFEWRDPEMGISGQLTWTRLPQGFKNSPTLFNEALHRDLADFRIQHPDLILLQYVDDLLLAATSELDCQQGTRALLQTLGNLGYRASAKKAQICQKQVKYLGYLLKEGQRWLTEARKETVMGQPTPKTPRQLREFLGTAGFCRLWIPGFAEMAAPLYPLTKPGTLFNWGPDQQKAYQEIKQALLTAPALGLPDLTKPFELFVDEKQGYAKGVLTQKLGPWRRPVAYLSKKLDPVAAGWPPCLRMVAAIAVLTKDAGKLTMGQPLVILAPHAVEALVKQPPDRWLSNARMTHYQALLLDTDRVQFGPVVALNPATLLPLPEEGLQHNCLDILAEAHGTRPDLTDQPLPDADHTWYTDGSSLLQEGQRKAGAAVTTETEVIWAKALPAGTSAQRAELIALTQALKMAEGKKLNVYTDSRYAFATAHIHGEIYRRRGWLTSEGKEIKNKDEILALLKALFLPKRLSIIHCPGHQKGHSAEARGNRMADQAARKAAITETPDTSTLLAGKRTADGSEFEKRTADGSEFESPKKKAKVE

SEQ ID NO: 2723 - protein, 2096 aa, synthetic construct
MPAAKRVKLDGGDKKYSIGLDIGTNSVGWAVITDEYKVPSKKFKVLGNTDRHSIKKNLIGALLFDSGETAEATRLKRTARRRYTRRKNRICYLQEIFSNEMAKVDDSFFHRLEESFLVEEDKKHERHPIFGNIVDEVAYHEKYPTIYHLRKKLVDSTDKADLRLIYLALAHMIKFRGHFLIEGDLNPDNSDVDKLFIQLVQTYNQLFEENPINASGVDAKAILSARLSKSRRLENLIAQLPGEKKNGLFGNLIALSLGLTPNFKSNFDLAEDAKLQLSKDTYDDDLDNLLAQIGDQYADLFLAAKNLSDAILLSDILRVNTEITKAPLSASMIKRYDEHHQDLTLLKALVRQQLPEKYKEIFFDQSKNGYAGYIDGGASQEEFYKFIKPILEKMDGTEELLVKLNREDLLRKQRTFDNGSIPHQIHLGELHAILRRQEDFYPFLKDNREKIEKILTFRIPYYVGPLARGNSRFAWMTRKSEETITPWNFEEVVDKGASAQSFIERMTNFDKNLPNEKVLPKHSLLYEYFTVYNELTKVKYVTEGMRKPAFLSGEQKKAIVDLLFKTNRKVTVKQLKEDYFKKIECFDSVEISGVEDRFNASLGTYHDLLKIIKDKDFLDNEENEDILEDIVLTLTLFEDREMIEERLKTYAHLFDDKVMKQLKRRRYTGWGRLSRKLINGIRDKQSGKTILDFLKSDGFANRNFMQLIHDDSLTFKEDIQKAQVSGQGDSLHEHIANLAGSPAIKKGILQTVKVVDELVKVMGRHKPENIVIEMARENQTTQKGQKNSRERMKRIEEGIKELGSQILKEHPVENTQLQNEKLYLYYLQNGRDMYVDQELDINRLSDYDVDHIVPQSFLKDDSIDNKVLTRSDKARGKSDNVPSEEVVKKMKNYWRQLLNAKLITQRKFDNLTKAERGGLSELDKAGFIKRQLVETRQITKHVAQILDSRMNTKYDENDKLIREVKVITLKSKLVSDFRKDFQFYKVREINNYHHAHDAYLNAVVGTALIKKYPKLESEFVYGDYKVYDVRKMIAKSEQEIGKATAKYFFYSNIMNFFKTEITLANGEIRKRPLIETNGETGEIVWDKGRDFATVRKVLSMPQVNIVKKTEVQTGGFSKESILPKRNSDKLIARKKDWDPKKYGGFDSPTVAYSVLVVAKVEKGKSKKLKSVKELLGITIMERSSFEKNPIDFLEAKGYKEVKKDLIIKLPKYSLFELENGRKRMLASAGELQKGNELALPSKYVNFLYLASHYEKLKGSPEDNEQKQLFVEQHKHYLDEIIEQISEFSKRVILADANLDKVLSAYNKHRDKPIREQAENIIHLFTLTNLGAPAAFKYFDTTIDRKRYTSTKEVLDATLIHQSITGLYETRIDLSQLGGDGGEAAAKGSSPAPGGTLNIEDEHRLHETSKEPDVSLGSTWLSDFPQAWAETGGMGLAVRQAPLIIPLKATSTPVSIKQYPMSQEARLGIKPHIQRLLDQGILVPCQSPWNTPLLPVKKPGTNDYRPVQDLREVNKRVEDIHPTVPNPYNLLSGLPPSHQWYTVLDLKDAFFCLRLHPTSQPLFAFEWRDPEMGISGQLTWTRLPQGFKNSPTLFNEALHRDLADFRIQHPDLILLQYVDDLLLAATSELDCQQGTRALLQTLGNLGYRASAKKAQICQKQVKYLGYLLKEGQRWLTEARKETVMGQPTPKTPRQLREFLGTAGFCRLWIPGFAEMAAPLYPLTKPGTLFNWGPDQQKAYQEIKQALLTAPALGLPDLTKPFELFVDEKQGYAKGVLTQKLGPWRRPVAYLSKKLDPVAAGWPPCLRMVAAIAVLTKDAGKLTMGQPLVILAPHAVEALVKQPPDRWLSNARMTHYQALLLDTDRVQFGPVVALNPATLLPLPEEGLQHNCLDILAEAHGTRPDLTDQPLPDADHTWYTDGSSLLQEGQRKAGAAVTTETEVIWAKALPAGTSAQRAELIALTQALKMAEGKKLNVYTDSRYAFATAHIHGEIYRRRGWLTSEGKEIKNKDEILALLKALFLPKRLSIIHCPGHQKGHSAEARGNRMADQAARKAAITETPDTSTLLAGKRTADGSEFEKRTADGSEFESPKKKAKVE

SEQ ID NO: 2724 - protein, 2093 aa, synthetic construct
MPAAKRVKLDGGDKKYSIGLDIGTNSVGWAVITDEYKVPSKKFKVLGNTDRHSIKKNLIGALLFDSGETAEATRLKRTARRRYTRRKNRICYLQEIFSNEMAKVDDSFFHRLEESFLVEEDKKHERHPIFGNIVDEVAYHEKYPTIYHLRKKLVDSTDKADLRLIYLALAHMIKFRGHFLIEGDLNPDNSDVDKLFIQLVQTYNQLFEENPINASGVDAKAILSARLSKSRRLENLIAQLPGEKKNGLFGNLIALSLGLTPNFKSNFDLAEDAKLQLSKDTYDDDLDNLLAQIGDQYADLFLAAKNLSDAILLSDILRVNTEITKAPLSASMIKRYDEHHQDLTLLKALVRQQLPEKYKEIFFDQSKNGYAGYIDGGASQEEFYKFIKPILEKMDGTEELLVKLNREDLLRKQRTFDNGSIPHQIHLGELHAILRRQEDFYPFLKDNREKIEKILTFRIPYYVGPLARGNSRFAWMTRKSEETITPWNFEEVVDKGASAQSFIERMTNFDKNLPNEKVLPKHSLLYEYFTVYNELTKVKYVTEGMRKPAFLSGEQKKAIVDLLFKTNRKVTVKQLKEDYFKKIECFDSVEISGVEDRFNASLGTYHDLLKIIKDKDFLDNEENEDILEDIVLTLTLFEDREMIEERLKTYAHLFDDKVMKQLKRRRYTGWGRLSRKLINGIRDKQSGKTILDFLKSDGFANRNFMQLIHDDSLTFKEDIQKAQVSGQGDSLHEHIANLAGSPAIKKGILQTVKVVDELVKVMGRHKPENIVIEMARENQTTQKGQKNSRERMKRIEEGIKELGSQILKEHPVENTQLQNEKLYLYYLQNGRDMYVDQELDINRLSDYDVDHIVPQSFLKDDSIDNKVLTRSDKARGKSDNVPSEEVVKKMKNYWRQLLNAKLITQRKFDNLTKAERGGLSELDKAGFIKRQLVETRQITKHVAQILDSRMNTKYDENDKLIREVKVITLKSKLVSDFRKDFQFYKVREINNYHHAHDAYLNAVVGTALIKKYPKLESEFVYGDYKVYDVRKMIAKSEQEIGKATAKYFFYSNIMNFFKTEITLANGEIRKRPLIETNGETGEIVWDKGRDFATVRKVLSMPQVNIVKKTEVQTGGFSKESILPKRNSDKLIARKKDWDPKKYGGFDSPTVAYSVLVVAKVEKGKSKKLKSVKELLGITIMERSSFEKNPIDFLEAKGYKEVKKDLIIKLPKYSLFELENGRKRMLASAGELQKGNELALPSKYVNFLYLASHYEKLKGSPEDNEQKQLFVEQHKHYLDEIIEQISEFSKRVILADANLDKVLSAYNKHRDKPIREQAENIIHLFTLTNLGAPAAFKYFDTTIDRKRYTSTKEVLDATLIHQSITGLYETRIDLSQLGGDGGEAAAKPAPGGTLNIEDEHRLHETSKEPDVSLGSTWLSDFPQAWAETGGMGLAVRQAPLIIPLKATSTPVSIKQYPMSQEARLGIKPHIQRLLDQGILVPCQSPWNTPLLPVKKPGTNDYRPVQDLREVNKRVEDIHPTVPNPYNLLSGLPPSHQWYTVLDLKDAFFCLRLHPTSQPLFAFEWRDPEMGISGQLTWTRLPQGFKNSPTLFNEALHRDLADFRIQHPDLILLQYVDDLLLAATSELDCQQGTRALLQTLGNLGYRASAKKAQICQKQVKYLGYLLKEGQRWLTEARKETVMGQPTPKTPRQLREFLGTAGFCRLWIPGFAEMAAPLYPLTKPGTLFNWGPDQQKAYQEIKQALLTAPALGLPDLTKPFELFVDEKQGYAKGVLTQKLGPWRRPVAYLSKKLDPVAAGWPPCLRMVAAIAVLTKDAGKLTMGQPLVILAPHAVEALVKQPPDRWLSNARMTHYQALLLDTDRVQFGPVVALNPATLLPLPEEGLQHNCLDILAEAHGTRPDLTDQPLPDADHTWYTDGSSLLQEGQRKAGAAVTTETEVIWAKALPAGTSAQRAELIALTQALKMAEGKKLNVYTDSRYAFATAHIHGEIYRRRGWLTSEGKEIKNKDEILALLKALFLPKRLSIIHCPGHQKGHSAEARGNRMADQAARKAAITETPDTSTLLAGKRTADGSEFEKRTADGSEFESPKKKAKVE

SEQ ID NO: 2725 - protein, 2100 aa, synthetic construct
MPAAKRVKLDGGDKKYSIGLDIGTNSVGWAVITDEYKVPSKKFKVLGNTDRHSIKKNLIGALLFDSGETAEATRLKRTARRRYTRRKNRICYLQEIFSNEMAKVDDSFFHRLEESFLVEEDKKHERHPIFGNIVDEVAYHEKYPTIYHLRKKLVDSTDKADLRLIYLALAHMIKFRGHFLIEGDLNPDNSDVDKLFIQLVQTYNQLFEENPINASGVDAKAILSARLSKSRRLENLIAQLPGEKKNGLFGNLIALSLGLTPNFKSNFDLAEDAKLQLSKDTYDDDLDNLLAQIGDQYADLFLAAKNLSDAILLSDILRVNTEITKAPLSASMIKRYDEHHQDLTLLKALVRQQLPEKYKEIFFDQSKNGYAGYIDGGASQEEFYKFIKPILEKMDGTEELLVKLNREDLLRKQRTFDNGSIPHQIHLGELHAILRRQEDFYPFLKDNREKIEKILTFRIPYYVGPLARGNSRFAWMTRKSEETITPWNFEEVVDKGASAQSFIERMTNFDKNLPNEKVLPKHSLLYEYFTVYNELTKVKYVTEGMRKPAFLSGEQKKAIVDLLFKTNRKVTVKQLKEDYFKKIECFDSVEISGVEDRFNASLGTYHDLLKIIKDKDFLDNEENEDILEDIVLTLTLFEDREMIEERLKTYAHLFDDKVMKQLKRRRYTGWGRLSRKLINGIRDKQSGKTILDFLKSDGFANRNFMQLIHDDSLTFKEDIQKAQVSGQGDSLHEHIANLAGSPAIKKGILQTVKVVDELVKVMGRHKPENIVIEMARENQTTQKGQKNSRERMKRIEEGIKELGSQILKEHPVENTQLQNEKLYLYYLQNGRDMYVDQELDINRLSDYDVDHIVPQSFLKDDSIDNKVLTRSDKARGKSDNVPSEEVVKKMKNYWRQLLNAKLITQRKFDNLTKAERGGLSELDKAGFIKRQLVETRQITKHVAQILDSRMNTKYDENDKLIREVKVITLKSKLVSDFRKDFQFYKVREINNYHHAHDAYLNAVVGTALIKKYPKLESEFVYGDYKVYDVRKMIAKSEQEIGKATAKYFFYSNIMNFFKTEITLANGEIRKRPLIETNGETGEIVWDKGRDFATVRKVLSMPQVNIVKKTEVQTGGFSKESILPKRNSDKLIARKKDWDPKKYGGFDSPTVAYSVLVVAKVEKGKSKKLKSVKELLGITIMERSSFEKNPIDFLEAKGYKEVKKDLIIKLPKYSLFELENGRKRMLASAGELQKGNELALPSKYVNFLYLASHYEKLKGSPEDNEQKQLFVEQHKHYLDEIIEQISEFSKRVILADANLDKVLSAYNKHRDKPIREQAENIIHLFTLTNLGAPAAFKYFDTTIDRKRYTSTKEVLDATLIHQSITGLYETRIDLSQLGGDGGGGGGSEAAAKGGGGSGGTLNIEDEHRLHETSKEPDVSLGSTWLSDFPQAWAETGGMGLAVRQAPLIIPLKATSTPVSIKQYPMSQEARLGIKPHIQRLLDQGILVPCQSPWNTPLLPVKKPGTNDYRPVQDLREVNKRVEDIHPTVPNPYNLLSGLPPSHQWYTVLDLKDAFFCLRLHPTSQPLFAFEWRDPEMGISGQLTWTRLPQGFKNSPTLFNEALHRDLADFRIQHPDLILLQYVDDLLLAATSELDCQQGTRALLQTLGNLGYRASAKKAQICQKQVKYLGYLLKEGQRWLTEARKETVMGQPTPKTPRQLREFLGTAGFCRLWIPGFAEMAAPLYPLTKPGTLFNWGPDQQKAYQEIKQALLTAPALGLPDLTKPFELFVDEKQGYAKGVLTQKLGPWRRPVAYLSKKLDPVAAGWPPCLRMVAAIAVLTKDAGKLTMGQPLVILAPHAVEALVKQPPDRWLSNARMTHYQALLLDTDRVQFGPVVALNPATLLPLPEEGLQHNCLDILAEAHGTRPDLTDQPLPDADHTWYTDGSSLLQEGQRKAGAAVTTETEVIWAKALPAGTSAQRAELIALTQALKMAEGKKLNVYTDSRYAFATAHIHGEIYRRRGWLTSEGKEIKNKDEILALLKALFLPKRLSIIHCPGHQKGHSAEARGNRMADQAARKAAITETPDTSTLLAGKRTADGSEFEKRTADGSEFESPKKKAKVE

SEQ ID NO: 2726 - protein, 2093 aa, synthetic construct
MPAAKRVKLDGGDKKYSIGLDIGTNSVGWAVITDEYKVPSKKFKVLGNTDRHSIKKNLIGALLFDSGETAEATRLKRTARRRYTRRKNRICYLQEIFSNEMAKVDDSFFHRLEESFLVEEDKKHERHPIFGNIVDEVAYHEKYPTIYHLRKKLVDSTDKADLRLIYLALAHMIKFRGHFLIEGDLNPDNSDVDKLFIQLVQTYNQLFEENPINASGVDAKAILSARLSKSRRLENLIAQLPGEKKNGLFGNLIALSLGLTPNFKSNFDLAEDAKLQLSKDTYDDDLDNLLAQIGDQYADLFLAAKNLSDAILLSDILRVNTEITKAPLSASMIKRYDEHHQDLTLLKALVRQQLPEKYKEIFFDQSKNGYAGYIDGGASQEEFYKFIKPILEKMDGTEELLVKLNREDLLRKQRTFDNGSIPHQIHLGELHAILRRQEDFYPFLKDNREKIEKILTFRIPYYVGPLARGNSRFAWMTRKSEETITPWNFEEVVDKGASAQSFIERMTNFDKNLPNEKVLPKHSLLYEYFTVYNELTKVKYVTEGMRKPAFLSGEQKKAIVDLLFKTNRKVTVKQLKEDYFKKIECFDSVEISGVEDRFNASLGTYHDLLKIIKDKDFLDNEENEDILEDIVLTLTLFEDREMIEERLKTYAHLFDDKVMKQLKRRRYTGWGRLSRKLINGIRDKQSGKTILDFLKSDGFANRNFMQLIHDDSLTFKEDIQKAQVSGQGDSLHEHIANLAGSPAIKKGILQTVKVVDELVKVMGRHKPENIVIEMARENQTTQKGQKNSRERMKRIEEGIKELGSQILKEHPVENTQLQNEKLYLYYLQNGRDMYVDQELDINRLSDYDVDHIVPQSFLKDDSIDNKVLTRSDKARGKSDNVPSEEVVKKMKNYWRQLLNAKLITQRKFDNLTKAERGGLSELDKAGFIKRQLVETRQITKHVAQILDSRMNTKYDENDKLIREVKVITLKSKLVSDFRKDFQFYKVREINNYHHAHDAYLNAVVGTALIKKYPKLESEFVYGDYKVYDVRKMIAKSEQEIGKATAKYFFYSNIMNFFKTEITLANGEIRKRPLIETNGETGEIVWDKGRDFATVRKVLSMPQVNIVKKTEVQTGGFSKESILPKRNSDKLIARKKDWDPKKYGGFDSPTVAYSVLVVAKVEKGKSKKLKSVKELLGITIMERSSFEKNPIDFLEAKGYKEVKKDLIIKLPKYSLFELENGRKRMLASAGELQKGNELALPSKYVNFLYLASHYEKLKGSPEDNEQKQLFVEQHKHYLDEIIEQISEFSKRVILADANLDKVLSAYNKHRDKPIREQAENIIHLFTLTNLGAPAAFKYFDTTIDRKRYTSTKEVLDATLIHQSITGLYETRIDLSQLGGDGGEAAAKGGSGGTLNIEDEHRLHETSKEPDVSLGSTWLSDFPQAWAETGGMGLAVRQAPLIIPLKATSTPVSIKQYPMSQEARLGIKPHIQRLLDQGILVPCQSPWNTPLLPVKKPGTNDYRPVQDLREVNKRVEDIHPTVPNPYNLLSGLPPSHQWYTVLDLKDAFFCLRLHPTSQPLFAFEWRDPEMGISGQLTWTRLPQGFKNSPTLFNEALHRDLADFRIQHPDLILLQYVDDLLLAATSELDCQQGTRALLQTLGNLGYRASAKKAQICQKQVKYLGYLLKEGQRWLTEARKETVMGQPTPKTPRQLREFLGTAGFCRLWIPGFAEMAAPLYPLTKPGTLFNWGPDQQKAYQEIKQALLTAPALGLPDLTKPFELFVDEKQGYAKGVLTQKLGPWRRPVAYLSKKLDPVAAGWPPCLRMVAAIAVLTKDAGKLTMGQPLVILAPHAVEALVKQPPDRWLSNARMTHYQALLLDTDRVQFGPVVALNPATLLPLPEEGLQHNCLDILAEAHGTRPDLTDQPLPDADHTWYTDGSSLLQEGQRKAGAAVTTETEVIWAKALPAGTSAQRAELIALTQALKMAEGKKLNVYTDSRYAFATAHIHGEIYRRRGWLTSEGKEIKNKDEILALLKALFLPKRLSIIHCPGHQKGHSAEARGNRMADQAARKAAITETPDTSTLLAGKRTADGSEFEKRTADGSEFESPKKKAKVE

SEQ ID NO: 2727 - protein, 2096 aa, synthetic construct
MPAAKRVKLDGGDKKYSIGLDIGTNSVGWAVITDEYKVPSKKFKVLGNTDRHSIKKNLIGALLFDSGETAEATRLKRTARRRYTRRKNRICYLQEIFSNEMAKVDDSFFHRLEESFLVEEDKKHERHPIFGNIVDEVAYHEKYPTIYHLRKKLVDSTDKADLRLIYLALAHMIKFRGHFLIEGDLNPDNSDVDKLFIQLVQTYNQLFEENPINASGVDAKAILSARLSKSRRLENLIAQLPGEKKNGLFGNLIALSLGLTPNFKSNFDLAEDAKLQLSKDTYDDDLDNLLAQIGDQYADLFLAAKNLSDAILLSDILRVNTEITKAPLSASMIKRYDEHHQDLTLLKALVRQQLPEKYKEIFFDQSKNGYAGYIDGGASQEEFYKFIKPILEKMDGTEELLVKLNREDLLRKQRTFDNGSIPHQIHLGELHAILRRQEDFYPFLKDNREKIEKILTFRIPYYVGPLARGNSRFAWMTRKSEETITPWNFEEVVDKGASAQSFIERMTNFDKNLPNEKVLPKHSLLYEYFTVYNELTKVKYVTEGMRKPAFLSGEQKKAIVDLLFKTNRKVTVKQLKEDYFKKIECFDSVEISGVEDRFNASLGTYHDLLKIIKDKDFLDNEENEDILEDIVLTLTLFEDREMIEERLKTYAHLFDDKVMKQLKRRRYTGWGRLSRKLINGIRDKQSGKTILDFLKSDGFANRNFMQLIHDDSLTFKEDIQKAQVSGQGDSLHEHIANLAGSPAIKKGILQTVKVVDELVKVMGRHKPENIVIEMARENQTTQKGQKNSRERMKRIEEGIKELGSQILKEHPVENTQLQNEKLYLYYLQNGRDMYVDQELDINRLSDYDVDHIVPQSFLKDDSIDNKVLTRSDKARGKSDNVPSEEVVKKMKNYWRQLLNAKLITQRKFDNLTKAERGGLSELDKAGFIKRQLVETRQITKHVAQILDSRMNTKYDENDKLIREVKVITLKSKLVSDFRKDFQFYKVREINNYHHAHDAYLNAVVGTALIKKYPKLESEFVYGDYKVYDVRKMIAKSEQEIGKATAKYFFYSNIMNFFKTEITLANGEIRKRPLIETNGETGEIVWDKGRDFATVRKVLSMPQVNIVKKTEVQTGGFSKESILPKRNSDKLIARKKDWDPKKYGGFDSPTVAYSVLVVAKVEKGKSKKLKSVKELLGITIMERSSFEKNPIDFLEAKGYKEVKKDLIIKLPKYSLFELENGRKRMLASAGELQKGNELALPSKYVNFLYLASHYEKLKGSPEDNEQKQLFVEQHKHYLDEIIEQISEFSKRVILADANLDKVLSAYNKHRDKPIREQAENIIHLFTLTNLGAPAAFKYFDTTIDRKRYTSTKEVLDATLIHQSITGLYETRIDLSQLGGDGGEAAAKGGSGSSGGTLNIEDEHRLHETSKEPDVSLGSTWLSDFPQAWAETGGMGLAVRQAPLIIPLKATSTPVSIKQYPMSQEARLGIKPHIQRLLDQGILVPCQSPWNTPLLPVKKPGTNDYRPVQDLREVNKRVEDIHPTVPNPYNLLSGLPPSHQWYTVLDLKDAFFCLRLHPTSQPLFAFEWRDPEMGISGQLTWTRLPQGFKNSPTLFNEALHRDLADFRIQHPDLILLQYVDDLLLAATSELDCQQGTRALLQTLGNLGYRASAKKAQICQKQVKYLGYLLKEGQRWLTEARKETVMGQPTPKTPRQLREFLGTAGFCRLWIPGFAEMAAPLYPLTKPGTLFNWGPDQQKAYQEIKQALLTAPALGLPDLTKPFELFVDEKQGYAKGVLTQKLGPWRRPVAYLSKKLDPVAAGWPPCLRMVAAIAVLTKDAGKLTMGQPLVILAPHAVEALVKQPPDRWLSNARMTHYQALLLDTDRVQFGPVVALNPATLLPLPEEGLQHNCLDILAEAHGTRPDLTDQPLPDADHTWYTDGSSLLQEGQRKAGAAVTTETEVIWAKALPAGTSAQRAELIALTQALKMAEGKKLNVYTDSRYAFATAHIHGEIYRRRGWLTSEGKEIKNKDEILALLKALFLPKRLSIIHCPGHQKGHSAEARGNRMADQAARKAAITETPDTSTLLAGKRTADGSEFEKRTADGSEFESPKKKAKVE

SEQ ID NO: 2728 - protein, 2097 aa, synthetic construct
MPAAKRVKLDGGDKKYSIGLDIGTNSVGWAVITDEYKVPSKKFKVLGNTDRHSIKKNLIGALLFDSGETAEATRLKRTARRRYTRRKNRICYLQEIFSNEMAKVDDSFFHRLEESFLVEEDKKHERHPIFGNIVDEVAYHEKYPTIYHLRKKLVDSTDKADLRLIYLALAHMIKFRGHFLIEGDLNPDNSDVDKLFIQLVQTYNQLFEENPINASGVDAKAILSARLSKSRRLENLIAQLPGEKKNGLFGNLIALSLGLTPNFKSNFDLAEDAKLQLSKDTYDDDLDNLLAQIGDQYADLFLAAKNLSDAILLSDILRVNTEITKAPLSASMIKRYDEHHQDLTLLKALVRQQLPEKYKEIFFDQSKNGYAGYIDGGASQEEFYKFIKPILEKMDGTEELLVKLNREDLLRKQRTFDNGSIPHQIHLGELHAILRRQEDFYPFLKDNREKIEKILTFRIPYYVGPLARGNSRFAWMTRKSEETITPWNFEEVVDKGASAQSFIERMTNFDKNLPNEKVLPKHSLLYEYFTVYNELTKVKYVTEGMRKPAFLSGEQKKAIVDLLFKTNRKVTVKQLKEDYFKKIECFDSVEISGVEDRFNASLGTYHDLLKIIKDKDFLDNEENEDILEDIVLTLTLFEDREMIEERLKTYAHLFDDKVMKQLKRRRYTGWGRLSRKLINGIRDKQSGKTILDFLKSDGFANRNFMQLIHDDSLTFKEDIQKAQVSGQGDSLHEHIANLAGSPAIKKGILQTVKVVDELVKVMGRHKPENIVIEMARENQTTQKGQKNSRERMKRIEEGIKELGSQILKEHPVENTQLQNEKLYLYYLQNGRDMYVDQELDINRLSDYDVDHIVPQSFLKDDSIDNKVLTRSDKARGKSDNVPSEEVVKKMKNYWRQLLNAKLITQRKFDNLTKAERGGLSELDKAGFIKRQLVETRQITKHVAQILDSRMNTKYDENDKLIREVKVITLKSKLVSDFRKDFQFYKVREINNYHHAHDAYLNAVVGTALIKKYPKLESEFVYGDYKVYDVRKMIAKSEQEIGKATAKYFFYSNIMNFFKTEITLANGEIRKRPLIETNGETGEIVWDKGRDFATVRKVLSMPQVNIVKKTEVQTGGFSKESILPKRNSDKLIARKKDWDPKKYGGFDSPTVAYSVLVVAKVEKGKSKKLKSVKELLGITIMERSSFEKNPIDFLEAKGYKEVKKDLIIKLPKYSLFELENGRKRMLASAGELQKGNELALPSKYVNFLYLASHYEKLKGSPEDNEQKQLFVEQHKHYLDEIIEQISEFSKRVILADANLDKVLSAYNKHRDKPIREQAENIIHLFTLTNLGAPAAFKYFDTTIDRKRYTSTKEVLDATLIHQSITGLYETRIDLSQLGGDGGGSSGSSGSSGSSGGTLNIEDEHRLHETSKEPDVSLGSTWLSDFPQAWAETGGMGLAVRQAPLIIPLKATSTPVSIKQYPMSQEARLGIKPHIQRLLDQGILVPCQSPWNTPLLPVKKPGTNDYRPVQDLREVNKRVEDIHPTVPNPYNLLSGLPPSHQWYTVLDLKDAFFCLRLHPTSQPLFAFEWRDPEMGISGQLTWTRLPQGFKNSPTLFNEALHRDLADFRIQHPDLILLQYVDDLLLAATSELDCQQGTRALLQTLGNLGYRASAKKAQICQKQVKYLGYLLKEGQRWLTEARKETVMGQPTPKTPRQLREFLGTAGFCRLWIPGFAEMAAPLYPLTKPGTLFNWGPDQQKAYQEIKQALLTAPALGLPDLTKPFELFVDEKQGYAKGVLTQKLGPWRRPVAYLSKKLDPVAAGWPPCLRMVAAIAVLTKDAGKLTMGQPLVILAPHAVEALVKQPPDRWLSNARMTHYQALLLDTDRVQFGPVVALNPATLLPLPEEGLQHNCLDILAEAHGTRPDLTDQPLPDADHTWYTDGSSLLQEGQRKAGAAVTTETEVIWAKALPAGTSAQRAELIALTQALKMAEGKKLNVYTDSRYAFATAHIHGEIYRRRGWLTSEGKEIKNKDEILALLKALFLPKRLSIIHCPGHQKGHSAEARGNRMADQAARKAAITETPDTSTLLAGKRTADGSEFEKRTADGSEFESPKKKAKVE

SEQ ID NO: 2729 - protein, 2095 aa, synthetic construct
MPAAKRVKLDGGDKKYSIGLDIGTNSVGWAVITDEYKVPSKKFKVLGNTDRHSIKKNLIGALLFDSGETAEATRLKRTARRRYTRRKNRICYLQEIFSNEMAKVDDSFFHRLEESFLVEEDKKHERHPIFGNIVDEVAYHEKYPTIYHLRKKLVDSTDKADLRLIYLALAHMIKFRGHFLIEGDLNPDNSDVDKLFIQLVQTYNQLFEENPINASGVDAKAILSARLSKSRRLENLIAQLPGEKKNGLFGNLIALSLGLTPNFKSNFDLAEDAKLQLSKDTYDDDLDNLLAQIGDQYADLFLAAKNLSDAILLSDILRVNTEITKAPLSASMIKRYDEHHQDLTLLKALVRQQLPEKYKEIFFDQSKNGYAGYIDGGASQEEFYKFIKPILEKMDGTEELLVKLNREDLLRKQRTFDNGSIPHQIHLGELHAILRRQEDFYPFLKDNREKIEKILTFRIPYYVGPLARGNSRFAWMTRKSEETITPWNFEEVVDKGASAQSFIERMTNFDKNLPNEKVLPKHSLLYEYFTVYNELTKVKYVTEGMRKPAFLSGEQKKAIVDLLFKTNRKVTVKQLKEDYFKKIECFDSVEISGVEDRFNASLGTYHDLLKIIKDKDFLDNEENEDILEDIVLTLTLFEDREMIEERLKTYAHLFDDKVMKQLKRRRYTGWGRLSRKLINGIRDKQSGKTILDFLKSDGFANRNFMQLIHDDSLTFKEDIQKAQVSGQGDSLHEHIANLAGSPAIKKGILQTVKVVDELVKVMGRHKPENIVIEMARENQTTQKGQKNSRERMKRIEEGIKELGSQILKEHPVENTQLQNEKLYLYYLQNGRDMYVDQELDINRLSDYDVDHIVPQSFLKDDSIDNKVLTRSDKARGKSDNVPSEEVVKKMKNYWRQLLNAKLITQRKFDNLTKAERGGLSELDKAGFIKRQLVETRQITKHVAQILDSRMNTKYDENDKLIREVKVITLKSKLVSDFRKDFQFYKVREINNYHHAHDAYLNAVVGTALIKKYPKLESEFVYGDYKVYDVRKMIAKSEQEIGKATAKYFFYSNIMNFFKTEITLANGEIRKRPLIETNGETGEIVWDKGRDFATVRKVLSMPQVNIVKKTEVQTGGFSKESILPKRNSDKLIARKKDWDPKKYGGFDSPTVAYSVLVVAKVEKGKSKKLKSVKELLGITIMERSSFEKNPIDFLEAKGYKEVKKDLIIKLPKYSLFELENGRKRMLASAGELQKGNELALPSKYVNFLYLASHYEKLKGSPEDNEQKQLFVEQHKHYLDEIIEQISEFSKRVILADANLDKVLSAYNKHRDKPIREQAENIIHLFTLTNLGAPAAFKYFDTTIDRKRYTSTKEVLDATLIHQSITGLYETRIDLSQLGGDGGEAAAKEAAAKGGTLNIEDEHRLHETSKEPDVSLGSTWLSDFPQAWAETGGMGLAVRQAPLIIPLKATSTPVSIKQYPMSQEARLGIKPHIQRLLDQGILVPCQSPWNTPLLPVKKPGTNDYRPVQDLREVNKRVEDIHPTVPNPYNLLSGLPPSHQWYTVLDLKDAFFCLRLHPTSQPLFAFEWRDPEMGISGQLTWTRLPQGFKNSPTLFNEALHRDLADFRIQHPDLILLQYVDDLLLAATSELDCQQGTRALLQTLGNLGYRASAKKAQICQKQVKYLGYLLKEGQRWLTEARKETVMGQPTPKTPRQLREFLGTAGFCRLWIPGFAEMAAPLYPLTKPGTLFNWGPDQQKAYQEIKQALLTAPALGLPDLTKPFELFVDEKQGYAKGVLTQKLGPWRRPVAYLSKKLDPVAAGWPPCLRMVAAIAVLTKDAGKLTMGQPLVILAPHAVEALVKQPPDRWLSNARMTHYQALLLDTDRVQFGPVVALNPATLLPLPEEGLQHNCLDILAEAHGTRPDLTDQPLPDADHTWYTDGSSLLQEGQRKAGAAVTTETEVIWAKALPAGTSAQRAELIALTQALKMAEGKKLNVYTDSRYAFATAHIHGEIYRRRGWLTSEGKEIKNKDEILALLKALFLPKRLSIIHCPGHQKGHSAEARGNRMADQAARKAAITETPDTSTLLAGKRTADGSEFEKRTADGSEFESPKKKAKVE

SEQ ID NO: 2730 - protein, 2090 aa, synthetic construct
MPAAKRVKLDGGDKKYSIGLDIGTNSVGWAVITDEYKVPSKKFKVLGNTDRHSIKKNLIGALLFDSGETAEATRLKRTARRRYTRRKNRICYLQEIFSNEMAKVDDSFFHRLEESFLVEEDKKHERHPIFGNIVDEVAYHEKYPTIYHLRKKLVDSTDKADLRLIYLALAHMIKFRGHFLIEGDLNPDNSDVDKLFIQLVQTYNQLFEENPINASGVDAKAILSARLSKSRRLENLIAQLPGEKKNGLFGNLIALSLGLTPNFKSNFDLAEDAKLQLSKDTYDDDLDNLLAQIGDQYADLFLAAKNLSDAILLSDILRVNTEITKAPLSASMIKRYDEHHQDLTLLKALVRQQLPEKYKEIFFDQSKNGYAGYIDGGASQEEFYKFIKPILEKMDGTEELLVKLNREDLLRKQRTFDNGSIPHQIHLGELHAILRRQEDFYPFLKDNREKIEKILTFRIPYYVGPLARGNSRFAWMTRKSEETITPWNFEEVVDKGASAQSFIERMTNFDKNLPNEKVLPKHSLLYEYFTVYNELTKVKYVTEGMRKPAFLSGEQKKAIVDLLFKTNRKVTVKQLKEDYFKKIECFDSVEISGVEDRFNASLGTYHDLLKIIKDKDFLDNEENEDILEDIVLTLTLFEDREMIEERLKTYAHLFDDKVMKQLKRRRYTGWGRLSRKLINGIRDKQSGKTILDFLKSDGFANRNFMQLIHDDSLTFKEDIQKAQVSGQGDSLHEHIANLAGSPAIKKGILQTVKVVDELVKVMGRHKPENIVIEMARENQTTQKGQKNSRERMKRIEEGIKELGSQILKEHPVENTQLQNEKLYLYYLQNGRDMYVDQELDINRLSDYDVDHIVPQSFLKDDSIDNKVLTRSDKARGKSDNVPSEEVVKKMKNYWRQLLNAKLITQRKFDNLTKAERGGLSELDKAGFIKRQLVETRQITKHVAQILDSRMNTKYDENDKLIREVKVITLKSKLVSDFRKDFQFYKVREINNYHHAHDAYLNAVVGTALIKKYPKLESEFVYGDYKVYDVRKMIAKSEQEIGKATAKYFFYSNIMNFFKTEITLANGEIRKRPLIETNGETGEIVWDKGRDFATVRKVLSMPQVNIVKKTEVQTGGFSKESILPKRNSDKLIARKKDWDPKKYGGFDSPTVAYSVLVVAKVEKGKSKKLKSVKELLGITIMERSSFEKNPIDFLEAKGYKEVKKDLIIKLPKYSLFELENGRKRMLASAGELQKGNELALPSKYVNFLYLASHYEKLKGSPEDNEQKQLFVEQHKHYLDEIIEQISEFSKRVILADANLDKVLSAYNKHRDKPIREQAENIIHLFTLTNLGAPAAFKYFDTTIDRKRYTSTKEVLDATLIHQSITGLYETRIDLSQLGGDGGEAAAKGGTLNIEDEHRLHETSKEPDVSLGSTWLSDFPQAWAETGGMGLAVRQAPLIIPLKATSTPVSIKQYPMSQEARLGIKPHIQRLLDQGILVPCQSPWNTPLLPVKKPGTNDYRPVQDLREVNKRVEDIHPTVPNPYNLLSGLPPSHQWYTVLDLKDAFFCLRLHPTSQPLFAFEWRDPEMGISGQLTWTRLPQGFKNSPTLFNEALHRDLADFRIQHPDLILLQYVDDLLLAATSELDCQQGTRALLQTLGNLGYRASAKKAQICQKQVKYLGYLLKEGQRWLTEARKETVMGQPTPKTPRQLREFLGTAGFCRLWIPGFAEMAAPLYPLTKPGTLFNWGPDQQKAYQEIKQALLTAPALGLPDLTKPFELFVDEKQGYAKGVLTQKLGPWRRPVAYLSKKLDPVAAGWPPCLRMVAAIAVLTKDAGKLTMGQPLVILAPHAVEALVKQPPDRWLSNARMTHYQALLLDTDRVQFGPVVALNPATLLPLPEEGLQHNCLDILAEAHGTRPDLTDQPLPDADHTWYTDGSSLLQEGQRKAGAAVTTETEVIWAKALPAGTSAQRAELIALTQALKMAEGKKLNVYTDSRYAFATAHIHGEIYRRRGWLTSEGKEIKNKDEILALLKALFLPKRLSIIHCPGHQKGHSAEARGNRMADQAARKAAITETPDTSTLLAGKRTADGSEFEKRTADGSEFESPKKKAKVE

SEQ ID NO: 2731 - protein, 2094 aa, synthetic construct
MPAAKRVKLDGGDKKYSIGLDIGTNSVGWAVITDEYKVPSKKFKVLGNTDRHSIKKNLIGALLFDSGETAEATRLKRTARRRYTRRKNRICYLQEIFSNEMAKVDDSFFHRLEESFLVEEDKKHERHPIFGNIVDEVAYHEKYPTIYHLRKKLVDSTDKADLRLIYLALAHMIKFRGHFLIEGDLNPDNSDVDKLFIQLVQTYNQLFEENPINASGVDAKAILSARLSKSRRLENLIAQLPGEKKNGLFGNLIALSLGLTPNFKSNFDLAEDAKLQLSKDTYDDDLDNLLAQIGDQYADLFLAAKNLSDAILLSDILRVNTEITKAPLSASMIKRYDEHHQDLTLLKALVRQQLPEKYKEIFFDQSKNGYAGYIDGGASQEEFYKFIKPILEKMDGTEELLVKLNREDLLRKQRTFDNGSIPHQIHLGELHAILRRQEDFYPFLKDNREKIEKILTFRIPYYVGPLARGNSRFAWMTRKSEETITPWNFEEVVDKGASAQSFIERMTNFDKNLPNEKVLPKHSLLYEYFTVYNELTKVKYVTEGMRKPAFLSGEQKKAIVDLLFKTNRKVTVKQLKEDYFKKIECFDSVEISGVEDRFNASLGTYHDLLKIIKDKDFLDNEENEDILEDIVLTLTLFEDREMIEERLKTYAHLFDDKVMKQLKRRRYTGWGRLSRKLINGIRDKQSGKTILDFLKSDGFANRNFMQLIHDDSLTFKEDIQKAQVSGQGDSLHEHIANLAGSPAIKKGILQTVKVVDELVKVMGRHKPENIVIEMARENQTTQKGQKNSRERMKRIEEGIKELGSQILKEHPVENTQLQNEKLYLYYLQNGRDMYVDQELDINRLSDYDVDHIVPQSFLKDDSIDNKVLTRSDKARGKSDNVPSEEVVKKMKNYWRQLLNAKLITQRKFDNLTKAERGGLSELDKAGFIKRQLVETRQITKHVAQILDSRMNTKYDENDKLIREVKVITLKSKLVSDFRKDFQFYKVREINNYHHAHDAYLNAVVGTALIKKYPKLESEFVYGDYKVYDVRKMIAKSEQEIGKATAKYFFYSNIMNFFKTEITLANGEIRKRPLIETNGETGEIVWDKGRDFATVRKVLSMPQVNIVKKTEVQTGGFSKESILPKRNSDKLIARKKDWDPKKYGGFDSPTVAYSVLVVAKVEKGKSKKLKSVKELLGITIMERSSFEKNPIDFLEAKGYKEVKKDLIIKLPKYSLFELENGRKRMLASAGELQKGNELALPSKYVNFLYLASHYEKLKGSPEDNEQKQLFVEQHKHYLDEIIEQISEFSKRVILADANLDKVLSAYNKHRDKPIREQAENIIHLFTLTNLGAPAAFKYFDTTIDRKRYTSTKEVLDATLIHQSITGLYETRIDLSQLGGDGGPAPAPAPAPGGTLNIEDEHRLHETSKEPDVSLGSTWLSDFPQAWAETGGMGLAVRQAPLIIPLKATSTPVSIKQYPMSQEARLGIKPHIQRLLDQGILVPCQSPWNTPLLPVKKPGTNDYRPVQDLREVNKRVEDIHPTVPNPYNLLSGLPPSHQWYTVLDLKDAFFCLRLHPTSQPLFAFEWRDPEMGISGQLTWTRLPQGFKNSPTLFNEALHRDLADFRIQHPDLILLQYVDDLLLAATSELDCQQGTRALLQTLGNLGYRASAKKAQICQKQVKYLGYLLKEGQRWLTEARKETVMGQPTPKTPRQLREFLGTAGFCRLWIPGFAEMAAPLYPLTKPGTLFNWGPDQQKAYQEIKQALLTAPALGLPDLTKPFELFVDEKQGYAKGVLTQKLGPWRRPVAYLSKKLDPVAAGWPPCLRMVAAIAVLTKDAGKLTMGQPLVILAPHAVEALVKQPPDRWLSNARMTHYQALLLDTDRVQFGPVVALNPATLLPLPEEGLQHNCLDILAEAHGTRPDLTDQPLPDADHTWYTDGSSLLQEGQRKAGAAVTTETEVIWAKALPAGTSAQRAELIALTQALKMAEGKKLNVYTDSRYAFATAHIHGEIYRRRGWLTSEGKEIKNKDEILALLKALFLPKRLSIIHCPGHQKGHSAEARGNRMADQAARKAAITETPDTSTLLAGKRTADGSEFEKRTADGSEFESPKKKAKVE

SEQ ID NO: 2732 - protein, 2096 aa, synthetic construct
MPAAKRVKLDGGDKKYSIGLDIGTNSVGWAVITDEYKVPSKKFKVLGNTDRHSIKKNLIGALLFDSGETAEATRLKRTARRRYTRRKNRICYLQEIFSNEMAKVDDSFFHRLEESFLVEEDKKHERHPIFGNIVDEVAYHEKYPTIYHLRKKLVDSTDKADLRLIYLALAHMIKFRGHFLIEGDLNPDNSDVDKLFIQLVQTYNQLFEENPINASGVDAKAILSARLSKSRRLENLIAQLPGEKKNGLFGNLIALSLGLTPNFKSNFDLAEDAKLQLSKDTYDDDLDNLLAQIGDQYADLFLAAKNLSDAILLSDILRVNTEITKAPLSASMIKRYDEHHQDLTLLKALVRQQLPEKYKEIFFDQSKNGYAGYIDGGASQEEFYKFIKPILEKMDGTEELLVKLNREDLLRKQRTFDNGSIPHQIHLGELHAILRRQEDFYPFLKDNREKIEKILTFRIPYYVGPLARGNSRFAWMTRKSEETITPWNFEEVVDKGASAQSFIERMTNFDKNLPNEKVLPKHSLLYEYFTVYNELTKVKYVTEGMRKPAFLSGEQKKAIVDLLFKTNRKVTVKQLKEDYFKKIECFDSVEISGVEDRFNASLGTYHDLLKIIKDKDFLDNEENEDILEDIVLTLTLFEDREMIEERLKTYAHLFDDKVMKQLKRRRYTGWGRLSRKLINGIRDKQSGKTILDFLKSDGFANRNFMQLIHDDSLTFKEDIQKAQVSGQGDSLHEHIANLAGSPAIKKGILQTVKVVDELVKVMGRHKPENIVIEMARENQTTQKGQKNSRERMKRIEEGIKELGSQILKEHPVENTQLQNEKLYLYYLQNGRDMYVDQELDINRLSDYDVDHIVPQSFLKDDSIDNKVLTRSDKARGKSDNVPSEEVVKKMKNYWRQLLNAKLITQRKFDNLTKAERGGLSELDKAGFIKRQLVETRQITKHVAQILDSRMNTKYDENDKLIREVKVITLKSKLVSDFRKDFQFYKVREINNYHHAHDAYLNAVVGTALIKKYPKLESEFVYGDYKVYDVRKMIAKSEQEIGKATAKYFFYSNIMNFFKTEITLANGEIRKRPLIETNGETGEIVWDKGRDFATVRKVLSMPQVNIVKKTEVQTGGFSKESILPKRNSDKLIARKKDWDPKKYGGFDSPTVAYSVLVVAKVEKGKSKKLKSVKELLGITIMERSSFEKNPIDFLEAKGYKEVKKDLIIKLPKYSLFELENGRKRMLASAGELQKGNELALPSKYVNFLYLASHYEKLKGSPEDNEQKQLFVEQHKHYLDEIIEQISEFSKRVILADANLDKVLSAYNKHRDKPIREQAENIIHLFTLTNLGAPAAFKYFDTTIDRKRYTSTKEVLDATLIHQSITGLYETRIDLSQLGGDGGGSSEAAAKGGGGGTLNIEDEHRLHETSKEPDVSLGSTWLSDFPQAWAETGGMGLAVRQAPLIIPLKATSTPVSIKQYPMSQEARLGIKPHIQRLLDQGILVPCQSPWNTPLLPVKKPGTNDYRPVQDLREVNKRVEDIHPTVPNPYNLLSGLPPSHQWYTVLDLKDAFFCLRLHPTSQPLFAFEWRDPEMGISGQLTWTRLPQGFKNSPTLFNEALHRDLADFRIQHPDLILLQYVDDLLLAATSELDCQQGTRALLQTLGNLGYRASAKKAQICQKQVKYLGYLLKEGQRWLTEARKETVMGQPTPKTPRQLREFLGTAGFCRLWIPGFAEMAAPLYPLTKPGTLFNWGPDQQKAYQEIKQALLTAPALGLPDLTKPFELFVDEKQGYAKGVLTQKLGPWRRPVAYLSKKLDPVAAGWPPCLRMVAAIAVLTKDAGKLTMGQPLVILAPHAVEALVKQPPDRWLSNARMTHYQALLLDTDRVQFGPVVALNPATLLPLPEEGLQHNCLDILAEAHGTRPDLTDQPLPDADHTWYTDGSSLLQEGQRKAGAAVTTETEVIWAKALPAGTSAQRAELIALTQALKMAEGKKLNVYTDSRYAFATAHIHGEIYRRRGWLTSEGKEIKNKDEILALLKALFLPKRLSIIHCPGHQKGHSAEARGNRMADQAARKAAITETPDTSTLLAGKRTADGSEFEKRTADGSEFESPKKKAKVE

SEQ ID NO: 2733 - protein, 2091 aa, synthetic construct
MPAAKRVKLDGGDKKYSIGLDIGTNSVGWAVITDEYKVPSKKFKVLGNTDRHSIKKNLIGALLFDSGETAEATRLKRTARRRYTRRKNRICYLQEIFSNEMAKVDDSFFHRLEESFLVEEDKKHERHPIFGNIVDEVAYHEKYPTIYHLRKKLVDSTDKADLRLIYLALAHMIKFRGHFLIEGDLNPDNSDVDKLFIQLVQTYNQLFEENPINASGVDAKAILSARLSKSRRLENLIAQLPGEKKNGLFGNLIALSLGLTPNFKSNFDLAEDAKLQLSKDTYDDDLDNLLAQIGDQYADLFLAAKNLSDAILLSDILRVNTEITKAPLSASMIKRYDEHHQDLTLLKALVRQQLPEKYKEIFFDQSKNGYAGYIDGGASQEEFYKFIKPILEKMDGTEELLVKLNREDLLRKQRTFDNGSIPHQIHLGELHAILRRQEDFYPFLKDNREKIEKILTFRIPYYVGPLARGNSRFAWMTRKSEETITPWNFEEVVDKGASAQSFIERMTNFDKNLPNEKVLPKHSLLYEYFTVYNELTKVKYVTEGMRKPAFLSGEQKKAIVDLLFKTNRKVTVKQLKEDYFKKIECFDSVEISGVEDRFNASLGTYHDLLKIIKDKDFLDNEENEDILEDIVLTLTLFEDREMIEERLKTYAHLFDDKVMKQLKRRRYTGWGRLSRKLINGIRDKQSGKTILDFLKSDGFANRNFMQLIHDDSLTFKEDIQKAQVSGQGDSLHEHIANLAGSPAIKKGILQTVKVVDELVKVMGRHKPENIVIEMARENQTTQKGQKNSRERMKRIEEGIKELGSQILKEHPVENTQLQNEKLYLYYLQNGRDMYVDQELDINRLSDYDVDHIVPQSFLKDDSIDNKVLTRSDKARGKSDNVPSEEVVKKMKNYWRQLLNAKLITQRKFDNLTKAERGGLSELDKAGFIKRQLVETRQITKHVAQILDSRMNTKYDENDKLIREVKVITLKSKLVSDFRKDFQFYKVREINNYHHAHDAYLNAVVGTALIKKYPKLESEFVYGDYKVYDVRKMIAKSEQEIGKATAKYFFYSNIMNFFKTEITLANGEIRKRPLIETNGETGEIVWDKGRDFATVRKVLSMPQVNIVKKTEVQTGGFSKESILPKRNSDKLIARKKDWDPKKYGGFDSPTVAYSVLVVAKVEKGKSKKLKSVKELLGITIMERSSFEKNPIDFLEAKGYKEVKKDLIIKLPKYSLFELENGRKRMLASAGELQKGNELALPSKYVNFLYLASHYEKLKGSPEDNEQKQLFVEQHKHYLDEIIEQISEFSKRVILADANLDKVLSAYNKHRDKPIREQAENIIHLFTLTNLGAPAAFKYFDTTIDRKRYTSTKEVLDATLIHQSITGLYETRIDLSQLGGDGGPAPGGSGGTLNIEDEHRLHETSKEPDVSLGSTWLSDFPQAWAETGGMGLAVRQAPLIIPLKATSTPVSIKQYPMSQEARLGIKPHIQRLLDQGILVPCQSPWNTPLLPVKKPGTNDYRPVQDLREVNKRVEDIHPTVPNPYNLLSGLPPSHQWYTVLDLKDAFFCLRLHPTSQPLFAFEWRDPEMGISGQLTWTRLPQGFKNSPTLFNEALHRDLADFRIQHPDLILLQYVDDLLLAATSELDCQQGTRALLQTLGNLGYRASAKKAQICQKQVKYLGYLLKEGQRWLTEARKETVMGQPTPKTPRQLREFLGTAGFCRLWIPGFAEMAAPLYPLTKPGTLFNWGPDQQKAYQEIKQALLTAPALGLPDLTKPFELFVDEKQGYAKGVLTQKLGPWRRPVAYLSKKLDPVAAGWPPCLRMVAAIAVLTKDAGKLTMGQPLVILAPHAVEALVKQPPDRWLSNARMTHYQALLLDTDRVQFGPVVALNPATLLPLPEEGLQHNCLDILAEAHGTRPDLTDQPLPDADHTWYTDGSSLLQEGQRKAGAAVTTETEVIWAKALPAGTSAQRAELIALTQALKMAEGKKLNVYTDSRYAFATAHIHGEIYRRRGWLTSEGKEIKNKDEILALLKALFLPKRLSIIHCPGHQKGHSAEARGNRMADQAARKAAITETPDTSTLLAGKRTADGSEFEKRTADGSEFESPKKKAKVE

SEQ ID NO: 2734 - protein, 2118 aa, synthetic construct
MPAAKRVKLDGGDKKYSIGLDIGTNSVGWAVITDEYKVPSKKFKVLGNTDRHSIKKNLIGALLFDSGETAEATRLKRTARRRYTRRKNRICYLQEIFSNEMAKVDDSFFHRLEESFLVEEDKKHERHPIFGNIVDEVAYHEKYPTIYHLRKKLVDSTDKADLRLIYLALAHMIKFRGHFLIEGDLNPDNSDVDKLFIQLVQTYNQLFEENPINASGVDAKAILSARLSKSRRLENLIAQLPGEKKNGLFGNLIALSLGLTPNFKSNFDLAEDAKLQLSKDTYDDDLDNLLAQIGDQYADLFLAAKNLSDAILLSDILRVNTEITKAPLSASMIKRYDEHHQDLTLLKALVRQQLPEKYKEIFFDQSKNGYAGYIDGGASQEEFYKFIKPILEKMDGTEELLVKLNREDLLRKQRTFDNGSIPHQIHLGELHAILRRQEDFYPFLKDNREKIEKILTFRIPYYVGPLARGNSRFAWMTRKSEETITPWNFEEVVDKGASAQSFIERMTNFDKNLPNEKVLPKHSLLYEYFTVYNELTKVKYVTEGMRKPAFLSGEQKKAIVDLLFKTNRKVTVKQLKEDYFKKIECFDSVEISGVEDRFNASLGTYHDLLKIIKDKDFLDNEENEDILEDIVLTLTLFEDREMIEERLKTYAHLFDDKVMKQLKRRRYTGWGRLSRKLINGIRDKQSGKTILDFLKSDGFANRNFMQLIHDDSLTFKEDIQKAQVSGQGDSLHEHIANLAGSPAIKKGILQTVKVVDELVKVMGRHKPENIVIEMARENQTTQKGQKNSRERMKRIEEGIKELGSQILKEHPVENTQLQNEKLYLYYLQNGRDMYVDQELDINRLSDYDVDHIVPQSFLKDDSIDNKVLTRSDKARGKSDNVPSEEVVKKMKNYWRQLLNAKLITQRKFDNLTKAERGGLSELDKAGFIKRQLVETRQITKHVAQILDSRMNTKYDENDKLIREVKVITLKSKLVSDFRKDFQFYKVREINNYHHAHDAYLNAVVGTALIKKYPKLESEFVYGDYKVYDVRKMIAKSEQEIGKATAKYFFYSNIMNFFKTEITLANGEIRKRPLIETNGETGEIVWDKGRDFATVRKVLSMPQVNIVKKTEVQTGGFSKESILPKRNSDKLIARKKDWDPKKYGGFDSPTVAYSVLVVAKVEKGKSKKLKSVKELLGITIMERSSFEKNPIDFLEAKGYKEVKKDLIIKLPKYSLFELENGRKRMLASAGELQKGNELALPSKYVNFLYLASHYEKLKGSPEDNEQKQLFVEQHKHYLDEIIEQISEFSKRVILADANLDKVLSAYNKHRDKPIREQAENIIHLFTLTNLGAPAAFKYFDTTIDRKRYTSTKEVLDATLIHQSITGLYETRIDLSQLGGDGGSGGSSGGSSGSETPGTSESATPESSGGSSGGSSGGTLNIEDEHRLHETSKEPDVSLGSTWLSDFPQAWAETGGMGLAVRQAPLIIPLKATSTPVSIKQYPMSQEARLGIKPHIQRLLDQGILVPCQSPWNTPLLPVKKPGTNDYRPVQDLREVNKRVEDIHPTVPNPYNLLSGLPPSHQWYTVLDLKDAFFCLRLHPTSQPLFAFEWRDPEMGISGQLTWTRLPQGFKNSPTLFNEALHRDLADFRIQHPDLILLQYVDDLLLAATSELDCQQGTRALLQTLGNLGYRASAKKAQICQKQVKYLGYLLKEGQRWLTEARKETVMGQPTPKTPRQLREFLGTAGFCRLWIPGFAEMAAPLYPLTKPGTLFNWGPDQQKAYQEIKQALLTAPALGLPDLTKPFELFVDEKQGYAKGVLTQKLGPWRRPVAYLSKKLDPVAAGWPPCLRMVAAIAVLTKDAGKLTMGQPLVILAPHAVEALVKQPPDRWLSNARMTHYQALLLDTDRVQFGPVVALNPATLLPLPEEGLQHNCLDILAEAHGTRPDLTDQPLPDADHTWYTDGSSLLQEGQRKAGAAVTTETEVIWAKALPAGTSAQRAELIALTQALKMAEGKKLNVYTDSRYAFATAHIHGEIYRRRGWLTSEGKEIKNKDEILALLKALFLPKRLSIIHCPGHQKGHSAEARGNRMADQAARKAAITETPDTSTLLAGKRTADGSEFEKRTADGSEFESPKKKAKVE

SEQ ID NO: 2735 - protein, 2091 aa, synthetic construct
MPAAKRVKLDGGDKKYSIGLDIGTNSVGWAVITDEYKVPSKKFKVLGNTDRHSIKKNLIGALLFDSGETAEATRLKRTARRRYTRRKNRICYLQEIFSNEMAKVDDSFFHRLEESFLVEEDKKHERHPIFGNIVDEVAYHEKYPTIYHLRKKLVDSTDKADLRLIYLALAHMIKFRGHFLIEGDLNPDNSDVDKLFIQLVQTYNQLFEENPINASGVDAKAILSARLSKSRRLENLIAQLPGEKKNGLFGNLIALSLGLTPNFKSNFDLAEDAKLQLSKDTYDDDLDNLLAQIGDQYADLFLAAKNLSDAILLSDILRVNTEITKAPLSASMIKRYDEHHQDLTLLKALVRQQLPEKYKEIFFDQSKNGYAGYIDGGASQEEFYKFIKPILEKMDGTEELLVKLNREDLLRKQRTFDNGSIPHQIHLGELHAILRRQEDFYPFLKDNREKIEKILTFRIPYYVGPLARGNSRFAWMTRKSEETITPWNFEEVVDKGASAQSFIERMTNFDKNLPNEKVLPKHSLLYEYFTVYNELTKVKYVTEGMRKPAFLSGEQKKAIVDLLFKTNRKVTVKQLKEDYFKKIECFDSVEISGVEDRFNASLGTYHDLLKIIKDKDFLDNEENEDILEDIVLTLTLFEDREMIEERLKTYAHLFDDKVMKQLKRRRYTGWGRLSRKLINGIRDKQSGKTILDFLKSDGFANRNFMQLIHDDSLTFKEDIQKAQVSGQGDSLHEHIANLAGSPAIKKGILQTVKVVDELVKVMGRHKPENIVIEMARENQTTQKGQKNSRERMKRIEEGIKELGSQILKEHPVENTQLQNEKLYLYYLQNGRDMYVDQELDINRLSDYDVDHIVPQSFLKDDSIDNKVLTRSDKARGKSDNVPSEEVVKKMKNYWRQLLNAKLITQRKFDNLTKAERGGLSELDKAGFIKRQLVETRQITKHVAQILDSRMNTKYDENDKLIREVKVITLKSKLVSDFRKDFQFYKVREINNYHHAHDAYLNAVVGTALIKKYPKLESEFVYGDYKVYDVRKMIAKSEQEIGKATAKYFFYSNIMNFFKTEITLANGEIRKRPLIETNGETGEIVWDKGRDFATVRKVLSMPQVNIVKKTEVQTGGFSKESILPKRNSDKLIARKKDWDPKKYGGFDSPTVAYSVLVVAKVEKGKSKKLKSVKELLGITIMERSSFEKNPIDFLEAKGYKEVKKDLIIKLPKYSLFELENGRKRMLASAGELQKGNELALPSKYVNFLYLASHYEKLKGSPEDNEQKQLFVEQHKHYLDEIIEQISEFSKRVILADANLDKVLSAYNKHRDKPIREQAENIIHLFTLTNLGAPAAFKYFDTTIDRKRYTSTKEVLDATLIHQSITGLYETRIDLSQLGGDGGGGSPAPGGTLNIEDEHRLHETSKEPDVSLGSTWLSDFPQAWAETGGMGLAVRQAPLIIPLKATSTPVSIKQYPMSQEARLGIKPHIQRLLDQGILVPCQSPWNTPLLPVKKPGTNDYRPVQDLREVNKRVEDIHPTVPNPYNLLSGLPPSHQWYTVLDLKDAFFCLRLHPTSQPLFAFEWRDPEMGISGQLTWTRLPQGFKNSPTLFNEALHRDLADFRIQHPDLILLQYVDDLLLAATSELDCQQGTRALLQTLGNLGYRASAKKAQICQKQVKYLGYLLKEGQRWLTEARKETVMGQPTPKTPRQLREFLGTAGFCRLWIPGFAEMAAPLYPLTKPGTLFNWGPDQQKAYQEIKQALLTAPALGLPDLTKPFELFVDEKQGYAKGVLTQKLGPWRRPVAYLSKKLDPVAAGWPPCLRMVAAIAVLTKDAGKLTMGQPLVILAPHAVEALVKQPPDRWLSNARMTHYQALLLDTDRVQFGPVVALNPATLLPLPEEGLQHNCLDILAEAHGTRPDLTDQPLPDADHTWYTDGSSLLQEGQRKAGAAVTTETEVIWAKALPAGTSAQRAELIALTQALKMAEGKKLNVYTDSRYAFATAHIHGEIYRRRGWLTSEGKEIKNKDEILALLKALFLPKRLSIIHCPGHQKGHSAEARGNRMADQAARKAAITETPDTSTLLAGKRTADGSEFEKRTADGSEFESPKKKAKVE

SEQ ID NO: 2736 - protein, 2100 aa, synthetic construct
MPAAKRVKLDGGDKKYSIGLDIGTNSVGWAVITDEYKVPSKKFKVLGNTDRHSIKKNLIGALLFDSGETAEATRLKRTARRRYTRRKNRICYLQEIFSNEMAKVDDSFFHRLEESFLVEEDKKHERHPIFGNIVDEVAYHEKYPTIYHLRKKLVDSTDKADLRLIYLALAHMIKFRGHFLIEGDLNPDNSDVDKLFIQLVQTYNQLFEENPINASGVDAKAILSARLSKSRRLENLIAQLPGEKKNGLFGNLIALSLGLTPNFKSNFDLAEDAKLQLSKDTYDDDLDNLLAQIGDQYADLFLAAKNLSDAILLSDILRVNTEITKAPLSASMIKRYDEHHQDLTLLKALVRQQLPEKYKEIFFDQSKNGYAGYIDGGASQEEFYKFIKPILEKMDGTEELLVKLNREDLLRKQRTFDNGSIPHQIHLGELHAILRRQEDFYPFLKDNREKIEKILTFRIPYYVGPLARGNSRFAWMTRKSEETITPWNFEEVVDKGASAQSFIERMTNFDKNLPNEKVLPKHSLLYEYFTVYNELTKVKYVTEGMRKPAFLSGEQKKAIVDLLFKTNRKVTVKQLKEDYFKKIECFDSVEISGVEDRFNASLGTYHDLLKIIKDKDFLDNEENEDILEDIVLTLTLFEDREMIEERLKTYAHLFDDKVMKQLKRRRYTGWGRLSRKLINGIRDKQSGKTILDFLKSDGFANRNFMQLIHDDSLTFKEDIQKAQVSGQGDSLHEHIANLAGSPAIKKGILQTVKVVDELVKVMGRHKPENIVIEMARENQTTQKGQKNSRERMKRIEEGIKELGSQILKEHPVENTQLQNEKLYLYYLQNGRDMYVDQELDINRLSDYDVDHIVPQSFLKDDSIDNKVLTRSDKARGKSDNVPSEEVVKKMKNYWRQLLNAKLITQRKFDNLTKAERGGLSELDKAGFIKRQLVETRQITKHVAQILDSRMNTKYDENDKLIREVKVITLKSKLVSDFRKDFQFYKVREINNYHHAHDAYLNAVVGTALIKKYPKLESEFVYGDYKVYDVRKMIAKSEQEIGKATAKYFFYSNIMNFFKTEITLANGEIRKRPLIETNGETGEIVWDKGRDFATVRKVLSMPQVNIVKKTEVQTGGFSKESILPKRNSDKLIARKKDWDPKKYGGFDSPTVAYSVLVVAKVEKGKSKKLKSVKELLGITIMERSSFEKNPIDFLEAKGYKEVKKDLIIKLPKYSLFELENGRKRMLASAGELQKGNELALPSKYVNFLYLASHYEKLKGSPEDNEQKQLFVEQHKHYLDEIIEQISEFSKRVILADANLDKVLSAYNKHRDKPIREQAENIIHLFTLTNLGAPAAFKYFDTTIDRKRYTSTKEVLDATLIHQSITGLYETRIDLSQLGGDGGGGGGSGGGGSGGGGSGGTLNIEDEHRLHETSKEPDVSLGSTWLSDFPQAWAETGGMGLAVRQAPLIIPLKATSTPVSIKQYPMSQEARLGIKPHIQRLLDQGILVPCQSPWNTPLLPVKKPGTNDYRPVQDLREVNKRVEDIHPTVPNPYNLLSGLPPSHQWYTVLDLKDAFFCLRLHPTSQPLFAFEWRDPEMGISGQLTWTRLPQGFKNSPTLFNEALHRDLADFRIQHPDLILLQYVDDLLLAATSELDCQQGTRALLQTLGNLGYRASAKKAQICQKQVKYLGYLLKEGQRWLTEARKETVMGQPTPKTPRQLREFLGTAGFCRLWIPGFAEMAAPLYPLTKPGTLFNWGPDQQKAYQEIKQALLTAPALGLPDLTKPFELFVDEKQGYAKGVLTQKLGPWRRPVAYLSKKLDPVAAGWPPCLRMVAAIAVLTKDAGKLTMGQPLVILAPHAVEALVKQPPDRWLSNARMTHYQALLLDTDRVQFGPVVALNPATLLPLPEEGLQHNCLDILAEAHGTRPDLTDQPLPDADHTWYTDGSSLLQEGQRKAGAAVTTETEVIWAKALPAGTSAQRAELIALTQALKMAEGKKLNVYTDSRYAFATAHIHGEIYRRRGWLTSEGKEIKNKDEILALLKALFLPKRLSIIHCPGHQKGHSAEARGNRMADQAARKAAITETPDTSTLLAGKRTADGSEFEKRTADGSEFESPKKKAKVE

SEQ ID NO: 2737 - protein, 2093 aa, synthetic construct
MPAAKRVKLDGGDKKYSIGLDIGTNSVGWAVITDEYKVPSKKFKVLGNTDRHSIKKNLIGALLFDSGETAEATRLKRTARRRYTRRKNRICYLQEIFSNEMAKVDDSFFHRLEESFLVEEDKKHERHPIFGNIVDEVAYHEKYPTIYHLRKKLVDSTDKADLRLIYLALAHMIKFRGHFLIEGDLNPDNSDVDKLFIQLVQTYNQLFEENPINASGVDAKAILSARLSKSRRLENLIAQLPGEKKNGLFGNLIALSLGLTPNFKSNFDLAEDAKLQLSKDTYDDDLDNLLAQIGDQYADLFLAAKNLSDAILLSDILRVNTEITKAPLSASMIKRYDEHHQDLTLLKALVRQQLPEKYKEIFFDQSKNGYAGYIDGGASQEEFYKFIKPILEKMDGTEELLVKLNREDLLRKQRTFDNGSIPHQIHLGELHAILRRQEDFYPFLKDNREKIEKILTFRIPYYVGPLARGNSRFAWMTRKSEETITPWNFEEVVDKGASAQSFIERMTNFDKNLPNEKVLPKHSLLYEYFTVYNELTKVKYVTEGMRKPAFLSGEQKKAIVDLLFKTNRKVTVKQLKEDYFKKIECFDSVEISGVEDRFNASLGTYHDLLKIIKDKDFLDNEENEDILEDIVLTLTLFEDREMIEERLKTYAHLFDDKVMKQLKRRRYTGWGRLSRKLINGIRDKQSGKTILDFLKSDGFANRNFMQLIHDDSLTFKEDIQKAQVSGQGDSLHEHIANLAGSPAIKKGILQTVKVVDELVKVMGRHKPENIVIEMARENQTTQKGQKNSRERMKRIEEGIKELGSQILKEHPVENTQLQNEKLYLYYLQNGRDMYVDQELDINRLSDYDVDHIVPQSFLKDDSIDNKVLTRSDKARGKSDNVPSEEVVKKMKNYWRQLLNAKLITQRKFDNLTKAERGGLSELDKAGFIKRQLVETRQITKHVAQILDSRMNTKYDENDKLIREVKVITLKSKLVSDFRKDFQFYKVREINNYHHAHDAYLNAVVGTALIKKYPKLESEFVYGDYKVYDVRKMIAKSEQEIGKATAKYFFYSNIMNFFKTEITLANGEIRKRPLIETNGETGEIVWDKGRDFATVRKVLSMPQVNIVKKTEVQTGGFSKESILPKRNSDKLIARKKDWDPKKYGGFDSPTVAYSVLVVAKVEKGKSKKLKSVKELLGITIMERSSFEKNPIDFLEAKGYKEVKKDLIIKLPKYSLFELENGRKRMLASAGELQKGNELALPSKYVNFLYLASHYEKLKGSPEDNEQKQLFVEQHKHYLDEIIEQISEFSKRVILADANLDKVLSAYNKHRDKPIREQAENIIHLFTLTNLGAPAAFKYFDTTIDRKRYTSTKEVLDATLIHQSITGLYETRIDLSQLGGDGGEAAAKGSSGGTLNIEDEHRLHETSKEPDVSLGSTWLSDFPQAWAETGGMGLAVRQAPLIIPLKATSTPVSIKQYPMSQEARLGIKPHIQRLLDQGILVPCQSPWNTPLLPVKKPGTNDYRPVQDLREVNKRVEDIHPTVPNPYNLLSGLPPSHQWYTVLDLKDAFFCLRLHPTSQPLFAFEWRDPEMGISGQLTWTRLPQGFKNSPTLFNEALHRDLADFRIQHPDLILLQYVDDLLLAATSELDCQQGTRALLQTLGNLGYRASAKKAQICQKQVKYLGYLLKEGQRWLTEARKETVMGQPTPKTPRQLREFLGTAGFCRLWIPGFAEMAAPLYPLTKPGTLFNWGPDQQKAYQEIKQALLTAPALGLPDLTKPFELFVDEKQGYAKGVLTQKLGPWRRPVAYLSKKLDPVAAGWPPCLRMVAAIAVLTKDAGKLTMGQPLVILAPHAVEALVKQPPDRWLSNARMTHYQALLLDTDRVQFGPVVALNPATLLPLPEEGLQHNCLDILAEAHGTRPDLTDQPLPDADHTWYTDGSSLLQEGQRKAGAAVTTETEVIWAKALPAGTSAQRAELIALTQALKMAEGKKLNVYTDSRYAFATAHIHGEIYRRRGWLTSEGKEIKNKDEILALLKALFLPKRLSIIHCPGHQKGHSAEARGNRMADQAARKAAITETPDTSTLLAGKRTADGSEFEKRTADGSEFESPKKKAKVE

SEQ ID NO: 2738 - protein, 2094 aa, synthetic construct
MPAAKRVKLDGGDKKYSIGLDIGTNSVGWAVITDEYKVPSKKFKVLGNTDRHSIKKNLIGALLFDSGETAEATRLKRTARRRYTRRKNRICYLQEIFSNEMAKVDDSFFHRLEESFLVEEDKKHERHPIFGNIVDEVAYHEKYPTIYHLRKKLVDSTDKADLRLIYLALAHMIKFRGHFLIEGDLNPDNSDVDKLFIQLVQTYNQLFEENPINASGVDAKAILSARLSKSRRLENLIAQLPGEKKNGLFGNLIALSLGLTPNFKSNFDLAEDAKLQLSKDTYDDDLDNLLAQIGDQYADLFLAAKNLSDAILLSDILRVNTEITKAPLSASMIKRYDEHHQDLTLLKALVRQQLPEKYKEIFFDQSKNGYAGYIDGGASQEEFYKFIKPILEKMDGTEELLVKLNREDLLRKQRTFDNGSIPHQIHLGELHAILRRQEDFYPFLKDNREKIEKILTFRIPYYVGPLARGNSRFAWMTRKSEETITPWNFEEVVDKGASAQSFIERMTNFDKNLPNEKVLPKHSLLYEYFTVYNELTKVKYVTEGMRKPAFLSGEQKKAIVDLLFKTNRKVTVKQLKEDYFKKIECFDSVEISGVEDRFNASLGTYHDLLKIIKDKDFLDNEENEDILEDIVLTLTLFEDREMIEERLKTYAHLFDDKVMKQLKRRRYTGWGRLSRKLINGIRDKQSGKTILDFLKSDGFANRNFMQLIHDDSLTFKEDIQKAQVSGQGDSLHEHIANLAGSPAIKKGILQTVKVVDELVKVMGRHKPENIVIEMARENQTTQKGQKNSRERMKRIEEGIKELGSQILKEHPVENTQLQNEKLYLYYLQNGRDMYVDQELDINRLSDYDVDHIVPQSFLKDDSIDNKVLTRSDKARGKSDNVPSEEVVKKMKNYWRQLLNAKLITQRKFDNLTKAERGGLSELDKAGFIKRQLVETRQITKHVAQILDSRMNTKYDENDKLIREVKVITLKSKLVSDFRKDFQFYKVREINNYHHAHDAYLNAVVGTALIKKYPKLESEFVYGDYKVYDVRKMIAKSEQEIGKATAKYFFYSNIMNFFKTEITLANGEIRKRPLIETNGETGEIVWDKGRDFATVRKVLSMPQVNIVKKTEVQTGGFSKESILPKRNSDKLIARKKDWDPKKYGGFDSPTVAYSVLVVAKVEKGKSKKLKSVKELLGITIMERSSFEKNPIDFLEAKGYKEVKKDLIIKLPKYSLFELENGRKRMLASAGELQKGNELALPSKYVNFLYLASHYEKLKGSPEDNEQKQLFVEQHKHYLDEIIEQISEFSKRVILADANLDKVLSAYNKHRDKPIREQAENIIHLFTLTNLGAPAAFKYFDTTIDRKRYTSTKEVLDATLIHQSITGLYETRIDLSQLGGDGGPAPGGGGGSGGTLNIEDEHRLHETSKEPDVSLGSTWLSDFPQAWAETGGMGLAVRQAPLIIPLKATSTPVSIKQYPMSQEARLGIKPHIQRLLDQGILVPCQSPWNTPLLPVKKPGTNDYRPVQDLREVNKRVEDIHPTVPNPYNLLSGLPPSHQWYTVLDLKDAFFCLRLHPTSQPLFAFEWRDPEMGISGQLTWTRLPQGFKNSPTLFNEALHRDLADFRIQHPDLILLQYVDDLLLAATSELDCQQGTRALLQTLGNLGYRASAKKAQICQKQVKYLGYLLKEGQRWLTEARKETVMGQPTPKTPRQLREFLGTAGFCRLWIPGFAEMAAPLYPLTKPGTLFNWGPDQQKAYQEIKQALLTAPALGLPDLTKPFELFVDEKQGYAKGVLTQKLGPWRRPVAYLSKKLDPVAAGWPPCLRMVAAIAVLTKDAGKLTMGQPLVILAPHAVEALVKQPPDRWLSNARMTHYQALLLDTDRVQFGPVVALNPATLLPLPEEGLQHNCLDILAEAHGTRPDLTDQPLPDADHTWYTDGSSLLQEGQRKAGAAVTTETEVIWAKALPAGTSAQRAELIALTQALKMAEGKKLNVYTDSRYAFATAHIHGEIYRRRGWLTSEGKEIKNKDEILALLKALFLPKRLSIIHCPGHQKGHSAEARGNRMADQAARKAAITETPDTSTLLAGKRTADGSEFEKRTADGSEFESPKKKAKVE

SEQ ID NO: 2739 - protein, 2093 aa, synthetic construct
MPAAKRVKLDGGDKKYSIGLDIGTNSVGWAVITDEYKVPSKKFKVLGNTDRHSIKKNLIGALLFDSGETAEATRLKRTARRRYTRRKNRICYLQEIFSNEMAKVDDSFFHRLEESFLVEEDKKHERHPIFGNIVDEVAYHEKYPTIYHLRKKLVDSTDKADLRLIYLALAHMIKFRGHFLIEGDLNPDNSDVDKLFIQLVQTYNQLFEENPINASGVDAKAILSARLSKSRRLENLIAQLPGEKKNGLFGNLIALSLGLTPNFKSNFDLAEDAKLQLSKDTYDDDLDNLLAQIGDQYADLFLAAKNLSDAILLSDILRVNTEITKAPLSASMIKRYDEHHQDLTLLKALVRQQLPEKYKEIFFDQSKNGYAGYIDGGASQEEFYKFIKPILEKMDGTEELLVKLNREDLLRKQRTFDNGSIPHQIHLGELHAILRRQEDFYPFLKDNREKIEKILTFRIPYYVGPLARGNSRFAWMTRKSEETITPWNFEEVVDKGASAQSFIERMTNFDKNLPNEKVLPKHSLLYEYFTVYNELTKVKYVTEGMRKPAFLSGEQKKAIVDLLFKTNRKVTVKQLKEDYFKKIECFDSVEISGVEDRFNASLGTYHDLLKIIKDKDFLDNEENEDILEDIVLTLTLFEDREMIEERLKTYAHLFDDKVMKQLKRRRYTGWGRLSRKLINGIRDKQSGKTILDFLKSDGFANRNFMQLIHDDSLTFKEDIQKAQVSGQGDSLHEHIANLAGSPAIKKGILQTVKVVDELVKVMGRHKPENIVIEMARENQTTQKGQKNSRERMKRIEEGIKELGSQILKEHPVENTQLQNEKLYLYYLQNGRDMYVDQELDINRLSDYDVDHIVPQSFLKDDSIDNKVLTRSDKARGKSDNVPSEEVVKKMKNYWRQLLNAKLITQRKFDNLTKAERGGLSELDKAGFIKRQLVETRQITKHVAQILDSRMNTKYDENDKLIREVKVITLKSKLVSDFRKDFQFYKVREINNYHHAHDAYLNAVVGTALIKKYPKLESEFVYGDYKVYDVRKMIAKSEQEIGKATAKYFFYSNIMNFFKTEITLANGEIRKRPLIETNGETGEIVWDKGRDFATVRKVLSMPQVNIVKKTEVQTGGFSKESILPKRNSDKLIARKKDWDPKKYGGFDSPTVAYSVLVVAKVEKGKSKKLKSVKELLGITIMERSSFEKNPIDFLEAKGYKEVKKDLIIKLPKYSLFELENGRKRMLASAGELQKGNELALPSKYVNFLYLASHYEKLKGSPEDNEQKQLFVEQHKHYLDEIIEQISEFSKRVILADANLDKVLSAYNKHRDKPIREQAENIIHLFTLTNLGAPAAFKYFDTTIDRKRYTSTKEVLDATLIHQSITGLYETRIDLSQLGGDGGGGGGGGGGGGTLNIEDEHRLHETSKEPDVSLGSTWLSDFPQAWAETGGMGLAVRQAPLIIPLKATSTPVSIKQYPMSQEARLGIKPHIQRLLDQGILVPCQSPWNTPLLPVKKPGTNDYRPVQDLREVNKRVEDIHPTVPNPYNLLSGLPPSHQWYTVLDLKDAFFCLRLHPTSQPLFAFEWRDPEMGISGQLTWTRLPQGFKNSPTLFNEALHRDLADFRIQHPDLILLQYVDDLLLAATSELDCQQGTRALLQTLGNLGYRASAKKAQICQKQVKYLGYLLKEGQRWLTEARKETVMGQPTPKTPRQLREFLGTAGFCRLWIPGFAEMAAPLYPLTKPGTLFNWGPDQQKAYQEIKQALLTAPALGLPDLTKPFELFVDEKQGYAKGVLTQKLGPWRRPVAYLSKKLDPVAAGWPPCLRMVAAIAVLTKDAGKLTMGQPLVILAPHAVEALVKQPPDRWLSNARMTHYQALLLDTDRVQFGPVVALNPATLLPLPEEGLQHNCLDILAEAHGTRPDLTDQPLPDADHTWYTDGSSLLQEGQRKAGAAVTTETEVIWAKALPAGTSAQRAELIALTQALKMAEGKKLNVYTDSRYAFATAHIHGEIYRRRGWLTSEGKEIKNKDEILALLKALFLPKRLSIIHCPGHQKGHSAEARGNRMADQAARKAAITETPDTSTLLAGKRTADGSEFEKRTADGSEFESPKKKAKVE

SEQ ID NO: 2740 - protein, 2093 aa, synthetic construct
MPAAKRVKLDGGDKKYSIGLDIGTNSVGWAVITDEYKVPSKKFKVLGNTDRHSIKKNLIGALLFDSGETAEATRLKRTARRRYTRRKNRICYLQEIFSNEMAKVDDSFFHRLEESFLVEEDKKHERHPIFGNIVDEVAYHEKYPTIYHLRKKLVDSTDKADLRLIYLALAHMIKFRGHFLIEGDLNPDNSDVDKLFIQLVQTYNQLFEENPINASGVDAKAILSARLSKSRRLENLIAQLPGEKKNGLFGNLIALSLGLTPNFKSNFDLAEDAKLQLSKDTYDDDLDNLLAQIGDQYADLFLAAKNLSDAILLSDILRVNTEITKAPLSASMIKRYDEHHQDLTLLKALVRQQLPEKYKEIFFDQSKNGYAGYIDGGASQEEFYKFIKPILEKMDGTEELLVKLNREDLLRKQRTFDNGSIPHQIHLGELHAILRRQEDFYPFLKDNREKIEKILTFRIPYYVGPLARGNSRFAWMTRKSEETITPWNFEEVVDKGASAQSFIERMTNFDKNLPNEKVLPKHSLLYEYFTVYNELTKVKYVTEGMRKPAFLSGEQKKAIVDLLFKTNRKVTVKQLKEDYFKKIECFDSVEISGVEDRFNASLGTYHDLLKIIKDKDFLDNEENEDILEDIVLTLTLFEDREMIEERLKTYAHLFDDKVMKQLKRRRYTGWGRLSRKLINGIRDKQSGKTILDFLKSDGFANRNFMQLIHDDSLTFKEDIQKAQVSGQGDSLHEHIANLAGSPAIKKGILQTVKVVDELVKVMGRHKPENIVIEMARENQTTQKGQKNSRERMKRIEEGIKELGSQILKEHPVENTQLQNEKLYLYYLQNGRDMYVDQELDINRLSDYDVDHIVPQSFLKDDSIDNKVLTRSDKARGKSDNVPSEEVVKKMKNYWRQLLNAKLITQRKFDNLTKAERGGLSELDKAGFIKRQLVETRQITKHVAQILDSRMNTKYDENDKLIREVKVITLKSKLVSDFRKDFQFYKVREINNYHHAHDAYLNAVVGTALIKKYPKLESEFVYGDYKVYDVRKMIAKSEQEIGKATAKYFFYSNIMNFFKTEITLANGEIRKRPLIETNGETGEIVWDKGRDFATVRKVLSMPQVNIVKKTEVQTGGFSKESILPKRNSDKLIARKKDWDPKKYGGFDSPTVAYSVLVVAKVEKGKSKKLKSVKELLGITIMERSSFEKNPIDFLEAKGYKEVKKDLIIKLPKYSLFELENGRKRMLASAGELQKGNELALPSKYVNFLYLASHYEKLKGSPEDNEQKQLFVEQHKHYLDEIIEQISEFSKRVILADANLDKVLSAYNKHRDKPIREQAENIIHLFTLTNLGAPAAFKYFDTTIDRKRYTSTKEVLDATLIHQSITGLYETRIDLSQLGGDGGPAPEAAAKGGTLNIEDEHRLHETSKEPDVSLGSTWLSDFPQAWAETGGMGLAVRQAPLIIPLKATSTPVSIKQYPMSQEARLGIKPHIQRLLDQGILVPCQSPWNTPLLPVKKPGTNDYRPVQDLREVNKRVEDIHPTVPNPYNLLSGLPPSHQWYTVLDLKDAFFCLRLHPTSQPLFAFEWRDPEMGISGQLTWTRLPQGFKNSPTLFNEALHRDLADFRIQHPDLILLQYVDDLLLAATSELDCQQGTRALLQTLGNLGYRASAKKAQICQKQVKYLGYLLKEGQRWLTEARKETVMGQPTPKTPRQLREFLGTAGFCRLWIPGFAEMAAPLYPLTKPGTLFNWGPDQQKAYQEIKQALLTAPALGLPDLTKPFELFVDEKQGYAKGVLTQKLGPWRRPVAYLSKKLDPVAAGWPPCLRMVAAIAVLTKDAGKLTMGQPLVILAPHAVEALVKQPPDRWLSNARMTHYQALLLDTDRVQFGPVVALNPATLLPLPEEGLQHNCLDILAEAHGTRPDLTDQPLPDADHTWYTDGSSLLQEGQRKAGAAVTTETEVIWAKALPAGTSAQRAELIALTQALKMAEGKKLNVYTDSRYAFATAHIHGEIYRRRGWLTSEGKEIKNKDEILALLKALFLPKRLSIIHCPGHQKGHSAEARGNRMADQAARKAAITETPDTSTLLAGKRTADGSEFEKRTADGSEFESPKKKAKVE

SEQ ID NO: 2741 - protein, 2115 aa, synthetic construct
MPAAKRVKLDGGDKKYSIGLDIGTNSVGWAVITDEYKVPSKKFKVLGNTDRHSIKKNLIGALLFDSGETAEATRLKRTARRRYTRRKNRICYLQEIFSNEMAKVDDSFFHRLEESFLVEEDKKHERHPIFGNIVDEVAYHEKYPTIYHLRKKLVDSTDKADLRLIYLALAHMIKFRGHFLIEGDLNPDNSDVDKLFIQLVQTYNQLFEENPINASGVDAKAILSARLSKSRRLENLIAQLPGEKKNGLFGNLIALSLGLTPNFKSNFDLAEDAKLQLSKDTYDDDLDNLLAQIGDQYADLFLAAKNLSDAILLSDILRVNTEITKAPLSASMIKRYDEHHQDLTLLKALVRQQLPEKYKEIFFDQSKNGYAGYIDGGASQEEFYKFIKPILEKMDGTEELLVKLNREDLLRKQRTFDNGSIPHQIHLGELHAILRRQEDFYPFLKDNREKIEKILTFRIPYYVGPLARGNSRFAWMTRKSEETITPWNFEEVVDKGASAQSFIERMTNFDKNLPNEKVLPKHSLLYEYFTVYNELTKVKYVTEGMRKPAFLSGEQKKAIVDLLFKTNRKVTVKQLKEDYFKKIECFDSVEISGVEDRFNASLGTYHDLLKIIKDKDFLDNEENEDILEDIVLTLTLFEDREMIEERLKTYAHLFDDKVMKQLKRRRYTGWGRLSRKLINGIRDKQSGKTILDFLKSDGFANRNFMQLIHDDSLTFKEDIQKAQVSGQGDSLHEHIANLAGSPAIKKGILQTVKVVDELVKVMGRHKPENIVIEMARENQTTQKGQKNSRERMKRIEEGIKELGSQILKEHPVENTQLQNEKLYLYYLQNGRDMYVDQELDINRLSDYDVDHIVPQSFLKDDSIDNKVLTRSDKARGKSDNVPSEEVVKKMKNYWRQLLNAKLITQRKFDNLTKAERGGLSELDKAGFIKRQLVETRQITKHVAQILDSRMNTKYDENDKLIREVKVITLKSKLVSDFRKDFQFYKVREINNYHHAHDAYLNAVVGTALIKKYPKLESEFVYGDYKVYDVRKMIAKSEQEIGKATAKYFFYSNIMNFFKTEITLANGEIRKRPLIETNGETGEIVWDKGRDFATVRKVLSMPQVNIVKKTEVQTGGFSKESILPKRNSDKLIARKKDWDPKKYGGFDSPTVAYSVLVVAKVEKGKSKKLKSVKELLGITIMERSSFEKNPIDFLEAKGYKEVKKDLIIKLPKYSLFELENGRKRMLASAGELQKGNELALPSKYVNFLYLASHYEKLKGSPEDNEQKQLFVEQHKHYLDEIIEQISEFSKRVILADANLDKVLSAYNKHRDKPIREQAENIIHLFTLTNLGAPAAFKYFDTTIDRKRYTSTKEVLDATLIHQSITGLYETRIDLSQLGGDGGGGGGSGGGGSGGGGSGGGGSGGGGSGGGGSGGTLNIEDEHRLHETSKEPDVSLGSTWLSDFPQAWAETGGMGLAVRQAPLIIPLKATSTPVSIKQYPMSQEARLGIKPHIQRLLDQGILVPCQSPWNTPLLPVKKPGTNDYRPVQDLREVNKRVEDIHPTVPNPYNLLSGLPPSHQWYTVLDLKDAFFCLRLHPTSQPLFAFEWRDPEMGISGQLTWTRLPQGFKNSPTLFNEALHRDLADFRIQHPDLILLQYVDDLLLAATSELDCQQGTRALLQTLGNLGYRASAKKAQICQKQVKYLGYLLKEGQRWLTEARKETVMGQPTPKTPRQLREFLGTAGFCRLWIPGFAEMAAPLYPLTKPGTLFNWGPDQQKAYQEIKQALLTAPALGLPDLTKPFELFVDEKQGYAKGVLTQKLGPWRRPVAYLSKKLDPVAAGWPPCLRMVAAIAVLTKDAGKLTMGQPLVILAPHAVEALVKQPPDRWLSNARMTHYQALLLDTDRVQFGPVVALNPATLLPLPEEGLQHNCLDILAEAHGTRPDLTDQPLPDADHTWYTDGSSLLQEGQRKAGAAVTTETEVIWAKALPAGTSAQRAELIALTQALKMAEGKKLNVYTDSRYAFATAHIHGEIYRRRGWLTSEGKEIKNKDEILALLKALFLPKRLSIIHCPGHQKGHSAEARGNRMADQAARKAAITETPDTSTLLAGKRTADGSEFEKRTADGSEFESPKKKAKVE

SEQ ID NO: 2742 - protein, 2094 aa, synthetic construct
MPAAKRVKLDGGDKKYSIGLDIGTNSVGWAVITDEYKVPSKKFKVLGNTDRHSIKKNLIGALLFDSGETAEATRLKRTARRRYTRRKNRICYLQEIFSNEMAKVDDSFFHRLEESFLVEEDKKHERHPIFGNIVDEVAYHEKYPTIYHLRKKLVDSTDKADLRLIYLALAHMIKFRGHFLIEGDLNPDNSDVDKLFIQLVQTYNQLFEENPINASGVDAKAILSARLSKSRRLENLIAQLPGEKKNGLFGNLIALSLGLTPNFKSNFDLAEDAKLQLSKDTYDDDLDNLLAQIGDQYADLFLAAKNLSDAILLSDILRVNTEITKAPLSASMIKRYDEHHQDLTLLKALVRQQLPEKYKEIFFDQSKNGYAGYIDGGASQEEFYKFIKPILEKMDGTEELLVKLNREDLLRKQRTFDNGSIPHQIHLGELHAILRRQEDFYPFLKDNREKIEKILTFRIPYYVGPLARGNSRFAWMTRKSEETITPWNFEEVVDKGASAQSFIERMTNFDKNLPNEKVLPKHSLLYEYFTVYNELTKVKYVTEGMRKPAFLSGEQKKAIVDLLFKTNRKVTVKQLKEDYFKKIECFDSVEISGVEDRFNASLGTYHDLLKIIKDKDFLDNEENEDILEDIVLTLTLFEDREMIEERLKTYAHLFDDKVMKQLKRRRYTGWGRLSRKLINGIRDKQSGKTILDFLKSDGFANRNFMQLIHDDSLTFKEDIQKAQVSGQGDSLHEHIANLAGSPAIKKGILQTVKVVDELVKVMGRHKPENIVIEMARENQTTQKGQKNSRERMKRIEEGIKELGSQILKEHPVENTQLQNEKLYLYYLQNGRDMYVDQELDINRLSDYDVDHIVPQSFLKDDSIDNKVLTRSDKARGKSDNVPSEEVVKKMKNYWRQLLNAKLITQRKFDNLTKAERGGLSELDKAGFIKRQLVETRQITKHVAQILDSRMNTKYDENDKLIREVKVITLKSKLVSDFRKDFQFYKVREINNYHHAHDAYLNAVVGTALIKKYPKLESEFVYGDYKVYDVRKMIAKSEQEIGKATAKYFFYSNIMNFFKTEITLANGEIRKRPLIETNGETGEIVWDKGRDFATVRKVLSMPQVNIVKKTEVQTGGFSKESILPKRNSDKLIARKKDWDPKKYGGFDSPTVAYSVLVVAKVEKGKSKKLKSVKELLGITIMERSSFEKNPIDFLEAKGYKEVKKDLIIKLPKYSLFELENGRKRMLASAGELQKGNELALPSKYVNFLYLASHYEKLKGSPEDNEQKQLFVEQHKHYLDEIIEQISEFSKRVILADANLDKVLSAYNKHRDKPIREQAENIIHLFTLTNLGAPAAFKYFDTTIDRKRYTSTKEVLDATLIHQSITGLYETRIDLSQLGGDGGGGGPAPGGSGGTLNIEDEHRLHETSKEPDVSLGSTWLSDFPQAWAETGGMGLAVRQAPLIIPLKATSTPVSIKQYPMSQEARLGIKPHIQRLLDQGILVPCQSPWNTPLLPVKKPGTNDYRPVQDLREVNKRVEDIHPTVPNPYNLLSGLPPSHQWYTVLDLKDAFFCLRLHPTSQPLFAFEWRDPEMGISGQLTWTRLPQGFKNSPTLFNEALHRDLADFRIQHPDLILLQYVDDLLLAATSELDCQQGTRALLQTLGNLGYRASAKKAQICQKQVKYLGYLLKEGQRWLTEARKETVMGQPTPKTPRQLREFLGTAGFCRLWIPGFAEMAAPLYPLTKPGTLFNWGPDQQKAYQEIKQALLTAPALGLPDLTKPFELFVDEKQGYAKGVLTQKLGPWRRPVAYLSKKLDPVAAGWPPCLRMVAAIAVLTKDAGKLTMGQPLVILAPHAVEALVKQPPDRWLSNARMTHYQALLLDTDRVQFGPVVALNPATLLPLPEEGLQHNCLDILAEAHGTRPDLTDQPLPDADHTWYTDGSSLLQEGQRKAGAAVTTETEVIWAKALPAGTSAQRAELIALTQALKMAEGKKLNVYTDSRYAFATAHIHGEIYRRRGWLTSEGKEIKNKDEILALLKALFLPKRLSIIHCPGHQKGHSAEARGNRMADQAARKAAITETPDTSTLLAGKRTADGSEFEKRTADGSEFESPKKKAKVE

SEQ ID NO: 2743 - protein, 2091 aa, synthetic construct
MPAAKRVKLDGGDKKYSIGLDIGTNSVGWAVITDEYKVPSKKFKVLGNTDRHSIKKNLIGALLFDSGETAEATRLKRTARRRYTRRKNRICYLQEIFSNEMAKVDDSFFHRLEESFLVEEDKKHERHPIFGNIVDEVAYHEKYPTIYHLRKKLVDSTDKADLRLIYLALAHMIKFRGHFLIEGDLNPDNSDVDKLFIQLVQTYNQLFEENPINASGVDAKAILSARLSKSRRLENLIAQLPGEKKNGLFGNLIALSLGLTPNFKSNFDLAEDAKLQLSKDTYDDDLDNLLAQIGDQYADLFLAAKNLSDAILLSDILRVNTEITKAPLSASMIKRYDEHHQDLTLLKALVRQQLPEKYKEIFFDQSKNGYAGYIDGGASQEEFYKFIKPILEKMDGTEELLVKLNREDLLRKQRTFDNGSIPHQIHLGELHAILRRQEDFYPFLKDNREKIEKILTFRIPYYVGPLARGNSRFAWMTRKSEETITPWNFEEVVDKGASAQSFIERMTNFDKNLPNEKVLPKHSLLYEYFTVYNELTKVKYVTEGMRKPAFLSGEQKKAIVDLLFKTNRKVTVKQLKEDYFKKIECFDSVEISGVEDRFNASLGTYHDLLKIIKDKDFLDNEENEDILEDIVLTLTLFEDREMIEERLKTYAHLFDDKVMKQLKRRRYTGWGRLSRKLINGIRDKQSGKTILDFLKSDGFANRNFMQLIHDDSLTFKEDIQKAQVSGQGDSLHEHIANLAGSPAIKKGILQTVKVVDELVKVMGRHKPENIVIEMARENQTTQKGQKNSRERMKRIEEGIKELGSQILKEHPVENTQLQNEKLYLYYLQNGRDMYVDQELDINRLSDYDVDHIVPQSFLKDDSIDNKVLTRSDKARGKSDNVPSEEVVKKMKNYWRQLLNAKLITQRKFDNLTKAERGGLSELDKAGFIKRQLVETRQITKHVAQILDSRMNTKYDENDKLIREVKVITLKSKLVSDFRKDFQFYKVREINNYHHAHDAYLNAVVGTALIKKYPKLESEFVYGDYKVYDVRKMIAKSEQEIGKATAKYFFYSNIMNFFKTEITLANGEIRKRPLIETNGETGEIVWDKGRDFATVRKVLSMPQVNIVKKTEVQTGGFSKESILPKRNSDKLIARKKDWDPKKYGGFDSPTVAYSVLVVAKVEKGKSKKLKSVKELLGITIMERSSFEKNPIDFLEAKGYKEVKKDLIIKLPKYSLFELENGRKRMLASAGELQKGNELALPSKYVNFLYLASHYEKLKGSPEDNEQKQLFVEQHKHYLDEIIEQISEFSKRVILADANLDKVLSAYNKHRDKPIREQAENIIHLFTLTNLGAPAAFKYFDTTIDRKRYTSTKEVLDATLIHQSITGLYETRIDLSQLGGDGGPAPGGGGGTLNIEDEHRLHETSKEPDVSLGSTWLSDFPQAWAETGGMGLAVRQAPLIIPLKATSTPVSIKQYPMSQEARLGIKPHIQRLLDQGILVPCQSPWNTPLLPVKKPGTNDYRPVQDLREVNKRVEDIHPTVPNPYNLLSGLPPSHQWYTVLDLKDAFFCLRLHPTSQPLFAFEWRDPEMGISGQLTWTRLPQGFKNSPTLFNEALHRDLADFRIQHPDLILLQYVDDLLLAATSELDCQQGTRALLQTLGNLGYRASAKKAQICQKQVKYLGYLLKEGQRWLTEARKETVMGQPTPKTPRQLREFLGTAGFCRLWIPGFAEMAAPLYPLTKPGTLFNWGPDQQKAYQEIKQALLTAPALGLPDLTKPFELFVDEKQGYAKGVLTQKLGPWRRPVAYLSKKLDPVAAGWPPCLRMVAAIAVLTKDAGKLTMGQPLVILAPHAVEALVKQPPDRWLSNARMTHYQALLLDTDRVQFGPVVALNPATLLPLPEEGLQHNCLDILAEAHGTRPDLTDQPLPDADHTWYTDGSSLLQEGQRKAGAAVTTETEVIWAKALPAGTSAQRAELIALTQALKMAEGKKLNVYTDSRYAFATAHIHGEIYRRRGWLTSEGKEIKNKDEILALLKALFLPKRLSIIHCPGHQKGHSAEARGNRMADQAARKAAITETPDTSTLLAGKRTADGSEFEKRTADGSEFESPKKKAKVE

SEQ ID NO: 2744 - protein, 2096 aa, synthetic construct
MPAAKRVKLDGGDKKYSIGLDIGTNSVGWAVITDEYKVPSKKFKVLGNTDRHSIKKNLIGALLFDSGETAEATRLKRTARRRYTRRKNRICYLQEIFSNEMAKVDDSFFHRLEESFLVEEDKKHERHPIFGNIVDEVAYHEKYPTIYHLRKKLVDSTDKADLRLIYLALAHMIKFRGHFLIEGDLNPDNSDVDKLFIQLVQTYNQLFEENPINASGVDAKAILSARLSKSRRLENLIAQLPGEKKNGLFGNLIALSLGLTPNFKSNFDLAEDAKLQLSKDTYDDDLDNLLAQIGDQYADLFLAAKNLSDAILLSDILRVNTEITKAPLSASMIKRYDEHHQDLTLLKALVRQQLPEKYKEIFFDQSKNGYAGYIDGGASQEEFYKFIKPILEKMDGTEELLVKLNREDLLRKQRTFDNGSIPHQIHLGELHAILRRQEDFYPFLKDNREKIEKILTFRIPYYVGPLARGNSRFAWMTRKSEETITPWNFEEVVDKGASAQSFIERMTNFDKNLPNEKVLPKHSLLYEYFTVYNELTKVKYVTEGMRKPAFLSGEQKKAIVDLLFKTNRKVTVKQLKEDYFKKIECFDSVEISGVEDRFNASLGTYHDLLKIIKDKDFLDNEENEDILEDIVLTLTLFEDREMIEERLKTYAHLFDDKVMKQLKRRRYTGWGRLSRKLINGIRDKQSGKTILDFLKSDGFANRNFMQLIHDDSLTFKEDIQKAQVSGQGDSLHEHIANLAGSPAIKKGILQTVKVVDELVKVMGRHKPENIVIEMARENQTTQKGQKNSRERMKRIEEGIKELGSQILKEHPVENTQLQNEKLYLYYLQNGRDMYVDQELDINRLSDYDVDHIVPQSFLKDDSIDNKVLTRSDKARGKSDNVPSEEVVKKMKNYWRQLLNAKLITQRKFDNLTKAERGGLSELDKAGFIKRQLVETRQITKHVAQILDSRMNTKYDENDKLIREVKVITLKSKLVSDFRKDFQFYKVREINNYHHAHDAYLNAVVGTALIKKYPKLESEFVYGDYKVYDVRKMIAKSEQEIGKATAKYFFYSNIMNFFKTEITLANGEIRKRPLIETNGETGEIVWDKGRDFATVRKVLSMPQVNIVKKTEVQTGGFSKESILPKRNSDKLIARKKDWDPKKYGGFDSPTVAYSVLVVAKVEKGKSKKLKSVKELLGITIMERSSFEKNPIDFLEAKGYKEVKKDLIIKLPKYSLFELENGRKRMLASAGELQKGNELALPSKYVNFLYLASHYEKLKGSPEDNEQKQLFVEQHKHYLDEIIEQISEFSKRVILADANLDKVLSAYNKHRDKPIREQAENIIHLFTLTNLGAPAAFKYFDTTIDRKRYTSTKEVLDATLIHQSITGLYETRIDLSQLGGDGGGGSEAAAKPAPGGTLNIEDEHRLHETSKEPDVSLGSTWLSDFPQAWAETGGMGLAVRQAPLIIPLKATSTPVSIKQYPMSQEARLGIKPHIQRLLDQGILVPCQSPWNTPLLPVKKPGTNDYRPVQDLREVNKRVEDIHPTVPNPYNLLSGLPPSHQWYTVLDLKDAFFCLRLHPTSQPLFAFEWRDPEMGISGQLTWTRLPQGFKNSPTLFNEALHRDLADFRIQHPDLILLQYVDDLLLAATSELDCQQGTRALLQTLGNLGYRASAKKAQICQKQVKYLGYLLKEGQRWLTEARKETVMGQPTPKTPRQLREFLGTAGFCRLWIPGFAEMAAPLYPLTKPGTLFNWGPDQQKAYQEIKQALLTAPALGLPDLTKPFELFVDEKQGYAKGVLTQKLGPWRRPVAYLSKKLDPVAAGWPPCLRMVAAIAVLTKDAGKLTMGQPLVILAPHAVEALVKQPPDRWLSNARMTHYQALLLDTDRVQFGPVVALNPATLLPLPEEGLQHNCLDILAEAHGTRPDLTDQPLPDADHTWYTDGSSLLQEGQRKAGAAVTTETEVIWAKALPAGTSAQRAELIALTQALKMAEGKKLNVYTDSRYAFATAHIHGEIYRRRGWLTSEGKEIKNKDEILALLKALFLPKRLSIIHCPGHQKGHSAEARGNRMADQAARKAAITETPDTSTLLAGKRTADGSEFEKRTADGSEFESPKKKAKVE

SEQ ID NO: 2745 - protein, 2096 aa, synthetic construct
MPAAKRVKLDGGDKKYSIGLDIGTNSVGWAVITDEYKVPSKKFKVLGNTDRHSIKKNLIGALLFDSGETAEATRLKRTARRRYTRRKNRICYLQEIFSNEMAKVDDSFFHRLEESFLVEEDKKHERHPIFGNIVDEVAYHEKYPTIYHLRKKLVDSTDKADLRLIYLALAHMIKFRGHFLIEGDLNPDNSDVDKLFIQLVQTYNQLFEENPINASGVDAKAILSARLSKSRRLENLIAQLPGEKKNGLFGNLIALSLGLTPNFKSNFDLAEDAKLQLSKDTYDDDLDNLLAQIGDQYADLFLAAKNLSDAILLSDILRVNTEITKAPLSASMIKRYDEHHQDLTLLKALVRQQLPEKYKEIFFDQSKNGYAGYIDGGASQEEFYKFIKPILEKMDGTEELLVKLNREDLLRKQRTFDNGSIPHQIHLGELHAILRRQEDFYPFLKDNREKIEKILTFRIPYYVGPLARGNSRFAWMTRKSEETITPWNFEEVVDKGASAQSFIERMTNFDKNLPNEKVLPKHSLLYEYFTVYNELTKVKYVTEGMRKPAFLSGEQKKAIVDLLFKTNRKVTVKQLKEDYFKKIECFDSVEISGVEDRFNASLGTYHDLLKIIKDKDFLDNEENEDILEDIVLTLTLFEDREMIEERLKTYAHLFDDKVMKQLKRRRYTGWGRLSRKLINGIRDKQSGKTILDFLKSDGFANRNFMQLIHDDSLTFKEDIQKAQVSGQGDSLHEHIANLAGSPAIKKGILQTVKVVDELVKVMGRHKPENIVIEMARENQTTQKGQKNSRERMKRIEEGIKELGSQILKEHPVENTQLQNEKLYLYYLQNGRDMYVDQELDINRLSDYDVDHIVPQSFLKDDSIDNKVLTRSDKARGKSDNVPSEEVVKKMKNYWRQLLNAKLITQRKFDNLTKAERGGLSELDKAGFIKRQLVETRQITKHVAQILDSRMNTKYDENDKLIREVKVITLKSKLVSDFRKDFQFYKVREINNYHHAHDAYLNAVVGTALIKKYPKLESEFVYGDYKVYDVRKMIAKSEQEIGKATAKYFFYSNIMNFFKTEITLANGEIRKRPLIETNGETGEIVWDKGRDFATVRKVLSMPQVNIVKKTEVQTGGFSKESILPKRNSDKLIARKKDWDPKKYGGFDSPTVAYSVLVVAKVEKGKSKKLKSVKELLGITIMERSSFEKNPIDFLEAKGYKEVKKDLIIKLPKYSLFELENGRKRMLASAGELQKGNELALPSKYVNFLYLASHYEKLKGSPEDNEQKQLFVEQHKHYLDEIIEQISEFSKRVILADANLDKVLSAYNKHRDKPIREQAENIIHLFTLTNLGAPAAFKYFDTTIDRKRYTSTKEVLDATLIHQSITGLYETRIDLSQLGGDGGEAAAKGGGGGSGGTLNIEDEHRLHETSKEPDVSLGSTWLSDFPQAWAETGGMGLAVRQAPLIIPLKATSTPVSIKQYPMSQEARLGIKPHIQRLLDQGILVPCQSPWNTPLLPVKKPGTNDYRPVQDLREVNKRVEDIHPTVPNPYNLLSGLPPSHQWYTVLDLKDAFFCLRLHPTSQPLFAFEWRDPEMGISGQLTWTRLPQGFKNSPTLFNEALHRDLADFRIQHPDLILLQYVDDLLLAATSELDCQQGTRALLQTLGNLGYRASAKKAQICQKQVKYLGYLLKEGQRWLTEARKETVMGQPTPKTPRQLREFLGTAGFCRLWIPGFAEMAAPLYPLTKPGTLFNWGPDQQKAYQEIKQALLTAPALGLPDLTKPFELFVDEKQGYAKGVLTQKLGPWRRPVAYLSKKLDPVAAGWPPCLRMVAAIAVLTKDAGKLTMGQPLVILAPHAVEALVKQPPDRWLSNARMTHYQALLLDTDRVQFGPVVALNPATLLPLPEEGLQHNCLDILAEAHGTRPDLTDQPLPDADHTWYTDGSSLLQEGQRKAGAAVTTETEVIWAKALPAGTSAQRAELIALTQALKMAEGKKLNVYTDSRYAFATAHIHGEIYRRRGWLTSEGKEIKNKDEILALLKALFLPKRLSIIHCPGHQKGHSAEARGNRMADQAARKAAITETPDTSTLLAGKRTADGSEFEKRTADGSEFESPKKKAKVE

SEQ ID NO: 2746 - protein, 2093 aa, synthetic construct
MPAAKRVKLDGGDKKYSIGLDIGTNSVGWAVITDEYKVPSKKFKVLGNTDRHSIKKNLIGALLFDSGETAEATRLKRTARRRYTRRKNRICYLQEIFSNEMAKVDDSFFHRLEESFLVEEDKKHERHPIFGNIVDEVAYHEKYPTIYHLRKKLVDSTDKADLRLIYLALAHMIKFRGHFLIEGDLNPDNSDVDKLFIQLVQTYNQLFEENPINASGVDAKAILSARLSKSRRLENLIAQLPGEKKNGLFGNLIALSLGLTPNFKSNFDLAEDAKLQLSKDTYDDDLDNLLAQIGDQYADLFLAAKNLSDAILLSDILRVNTEITKAPLSASMIKRYDEHHQDLTLLKALVRQQLPEKYKEIFFDQSKNGYAGYIDGGASQEEFYKFIKPILEKMDGTEELLVKLNREDLLRKQRTFDNGSIPHQIHLGELHAILRRQEDFYPFLKDNREKIEKILTFRIPYYVGPLARGNSRFAWMTRKSEETITPWNFEEVVDKGASAQSFIERMTNFDKNLPNEKVLPKHSLLYEYFTVYNELTKVKYVTEGMRKPAFLSGEQKKAIVDLLFKTNRKVTVKQLKEDYFKKIECFDSVEISGVEDRFNASLGTYHDLLKIIKDKDFLDNEENEDILEDIVLTLTLFEDREMIEERLKTYAHLFDDKVMKQLKRRRYTGWGRLSRKLINGIRDKQSGKTILDFLKSDGFANRNFMQLIHDDSLTFKEDIQKAQVSGQGDSLHEHIANLAGSPAIKKGILQTVKVVDELVKVMGRHKPENIVIEMARENQTTQKGQKNSRERMKRIEEGIKELGSQILKEHPVENTQLQNEKLYLYYLQNGRDMYVDQELDINRLSDYDVDHIVPQSFLKDDSIDNKVLTRSDKARGKSDNVPSEEVVKKMKNYWRQLLNAKLITQRKFDNLTKAERGGLSELDKAGFIKRQLVETRQITKHVAQILDSRMNTKYDENDKLIREVKVITLKSKLVSDFRKDFQFYKVREINNYHHAHDAYLNAVVGTALIKKYPKLESEFVYGDYKVYDVRKMIAKSEQEIGKATAKYFFYSNIMNFFKTEITLANGEIRKRPLIETNGETGEIVWDKGRDFATVRKVLSMPQVNIVKKTEVQTGGFSKESILPKRNSDKLIARKKDWDPKKYGGFDSPTVAYSVLVVAKVEKGKSKKLKSVKELLGITIMERSSFEKNPIDFLEAKGYKEVKKDLIIKLPKYSLFELENGRKRMLASAGELQKGNELALPSKYVNFLYLASHYEKLKGSPEDNEQKQLFVEQHKHYLDEIIEQISEFSKRVILADANLDKVLSAYNKHRDKPIREQAENIIHLFTLTNLGAPAAFKYFDTTIDRKRYTSTKEVLDATLIHQSITGLYETRIDLSQLGGDGGGGGEAAAKGGTLNIEDEHRLHETSKEPDVSLGSTWLSDFPQAWAETGGMGLAVRQAPLIIPLKATSTPVSIKQYPMSQEARLGIKPHIQRLLDQGILVPCQSPWNTPLLPVKKPGTNDYRPVQDLREVNKRVEDIHPTVPNPYNLLSGLPPSHQWYTVLDLKDAFFCLRLHPTSQPLFAFEWRDPEMGISGQLTWTRLPQGFKNSPTLFNEALHRDLADFRIQHPDLILLQYVDDLLLAATSELDCQQGTRALLQTLGNLGYRASAKKAQICQKQVKYLGYLLKEGQRWLTEARKETVMGQPTPKTPRQLREFLGTAGFCRLWIPGFAEMAAPLYPLTKPGTLFNWGPDQQKAYQEIKQALLTAPALGLPDLTKPFELFVDEKQGYAKGVLTQKLGPWRRPVAYLSKKLDPVAAGWPPCLRMVAAIAVLTKDAGKLTMGQPLVILAPHAVEALVKQPPDRWLSNARMTHYQALLLDTDRVQFGPVVALNPATLLPLPEEGLQHNCLDILAEAHGTRPDLTDQPLPDADHTWYTDGSSLLQEGQRKAGAAVTTETEVIWAKALPAGTSAQRAELIALTQALKMAEGKKLNVYTDSRYAFATAHIHGEIYRRRGWLTSEGKEIKNKDEILALLKALFLPKRLSIIHCPGHQKGHSAEARGNRMADQAARKAAITETPDTSTLLAGKRTADGSEFEKRTADGSEFESPKKKAKVE

SEQ ID NO: 2747 - protein, 2096 aa, synthetic construct
MPAAKRVKLDGGDKKYSIGLDIGTNSVGWAVITDEYKVPSKKFKVLGNTDRHSIKKNLIGALLFDSGETAEATRLKRTARRRYTRRKNRICYLQEIFSNEMAKVDDSFFHRLEESFLVEEDKKHERHPIFGNIVDEVAYHEKYPTIYHLRKKLVDSTDKADLRLIYLALAHMIKFRGHFLIEGDLNPDNSDVDKLFIQLVQTYNQLFEENPINASGVDAKAILSARLSKSRRLENLIAQLPGEKKNGLFGNLIALSLGLTPNFKSNFDLAEDAKLQLSKDTYDDDLDNLLAQIGDQYADLFLAAKNLSDAILLSDILRVNTEITKAPLSASMIKRYDEHHQDLTLLKALVRQQLPEKYKEIFFDQSKNGYAGYIDGGASQEEFYKFIKPILEKMDGTEELLVKLNREDLLRKQRTFDNGSIPHQIHLGELHAILRRQEDFYPFLKDNREKIEKILTFRIPYYVGPLARGNSRFAWMTRKSEETITPWNFEEVVDKGASAQSFIERMTNFDKNLPNEKVLPKHSLLYEYFTVYNELTKVKYVTEGMRKPAFLSGEQKKAIVDLLFKTNRKVTVKQLKEDYFKKIECFDSVEISGVEDRFNASLGTYHDLLKIIKDKDFLDNEENEDILEDIVLTLTLFEDREMIEERLKTYAHLFDDKVMKQLKRRRYTGWGRLSRKLINGIRDKQSGKTILDFLKSDGFANRNFMQLIHDDSLTFKEDIQKAQVSGQGDSLHEHIANLAGSPAIKKGILQTVKVVDELVKVMGRHKPENIVIEMARENQTTQKGQKNSRERMKRIEEGIKELGSQILKEHPVENTQLQNEKLYLYYLQNGRDMYVDQELDINRLSDYDVDHIVPQSFLKDDSIDNKVLTRSDKARGKSDNVPSEEVVKKMKNYWRQLLNAKLITQRKFDNLTKAERGGLSELDKAGFIKRQLVETRQITKHVAQILDSRMNTKYDENDKLIREVKVITLKSKLVSDFRKDFQFYKVREINNYHHAHDAYLNAVVGTALIKKYPKLESEFVYGDYKVYDVRKMIAKSEQEIGKATAKYFFYSNIMNFFKTEITLANGEIRKRPLIETNGETGEIVWDKGRDFATVRKVLSMPQVNIVKKTEVQTGGFSKESILPKRNSDKLIARKKDWDPKKYGGFDSPTVAYSVLVVAKVEKGKSKKLKSVKELLGITIMERSSFEKNPIDFLEAKGYKEVKKDLIIKLPKYSLFELENGRKRMLASAGELQKGNELALPSKYVNFLYLASHYEKLKGSPEDNEQKQLFVEQHKHYLDEIIEQISEFSKRVILADANLDKVLSAYNKHRDKPIREQAENIIHLFTLTNLGAPAAFKYFDTTIDRKRYTSTKEVLDATLIHQSITGLYETRIDLSQLGGDGGGGSGSSEAAAKGGTLNIEDEHRLHETSKEPDVSLGSTWLSDFPQAWAETGGMGLAVRQAPLIIPLKATSTPVSIKQYPMSQEARLGIKPHIQRLLDQGILVPCQSPWNTPLLPVKKPGTNDYRPVQDLREVNKRVEDIHPTVPNPYNLLSGLPPSHQWYTVLDLKDAFFCLRLHPTSQPLFAFEWRDPEMGISGQLTWTRLPQGFKNSPTLFNEALHRDLADFRIQHPDLILLQYVDDLLLAATSELDCQQGTRALLQTLGNLGYRASAKKAQICQKQVKYLGYLLKEGQRWLTEARKETVMGQPTPKTPRQLREFLGTAGFCRLWIPGFAEMAAPLYPLTKPGTLFNWGPDQQKAYQEIKQALLTAPALGLPDLTKPFELFVDEKQGYAKGVLTQKLGPWRRPVAYLSKKLDPVAAGWPPCLRMVAAIAVLTKDAGKLTMGQPLVILAPHAVEALVKQPPDRWLSNARMTHYQALLLDTDRVQFGPVVALNPATLLPLPEEGLQHNCLDILAEAHGTRPDLTDQPLPDADHTWYTDGSSLLQEGQRKAGAAVTTETEVIWAKALPAGTSAQRAELIALTQALKMAEGKKLNVYTDSRYAFATAHIHGEIYRRRGWLTSEGKEIKNKDEILALLKALFLPKRLSIIHCPGHQKGHSAEARGNRMADQAARKAAITETPDTSTLLAGKRTADGSEFEKRTADGSEFESPKKKAKVE

SEQ ID NO: 2748 - protein, 2096 aa, synthetic construct
MPAAKRVKLDGGDKKYSIGLDIGTNSVGWAVITDEYKVPSKKFKVLGNTDRHSIKKNLIGALLFDSGETAEATRLKRTARRRYTRRKNRICYLQEIFSNEMAKVDDSFFHRLEESFLVEEDKKHERHPIFGNIVDEVAYHEKYPTIYHLRKKLVDSTDKADLRLIYLALAHMIKFRGHFLIEGDLNPDNSDVDKLFIQLVQTYNQLFEENPINASGVDAKAILSARLSKSRRLENLIAQLPGEKKNGLFGNLIALSLGLTPNFKSNFDLAEDAKLQLSKDTYDDDLDNLLAQIGDQYADLFLAAKNLSDAILLSDILRVNTEITKAPLSASMIKRYDEHHQDLTLLKALVRQQLPEKYKEIFFDQSKNGYAGYIDGGASQEEFYKFIKPILEKMDGTEELLVKLNREDLLRKQRTFDNGSIPHQIHLGELHAILRRQEDFYPFLKDNREKIEKILTFRIPYYVGPLARGNSRFAWMTRKSEETITPWNFEEVVDKGASAQSFIERMTNFDKNLPNEKVLPKHSLLYEYFTVYNELTKVKYVTEGMRKPAFLSGEQKKAIVDLLFKTNRKVTVKQLKEDYFKKIECFDSVEISGVEDRFNASLGTYHDLLKIIKDKDFLDNEENEDILEDIVLTLTLFEDREMIEERLKTYAHLFDDKVMKQLKRRRYTGWGRLSRKLINGIRDKQSGKTILDFLKSDGFANRNFMQLIHDDSLTFKEDIQKAQVSGQGDSLHEHIANLAGSPAIKKGILQTVKVVDELVKVMGRHKPENIVIEMARENQTTQKGQKNSRERMKRIEEGIKELGSQILKEHPVENTQLQNEKLYLYYLQNGRDMYVDQELDINRLSDYDVDHIVPQSFLKDDSIDNKVLTRSDKARGKSDNVPSEEVVKKMKNYWRQLLNAKLITQRKFDNLTKAERGGLSELDKAGFIKRQLVETRQITKHVAQILDSRMNTKYDENDKLIREVKVITLKSKLVSDFRKDFQFYKVREINNYHHAHDAYLNAVVGTALIKKYPKLESEFVYGDYKVYDVRKMIAKSEQEIGKATAKYFFYSNIMNFFKTEITLANGEIRKRPLIETNGETGEIVWDKGRDFATVRKVLSMPQVNIVKKTEVQTGGFSKESILPKRNSDKLIARKKDWDPKKYGGFDSPTVAYSVLVVAKVEKGKSKKLKSVKELLGITIMERSSFEKNPIDFLEAKGYKEVKKDLIIKLPKYSLFELENGRKRMLASAGELQKGNELALPSKYVNFLYLASHYEKLKGSPEDNEQKQLFVEQHKHYLDEIIEQISEFSKRVILADANLDKVLSAYNKHRDKPIREQAENIIHLFTLTNLGAPAAFKYFDTTIDRKRYTSTKEVLDATLIHQSITGLYETRIDLSQLGGDGGPAPGSSEAAAKGGTLNIEDEHRLHETSKEPDVSLGSTWLSDFPQAWAETGGMGLAVRQAPLIIPLKATSTPVSIKQYPMSQEARLGIKPHIQRLLDQGILVPCQSPWNTPLLPVKKPGTNDYRPVQDLREVNKRVEDIHPTVPNPYNLLSGLPPSHQWYTVLDLKDAFFCLRLHPTSQPLFAFEWRDPEMGISGQLTWTRLPQGFKNSPTLFNEALHRDLADFRIQHPDLILLQYVDDLLLAATSELDCQQGTRALLQTLGNLGYRASAKKAQICQKQVKYLGYLLKEGQRWLTEARKETVMGQPTPKTPRQLREFLGTAGFCRLWIPGFAEMAAPLYPLTKPGTLFNWGPDQQKAYQEIKQALLTAPALGLPDLTKPFELFVDEKQGYAKGVLTQKLGPWRRPVAYLSKKLDPVAAGWPPCLRMVAAIAVLTKDAGKLTMGQPLVILAPHAVEALVKQPPDRWLSNARMTHYQALLLDTDRVQFGPVVALNPATLLPLPEEGLQHNCLDILAEAHGTRPDLTDQPLPDADHTWYTDGSSLLQEGQRKAGAAVTTETEVIWAKALPAGTSAQRAELIALTQALKMAEGKKLNVYTDSRYAFATAHIHGEIYRRRGWLTSEGKEIKNKDEILALLKALFLPKRLSIIHCPGHQKGHSAEARGNRMADQAARKAAITETPDTSTLLAGKRTADGSEFEKRTADGSEFESPKKKAKVE

SEQ ID NO: 2749 - protein, 2095 aa, synthetic construct
MPAAKRVKLDGGDKKYSIGLDIGTNSVGWAVITDEYKVPSKKFKVLGNTDRHSIKKNLIGALLFDSGETAEATRLKRTARRRYTRRKNRICYLQEIFSNEMAKVDDSFFHRLEESFLVEEDKKHERHPIFGNIVDEVAYHEKYPTIYHLRKKLVDSTDKADLRLIYLALAHMIKFRGHFLIEGDLNPDNSDVDKLFIQLVQTYNQLFEENPINASGVDAKAILSARLSKSRRLENLIAQLPGEKKNGLFGNLIALSLGLTPNFKSNFDLAEDAKLQLSKDTYDDDLDNLLAQIGDQYADLFLAAKNLSDAILLSDILRVNTEITKAPLSASMIKRYDEHHQDLTLLKALVRQQLPEKYKEIFFDQSKNGYAGYIDGGASQEEFYKFIKPILEKMDGTEELLVKLNREDLLRKQRTFDNGSIPHQIHLGELHAILRRQEDFYPFLKDNREKIEKILTFRIPYYVGPLARGNSRFAWMTRKSEETITPWNFEEVVDKGASAQSFIERMTNFDKNLPNEKVLPKHSLLYEYFTVYNELTKVKYVTEGMRKPAFLSGEQKKAIVDLLFKTNRKVTVKQLKEDYFKKIECFDSVEISGVEDRFNASLGTYHDLLKIIKDKDFLDNEENEDILEDIVLTLTLFEDREMIEERLKTYAHLFDDKVMKQLKRRRYTGWGRLSRKLINGIRDKQSGKTILDFLKSDGFANRNFMQLIHDDSLTFKEDIQKAQVSGQGDSLHEHIANLAGSPAIKKGILQTVKVVDELVKVMGRHKPENIVIEMARENQTTQKGQKNSRERMKRIEEGIKELGSQILKEHPVENTQLQNEKLYLYYLQNGRDMYVDQELDINRLSDYDVDHIVPQSFLKDDSIDNKVLTRSDKARGKSDNVPSEEVVKKMKNYWRQLLNAKLITQRKFDNLTKAERGGLSELDKAGFIKRQLVETRQITKHVAQILDSRMNTKYDENDKLIREVKVITLKSKLVSDFRKDFQFYKVREINNYHHAHDAYLNAVVGTALIKKYPKLESEFVYGDYKVYDVRKMIAKSEQEIGKATAKYFFYSNIMNFFKTEITLANGEIRKRPLIETNGETGEIVWDKGRDFATVRKVLSMPQVNIVKKTEVQTGGFSKESILPKRNSDKLIARKKDWDPKKYGGFDSPTVAYSVLVVAKVEKGKSKKLKSVKELLGITIMERSSFEKNPIDFLEAKGYKEVKKDLIIKLPKYSLFELENGRKRMLASAGELQKGNELALPSKYVNFLYLASHYEKLKGSPEDNEQKQLFVEQHKHYLDEIIEQISEFSKRVILADANLDKVLSAYNKHRDKPIREQAENIIHLFTLTNLGAPAAFKYFDTTIDRKRYTSTKEVLDATLIHQSITGLYETRIDLSQLGGDGGGGGGSGGGGSGGTLNIEDEHRLHETSKEPDVSLGSTWLSDFPQAWAETGGMGLAVRQAPLIIPLKATSTPVSIKQYPMSQEARLGIKPHIQRLLDQGILVPCQSPWNTPLLPVKKPGTNDYRPVQDLREVNKRVEDIHPTVPNPYNLLSGLPPSHQWYTVLDLKDAFFCLRLHPTSQPLFAFEWRDPEMGISGQLTWTRLPQGFKNSPTLFNEALHRDLADFRIQHPDLILLQYVDDLLLAATSELDCQQGTRALLQTLGNLGYRASAKKAQICQKQVKYLGYLLKEGQRWLTEARKETVMGQPTPKTPRQLREFLGTAGFCRLWIPGFAEMAAPLYPLTKPGTLFNWGPDQQKAYQEIKQALLTAPALGLPDLTKPFELFVDEKQGYAKGVLTQKLGPWRRPVAYLSKKLDPVAAGWPPCLRMVAAIAVLTKDAGKLTMGQPLVILAPHAVEALVKQPPDRWLSNARMTHYQALLLDTDRVQFGPVVALNPATLLPLPEEGLQHNCLDILAEAHGTRPDLTDQPLPDADHTWYTDGSSLLQEGQRKAGAAVTTETEVIWAKALPAGTSAQRAELIALTQALKMAEGKKLNVYTDSRYAFATAHIHGEIYRRRGWLTSEGKEIKNKDEILALLKALFLPKRLSIIHCPGHQKGHSAEARGNRMADQAARKAAITETPDTSTLLAGKRTADGSEFEKRTADGSEFESPKKKAKVE

SEQ ID NO: 2750 - protein, 2091 aa, synthetic construct
MPAAKRVKLDGGDKKYSIGLDIGTNSVGWAVITDEYKVPSKKFKVLGNTDRHSIKKNLIGALLFDSGETAEATRLKRTARRRYTRRKNRICYLQEIFSNEMAKVDDSFFHRLEESFLVEEDKKHERHPIFGNIVDEVAYHEKYPTIYHLRKKLVDSTDKADLRLIYLALAHMIKFRGHFLIEGDLNPDNSDVDKLFIQLVQTYNQLFEENPINASGVDAKAILSARLSKSRRLENLIAQLPGEKKNGLFGNLIALSLGLTPNFKSNFDLAEDAKLQLSKDTYDDDLDNLLAQIGDQYADLFLAAKNLSDAILLSDILRVNTEITKAPLSASMIKRYDEHHQDLTLLKALVRQQLPEKYKEIFFDQSKNGYAGYIDGGASQEEFYKFIKPILEKMDGTEELLVKLNREDLLRKQRTFDNGSIPHQIHLGELHAILRRQEDFYPFLKDNREKIEKILTFRIPYYVGPLARGNSRFAWMTRKSEETITPWNFEEVVDKGASAQSFIERMTNFDKNLPNEKVLPKHSLLYEYFTVYNELTKVKYVTEGMRKPAFLSGEQKKAIVDLLFKTNRKVTVKQLKEDYFKKIECFDSVEISGVEDRFNASLGTYHDLLKIIKDKDFLDNEENEDILEDIVLTLTLFEDREMIEERLKTYAHLFDDKVMKQLKRRRYTGWGRLSRKLINGIRDKQSGKTILDFLKSDGFANRNFMQLIHDDSLTFKEDIQKAQVSGQGDSLHEHIANLAGSPAIKKGILQTVKVVDELVKVMGRHKPENIVIEMARENQTTQKGQKNSRERMKRIEEGIKELGSQILKEHPVENTQLQNEKLYLYYLQNGRDMYVDQELDINRLSDYDVDHIVPQSFLKDDSIDNKVLTRSDKARGKSDNVPSEEVVKKMKNYWRQLLNAKLITQRKFDNLTKAERGGLSELDKAGFIKRQLVETRQITKHVAQILDSRMNTKYDENDKLIREVKVITLKSKLVSDFRKDFQFYKVREINNYHHAHDAYLNAVVGTALIKKYPKLESEFVYGDYKVYDVRKMIAKSEQEIGKATAKYFFYSNIMNFFKTEITLANGEIRKRPLIETNGETGEIVWDKGRDFATVRKVLSMPQVNIVKKTEVQTGGFSKESILPKRNSDKLIARKKDWDPKKYGGFDSPTVAYSVLVVAKVEKGKSKKLKSVKELLGITIMERSSFEKNPIDFLEAKGYKEVKKDLIIKLPKYSLFELENGRKRMLASAGELQKGNELALPSKYVNFLYLASHYEKLKGSPEDNEQKQLFVEQHKHYLDEIIEQISEFSKRVILADANLDKVLSAYNKHRDKPIREQAENIIHLFTLTNLGAPAAFKYFDTTIDRKRYTSTKEVLDATLIHQSITGLYETRIDLSQLGGDGGGSSPAPGGTLNIEDEHRLHETSKEPDVSLGSTWLSDFPQAWAETGGMGLAVRQAPLIIPLKATSTPVSIKQYPMSQEARLGIKPHIQRLLDQGILVPCQSPWNTPLLPVKKPGTNDYRPVQDLREVNKRVEDIHPTVPNPYNLLSGLPPSHQWYTVLDLKDAFFCLRLHPTSQPLFAFEWRDPEMGISGQLTWTRLPQGFKNSPTLFNEALHRDLADFRIQHPDLILLQYVDDLLLAATSELDCQQGTRALLQTLGNLGYRASAKKAQICQKQVKYLGYLLKEGQRWLTEARKETVMGQPTPKTPRQLREFLGTAGFCRLWIPGFAEMAAPLYPLTKPGTLFNWGPDQQKAYQEIKQALLTAPALGLPDLTKPFELFVDEKQGYAKGVLTQKLGPWRRPVAYLSKKLDPVAAGWPPCLRMVAAIAVLTKDAGKLTMGQPLVILAPHAVEALVKQPPDRWLSNARMTHYQALLLDTDRVQFGPVVALNPATLLPLPEEGLQHNCLDILAEAHGTRPDLTDQPLPDADHTWYTDGSSLLQEGQRKAGAAVTTETEVIWAKALPAGTSAQRAELIALTQALKMAEGKKLNVYTDSRYAFATAHIHGEIYRRRGWLTSEGKEIKNKDEILALLKALFLPKRLSIIHCPGHQKGHSAEARGNRMADQAARKAAITETPDTSTLLAGKRTADGSEFEKRTADGSEFESPKKKAKVE

SEQ ID NO: 2751 - protein, 2096 aa, synthetic construct
MPAAKRVKLDGGDKKYSIGLDIGTNSVGWAVITDEYKVPSKKFKVLGNTDRHSIKKNLIGALLFDSGETAEATRLKRTARRRYTRRKNRICYLQEIFSNEMAKVDDSFFHRLEESFLVEEDKKHERHPIFGNIVDEVAYHEKYPTIYHLRKKLVDSTDKADLRLIYLALAHMIKFRGHFLIEGDLNPDNSDVDKLFIQLVQTYNQLFEENPINASGVDAKAILSARLSKSRRLENLIAQLPGEKKNGLFGNLIALSLGLTPNFKSNFDLAEDAKLQLSKDTYDDDLDNLLAQIGDQYADLFLAAKNLSDAILLSDILRVNTEITKAPLSASMIKRYDEHHQDLTLLKALVRQQLPEKYKEIFFDQSKNGYAGYIDGGASQEEFYKFIKPILEKMDGTEELLVKLNREDLLRKQRTFDNGSIPHQIHLGELHAILRRQEDFYPFLKDNREKIEKILTFRIPYYVGPLARGNSRFAWMTRKSEETITPWNFEEVVDKGASAQSFIERMTNFDKNLPNEKVLPKHSLLYEYFTVYNELTKVKYVTEGMRKPAFLSGEQKKAIVDLLFKTNRKVTVKQLKEDYFKKIECFDSVEISGVEDRFNASLGTYHDLLKIIKDKDFLDNEENEDILEDIVLTLTLFEDREMIEERLKTYAHLFDDKVMKQLKRRRYTGWGRLSRKLINGIRDKQSGKTILDFLKSDGFANRNFMQLIHDDSLTFKEDIQKAQVSGQGDSLHEHIANLAGSPAIKKGILQTVKVVDELVKVMGRHKPENIVIEMARENQTTQKGQKNSRERMKRIEEGIKELGSQILKEHPVENTQLQNEKLYLYYLQNGRDMYVDQELDINRLSDYDVDHIVPQSFLKDDSIDNKVLTRSDKARGKSDNVPSEEVVKKMKNYWRQLLNAKLITQRKFDNLTKAERGGLSELDKAGFIKRQLVETRQITKHVAQILDSRMNTKYDENDKLIREVKVITLKSKLVSDFRKDFQFYKVREINNYHHAHDAYLNAVVGTALIKKYPKLESEFVYGDYKVYDVRKMIAKSEQEIGKATAKYFFYSNIMNFFKTEITLANGEIRKRPLIETNGETGEIVWDKGRDFATVRKVLSMPQVNIVKKTEVQTGGFSKESILPKRNSDKLIARKKDWDPKKYGGFDSPTVAYSVLVVAKVEKGKSKKLKSVKELLGITIMERSSFEKNPIDFLEAKGYKEVKKDLIIKLPKYSLFELENGRKRMLASAGELQKGNELALPSKYVNFLYLASHYEKLKGSPEDNEQKQLFVEQHKHYLDEIIEQISEFSKRVILADANLDKVLSAYNKHRDKPIREQAENIIHLFTLTNLGAPAAFKYFDTTIDRKRYTSTKEVLDATLIHQSITGLYETRIDLSQLGGDGGGGSGGGEAAAKGGTLNIEDEHRLHETSKEPDVSLGSTWLSDFPQAWAETGGMGLAVRQAPLIIPLKATSTPVSIKQYPMSQEARLGIKPHIQRLLDQGILVPCQSPWNTPLLPVKKPGTNDYRPVQDLREVNKRVEDIHPTVPNPYNLLSGLPPSHQWYTVLDLKDAFFCLRLHPTSQPLFAFEWRDPEMGISGQLTWTRLPQGFKNSPTLFNEALHRDLADFRIQHPDLILLQYVDDLLLAATSELDCQQGTRALLQTLGNLGYRASAKKAQICQKQVKYLGYLLKEGQRWLTEARKETVMGQPTPKTPRQLREFLGTAGFCRLWIPGFAEMAAPLYPLTKPGTLFNWGPDQQKAYQEIKQALLTAPALGLPDLTKPFELFVDEKQGYAKGVLTQKLGPWRRPVAYLSKKLDPVAAGWPPCLRMVAAIAVLTKDAGKLTMGQPLVILAPHAVEALVKQPPDRWLSNARMTHYQALLLDTDRVQFGPVVALNPATLLPLPEEGLQHNCLDILAEAHGTRPDLTDQPLPDADHTWYTDGSSLLQEGQRKAGAAVTTETEVIWAKALPAGTSAQRAELIALTQALKMAEGKKLNVYTDSRYAFATAHIHGEIYRRRGWLTSEGKEIKNKDEILALLKALFLPKRLSIIHCPGHQKGHSAEARGNRMADQAARKAAITETPDTSTLLAGKRTADGSEFEKRTADGSEFESPKKKAKVE

SEQ ID NO: 2752 - protein, 2094 aa, synthetic construct
MPAAKRVKLDGGDKKYSIGLDIGTNSVGWAVITDEYKVPSKKFKVLGNTDRHSIKKNLIGALLFDSGETAEATRLKRTARRRYTRRKNRICYLQEIFSNEMAKVDDSFFHRLEESFLVEEDKKHERHPIFGNIVDEVAYHEKYPTIYHLRKKLVDSTDKADLRLIYLALAHMIKFRGHFLIEGDLNPDNSDVDKLFIQLVQTYNQLFEENPINASGVDAKAILSARLSKSRRLENLIAQLPGEKKNGLFGNLIALSLGLTPNFKSNFDLAEDAKLQLSKDTYDDDLDNLLAQIGDQYADLFLAAKNLSDAILLSDILRVNTEITKAPLSASMIKRYDEHHQDLTLLKALVRQQLPEKYKEIFFDQSKNGYAGYIDGGASQEEFYKFIKPILEKMDGTEELLVKLNREDLLRKQRTFDNGSIPHQIHLGELHAILRRQEDFYPFLKDNREKIEKILTFRIPYYVGPLARGNSRFAWMTRKSEETITPWNFEEVVDKGASAQSFIERMTNFDKNLPNEKVLPKHSLLYEYFTVYNELTKVKYVTEGMRKPAFLSGEQKKAIVDLLFKTNRKVTVKQLKEDYFKKIECFDSVEISGVEDRFNASLGTYHDLLKIIKDKDFLDNEENEDILEDIVLTLTLFEDREMIEERLKTYAHLFDDKVMKQLKRRRYTGWGRLSRKLINGIRDKQSGKTILDFLKSDGFANRNFMQLIHDDSLTFKEDIQKAQVSGQGDSLHEHIANLAGSPAIKKGILQTVKVVDELVKVMGRHKPENIVIEMARENQTTQKGQKNSRERMKRIEEGIKELGSQILKEHPVENTQLQNEKLYLYYLQNGRDMYVDQELDINRLSDYDVDHIVPQSFLKDDSIDNKVLTRSDKARGKSDNVPSEEVVKKMKNYWRQLLNAKLITQRKFDNLTKAERGGLSELDKAGFIKRQLVETRQITKHVAQILDSRMNTKYDENDKLIREVKVITLKSKLVSDFRKDFQFYKVREINNYHHAHDAYLNAVVGTALIKKYPKLESEFVYGDYKVYDVRKMIAKSEQEIGKATAKYFFYSNIMNFFKTEITLANGEIRKRPLIETNGETGEIVWDKGRDFATVRKVLSMPQVNIVKKTEVQTGGFSKESILPKRNSDKLIARKKDWDPKKYGGFDSPTVAYSVLVVAKVEKGKSKKLKSVKELLGITIMERSSFEKNPIDFLEAKGYKEVKKDLIIKLPKYSLFELENGRKRMLASAGELQKGNELALPSKYVNFLYLASHYEKLKGSPEDNEQKQLFVEQHKHYLDEIIEQISEFSKRVILADANLDKVLSAYNKHRDKPIREQAENIIHLFTLTNLGAPAAFKYFDTTIDRKRYTSTKEVLDATLIHQSITGLYETRIDLSQLGGDGGGGSPAPGSSGGTLNIEDEHRLHETSKEPDVSLGSTWLSDFPQAWAETGGMGLAVRQAPLIIPLKATSTPVSIKQYPMSQEARLGIKPHIQRLLDQGILVPCQSPWNTPLLPVKKPGTNDYRPVQDLREVNKRVEDIHPTVPNPYNLLSGLPPSHQWYTVLDLKDAFFCLRLHPTSQPLFAFEWRDPEMGISGQLTWTRLPQGFKNSPTLFNEALHRDLADFRIQHPDLILLQYVDDLLLAATSELDCQQGTRALLQTLGNLGYRASAKKAQICQKQVKYLGYLLKEGQRWLTEARKETVMGQPTPKTPRQLREFLGTAGFCRLWIPGFAEMAAPLYPLTKPGTLFNWGPDQQKAYQEIKQALLTAPALGLPDLTKPFELFVDEKQGYAKGVLTQKLGPWRRPVAYLSKKLDPVAAGWPPCLRMVAAIAVLTKDAGKLTMGQPLVILAPHAVEALVKQPPDRWLSNARMTHYQALLLDTDRVQFGPVVALNPATLLPLPEEGLQHNCLDILAEAHGTRPDLTDQPLPDADHTWYTDGSSLLQEGQRKAGAAVTTETEVIWAKALPAGTSAQRAELIALTQALKMAEGKKLNVYTDSRYAFATAHIHGEIYRRRGWLTSEGKEIKNKDEILALLKALFLPKRLSIIHCPGHQKGHSAEARGNRMADQAARKAAITETPDTSTLLAGKRTADGSEFEKRTADGSEFESPKKKAKVE

SEQ ID NO: 2753 - protein, 2096 aa, synthetic construct
MPAAKRVKLDGGDKKYSIGLDIGTNSVGWAVITDEYKVPSKKFKVLGNTDRHSIKKNLIGALLFDSGETAEATRLKRTARRRYTRRKNRICYLQEIFSNEMAKVDDSFFHRLEESFLVEEDKKHERHPIFGNIVDEVAYHEKYPTIYHLRKKLVDSTDKADLRLIYLALAHMIKFRGHFLIEGDLNPDNSDVDKLFIQLVQTYNQLFEENPINASGVDAKAILSARLSKSRRLENLIAQLPGEKKNGLFGNLIALSLGLTPNFKSNFDLAEDAKLQLSKDTYDDDLDNLLAQIGDQYADLFLAAKNLSDAILLSDILRVNTEITKAPLSASMIKRYDEHHQDLTLLKALVRQQLPEKYKEIFFDQSKNGYAGYIDGGASQEEFYKFIKPILEKMDGTEELLVKLNREDLLRKQRTFDNGSIPHQIHLGELHAILRRQEDFYPFLKDNREKIEKILTFRIPYYVGPLARGNSRFAWMTRKSEETITPWNFEEVVDKGASAQSFIERMTNFDKNLPNEKVLPKHSLLYEYFTVYNELTKVKYVTEGMRKPAFLSGEQKKAIVDLLFKTNRKVTVKQLKEDYFKKIECFDSVEISGVEDRFNASLGTYHDLLKIIKDKDFLDNEENEDILEDIVLTLTLFEDREMIEERLKTYAHLFDDKVMKQLKRRRYTGWGRLSRKLINGIRDKQSGKTILDFLKSDGFANRNFMQLIHDDSLTFKEDIQKAQVSGQGDSLHEHIANLAGSPAIKKGILQTVKVVDELVKVMGRHKPENIVIEMARENQTTQKGQKNSRERMKRIEEGIKELGSQILKEHPVENTQLQNEKLYLYYLQNGRDMYVDQELDINRLSDYDVDHIVPQSFLKDDSIDNKVLTRSDKARGKSDNVPSEEVVKKMKNYWRQLLNAKLITQRKFDNLTKAERGGLSELDKAGFIKRQLVETRQITKHVAQILDSRMNTKYDENDKLIREVKVITLKSKLVSDFRKDFQFYKVREINNYHHAHDAYLNAVVGTALIKKYPKLESEFVYGDYKVYDVRKMIAKSEQEIGKATAKYFFYSNIMNFFKTEITLANGEIRKRPLIETNGETGEIVWDKGRDFATVRKVLSMPQVNIVKKTEVQTGGFSKESILPKRNSDKLIARKKDWDPKKYGGFDSPTVAYSVLVVAKVEKGKSKKLKSVKELLGITIMERSSFEKNPIDFLEAKGYKEVKKDLIIKLPKYSLFELENGRKRMLASAGELQKGNELALPSKYVNFLYLASHYEKLKGSPEDNEQKQLFVEQHKHYLDEIIEQISEFSKRVILADANLDKVLSAYNKHRDKPIREQAENIIHLFTLTNLGAPAAFKYFDTTIDRKRYTSTKEVLDATLIHQSITGLYETRIDLSQLGGDGGPAPGGSEAAAKGGTLNIEDEHRLHETSKEPDVSLGSTWLSDFPQAWAETGGMGLAVRQAPLIIPLKATSTPVSIKQYPMSQEARLGIKPHIQRLLDQGILVPCQSPWNTPLLPVKKPGTNDYRPVQDLREVNKRVEDIHPTVPNPYNLLSGLPPSHQWYTVLDLKDAFFCLRLHPTSQPLFAFEWRDPEMGISGQLTWTRLPQGFKNSPTLFNEALHRDLADFRIQHPDLILLQYVDDLLLAATSELDCQQGTRALLQTLGNLGYRASAKKAQICQKQVKYLGYLLKEGQRWLTEARKETVMGQPTPKTPRQLREFLGTAGFCRLWIPGFAEMAAPLYPLTKPGTLFNWGPDQQKAYQEIKQALLTAPALGLPDLTKPFELFVDEKQGYAKGVLTQKLGPWRRPVAYLSKKLDPVAAGWPPCLRMVAAIAVLTKDAGKLTMGQPLVILAPHAVEALVKQPPDRWLSNARMTHYQALLLDTDRVQFGPVVALNPATLLPLPEEGLQHNCLDILAEAHGTRPDLTDQPLPDADHTWYTDGSSLLQEGQRKAGAAVTTETEVIWAKALPAGTSAQRAELIALTQALKMAEGKKLNVYTDSRYAFATAHIHGEIYRRRGWLTSEGKEIKNKDEILALLKALFLPKRLSIIHCPGHQKGHSAEARGNRMADQAARKAAITETPDTSTLLAGKRTADGSEFEKRTADGSEFESPKKKAKVE

SEQ ID NO: 2754 - protein, 2090 aa, synthetic construct
MPAAKRVKLDGGDKKYSIGLDIGTNSVGWAVITDEYKVPSKKFKVLGNTDRHSIKKNLIGALLFDSGETAEATRLKRTARRRYTRRKNRICYLQEIFSNEMAKVDDSFFHRLEESFLVEEDKKHERHPIFGNIVDEVAYHEKYPTIYHLRKKLVDSTDKADLRLIYLALAHMIKFRGHFLIEGDLNPDNSDVDKLFIQLVQTYNQLFEENPINASGVDAKAILSARLSKSRRLENLIAQLPGEKKNGLFGNLIALSLGLTPNFKSNFDLAEDAKLQLSKDTYDDDLDNLLAQIGDQYADLFLAAKNLSDAILLSDILRVNTEITKAPLSASMIKRYDEHHQDLTLLKALVRQQLPEKYKEIFFDQSKNGYAGYIDGGASQEEFYKFIKPILEKMDGTEELLVKLNREDLLRKQRTFDNGSIPHQIHLGELHAILRRQEDFYPFLKDNREKIEKILTFRIPYYVGPLARGNSRFAWMTRKSEETITPWNFEEVVDKGASAQSFIERMTNFDKNLPNEKVLPKHSLLYEYFTVYNELTKVKYVTEGMRKPAFLSGEQKKAIVDLLFKTNRKVTVKQLKEDYFKKIECFDSVEISGVEDRFNASLGTYHDLLKIIKDKDFLDNEENEDILEDIVLTLTLFEDREMIEERLKTYAHLFDDKVMKQLKRRRYTGWGRLSRKLINGIRDKQSGKTILDFLKSDGFANRNFMQLIHDDSLTFKEDIQKAQVSGQGDSLHEHIANLAGSPAIKKGILQTVKVVDELVKVMGRHKPENIVIEMARENQTTQKGQKNSRERMKRIEEGIKELGSQILKEHPVENTQLQNEKLYLYYLQNGRDMYVDQELDINRLSDYDVDHIVPQSFLKDDSIDNKVLTRSDKARGKSDNVPSEEVVKKMKNYWRQLLNAKLITQRKFDNLTKAERGGLSELDKAGFIKRQLVETRQITKHVAQILDSRMNTKYDENDKLIREVKVITLKSKLVSDFRKDFQFYKVREINNYHHAHDAYLNAVVGTALIKKYPKLESEFVYGDYKVYDVRKMIAKSEQEIGKATAKYFFYSNIMNFFKTEITLANGEIRKRPLIETNGETGEIVWDKGRDFATVRKVLSMPQVNIVKKTEVQTGGFSKESILPKRNSDKLIARKKDWDPKKYGGFDSPTVAYSVLVVAKVEKGKSKKLKSVKELLGITIMERSSFEKNPIDFLEAKGYKEVKKDLIIKLPKYSLFELENGRKRMLASAGELQKGNELALPSKYVNFLYLASHYEKLKGSPEDNEQKQLFVEQHKHYLDEIIEQISEFSKRVILADANLDKVLSAYNKHRDKPIREQAENIIHLFTLTNLGAPAAFKYFDTTIDRKRYTSTKEVLDATLIHQSITGLYETRIDLSQLGGDGGGGGGSGGTLNIEDEHRLHETSKEPDVSLGSTWLSDFPQAWAETGGMGLAVRQAPLIIPLKATSTPVSIKQYPMSQEARLGIKPHIQRLLDQGILVPCQSPWNTPLLPVKKPGTNDYRPVQDLREVNKRVEDIHPTVPNPYNLLSGLPPSHQWYTVLDLKDAFFCLRLHPTSQPLFAFEWRDPEMGISGQLTWTRLPQGFKNSPTLFNEALHRDLADFRIQHPDLILLQYVDDLLLAATSELDCQQGTRALLQTLGNLGYRASAKKAQICQKQVKYLGYLLKEGQRWLTEARKETVMGQPTPKTPRQLREFLGTAGFCRLWIPGFAEMAAPLYPLTKPGTLFNWGPDQQKAYQEIKQALLTAPALGLPDLTKPFELFVDEKQGYAKGVLTQKLGPWRRPVAYLSKKLDPVAAGWPPCLRMVAAIAVLTKDAGKLTMGQPLVILAPHAVEALVKQPPDRWLSNARMTHYQALLLDTDRVQFGPVVALNPATLLPLPEEGLQHNCLDILAEAHGTRPDLTDQPLPDADHTWYTDGSSLLQEGQRKAGAAVTTETEVIWAKALPAGTSAQRAELIALTQALKMAEGKKLNVYTDSRYAFATAHIHGEIYRRRGWLTSEGKEIKNKDEILALLKALFLPKRLSIIHCPGHQKGHSAEARGNRMADQAARKAAITETPDTSTLLAGKRTADGSEFEKRTADGSEFESPKKKAKVE

SEQ ID NO: 2755 - protein, 2096 aa, synthetic construct
MPAAKRVKLDGGDKKYSIGLDIGTNSVGWAVITDEYKVPSKKFKVLGNTDRHSIKKNLIGALLFDSGETAEATRLKRTARRRYTRRKNRICYLQEIFSNEMAKVDDSFFHRLEESFLVEEDKKHERHPIFGNIVDEVAYHEKYPTIYHLRKKLVDSTDKADLRLIYLALAHMIKFRGHFLIEGDLNPDNSDVDKLFIQLVQTYNQLFEENPINASGVDAKAILSARLSKSRRLENLIAQLPGEKKNGLFGNLIALSLGLTPNFKSNFDLAEDAKLQLSKDTYDDDLDNLLAQIGDQYADLFLAAKNLSDAILLSDILRVNTEITKAPLSASMIKRYDEHHQDLTLLKALVRQQLPEKYKEIFFDQSKNGYAGYIDGGASQEEFYKFIKPILEKMDGTEELLVKLNREDLLRKQRTFDNGSIPHQIHLGELHAILRRQEDFYPFLKDNREKIEKILTFRIPYYVGPLARGNSRFAWMTRKSEETITPWNFEEVVDKGASAQSFIERMTNFDKNLPNEKVLPKHSLLYEYFTVYNELTKVKYVTEGMRKPAFLSGEQKKAIVDLLFKTNRKVTVKQLKEDYFKKIECFDSVEISGVEDRFNASLGTYHDLLKIIKDKDFLDNEENEDILEDIVLTLTLFEDREMIEERLKTYAHLFDDKVMKQLKRRRYTGWGRLSRKLINGIRDKQSGKTILDFLKSDGFANRNFMQLIHDDSLTFKEDIQKAQVSGQGDSLHEHIANLAGSPAIKKGILQTVKVVDELVKVMGRHKPENIVIEMARENQTTQKGQKNSRERMKRIEEGIKELGSQILKEHPVENTQLQNEKLYLYYLQNGRDMYVDQELDINRLSDYDVDHIVPQSFLKDDSIDNKVLTRSDKARGKSDNVPSEEVVKKMKNYWRQLLNAKLITQRKFDNLTKAERGGLSELDKAGFIKRQLVETRQITKHVAQILDSRMNTKYDENDKLIREVKVITLKSKLVSDFRKDFQFYKVREINNYHHAHDAYLNAVVGTALIKKYPKLESEFVYGDYKVYDVRKMIAKSEQEIGKATAKYFFYSNIMNFFKTEITLANGEIRKRPLIETNGETGEIVWDKGRDFATVRKVLSMPQVNIVKKTEVQTGGFSKESILPKRNSDKLIARKKDWDPKKYGGFDSPTVAYSVLVVAKVEKGKSKKLKSVKELLGITIMERSSFEKNPIDFLEAKGYKEVKKDLIIKLPKYSLFELENGRKRMLASAGELQKGNELALPSKYVNFLYLASHYEKLKGSPEDNEQKQLFVEQHKHYLDEIIEQISEFSKRVILADANLDKVLSAYNKHRDKPIREQAENIIHLFTLTNLGAPAAFKYFDTTIDRKRYTSTKEVLDATLIHQSITGLYETRIDLSQLGGDGGEAAAKGGSPAPGGTLNIEDEHRLHETSKEPDVSLGSTWLSDFPQAWAETGGMGLAVRQAPLIIPLKATSTPVSIKQYPMSQEARLGIKPHIQRLLDQGILVPCQSPWNTPLLPVKKPGTNDYRPVQDLREVNKRVEDIHPTVPNPYNLLSGLPPSHQWYTVLDLKDAFFCLRLHPTSQPLFAFEWRDPEMGISGQLTWTRLPQGFKNSPTLFNEALHRDLADFRIQHPDLILLQYVDDLLLAATSELDCQQGTRALLQTLGNLGYRASAKKAQICQKQVKYLGYLLKEGQRWLTEARKETVMGQPTPKTPRQLREFLGTAGFCRLWIPGFAEMAAPLYPLTKPGTLFNWGPDQQKAYQEIKQALLTAPALGLPDLTKPFELFVDEKQGYAKGVLTQKLGPWRRPVAYLSKKLDPVAAGWPPCLRMVAAIAVLTKDAGKLTMGQPLVILAPHAVEALVKQPPDRWLSNARMTHYQALLLDTDRVQFGPVVALNPATLLPLPEEGLQHNCLDILAEAHGTRPDLTDQPLPDADHTWYTDGSSLLQEGQRKAGAAVTTETEVIWAKALPAGTSAQRAELIALTQALKMAEGKKLNVYTDSRYAFATAHIHGEIYRRRGWLTSEGKEIKNKDEILALLKALFLPKRLSIIHCPGHQKGHSAEARGNRMADQAARKAAITETPDTSTLLAGKRTADGSEFEKRTADGSEFESPKKKAKVE

SEQ ID NO: 2756 - protein, 2096 aa, synthetic construct
MPAAKRVKLDGGDKKYSIGLDIGTNSVGWAVITDEYKVPSKKFKVLGNTDRHSIKKNLIGALLFDSGETAEATRLKRTARRRYTRRKNRICYLQEIFSNEMAKVDDSFFHRLEESFLVEEDKKHERHPIFGNIVDEVAYHEKYPTIYHLRKKLVDSTDKADLRLIYLALAHMIKFRGHFLIEGDLNPDNSDVDKLFIQLVQTYNQLFEENPINASGVDAKAILSARLSKSRRLENLIAQLPGEKKNGLFGNLIALSLGLTPNFKSNFDLAEDAKLQLSKDTYDDDLDNLLAQIGDQYADLFLAAKNLSDAILLSDILRVNTEITKAPLSASMIKRYDEHHQDLTLLKALVRQQLPEKYKEIFFDQSKNGYAGYIDGGASQEEFYKFIKPILEKMDGTEELLVKLNREDLLRKQRTFDNGSIPHQIHLGELHAILRRQEDFYPFLKDNREKIEKILTFRIPYYVGPLARGNSRFAWMTRKSEETITPWNFEEVVDKGASAQSFIERMTNFDKNLPNEKVLPKHSLLYEYFTVYNELTKVKYVTEGMRKPAFLSGEQKKAIVDLLFKTNRKVTVKQLKEDYFKKIECFDSVEISGVEDRFNASLGTYHDLLKIIKDKDFLDNEENEDILEDIVLTLTLFEDREMIEERLKTYAHLFDDKVMKQLKRRRYTGWGRLSRKLINGIRDKQSGKTILDFLKSDGFANRNFMQLIHDDSLTFKEDIQKAQVSGQGDSLHEHIANLAGSPAIKKGILQTVKVVDELVKVMGRHKPENIVIEMARENQTTQKGQKNSRERMKRIEEGIKELGSQILKEHPVENTQLQNEKLYLYYLQNGRDMYVDQELDINRLSDYDVDHIVPQSFLKDDSIDNKVLTRSDKARGKSDNVPSEEVVKKMKNYWRQLLNAKLITQRKFDNLTKAERGGLSELDKAGFIKRQLVETRQITKHVAQILDSRMNTKYDENDKLIREVKVITLKSKLVSDFRKDFQFYKVREINNYHHAHDAYLNAVVGTALIKKYPKLESEFVYGDYKVYDVRKMIAKSEQEIGKATAKYFFYSNIMNFFKTEITLANGEIRKRPLIETNGETGEIVWDKGRDFATVRKVLSMPQVNIVKKTEVQTGGFSKESILPKRNSDKLIARKKDWDPKKYGGFDSPTVAYSVLVVAKVEKGKSKKLKSVKELLGITIMERSSFEKNPIDFLEAKGYKEVKKDLIIKLPKYSLFELENGRKRMLASAGELQKGNELALPSKYVNFLYLASHYEKLKGSPEDNEQKQLFVEQHKHYLDEIIEQISEFSKRVILADANLDKVLSAYNKHRDKPIREQAENIIHLFTLTNLGAPAAFKYFDTTIDRKRYTSTKEVLDATLIHQSITGLYETRIDLSQLGGDGGPAPEAAAKGGSGGTLNIEDEHRLHETSKEPDVSLGSTWLSDFPQAWAETGGMGLAVRQAPLIIPLKATSTPVSIKQYPMSQEARLGIKPHIQRLLDQGILVPCQSPWNTPLLPVKKPGTNDYRPVQDLREVNKRVEDIHPTVPNPYNLLSGLPPSHQWYTVLDLKDAFFCLRLHPTSQPLFAFEWRDPEMGISGQLTWTRLPQGFKNSPTLFNEALHRDLADFRIQHPDLILLQYVDDLLLAATSELDCQQGTRALLQTLGNLGYRASAKKAQICQKQVKYLGYLLKEGQRWLTEARKETVMGQPTPKTPRQLREFLGTAGFCRLWIPGFAEMAAPLYPLTKPGTLFNWGPDQQKAYQEIKQALLTAPALGLPDLTKPFELFVDEKQGYAKGVLTQKLGPWRRPVAYLSKKLDPVAAGWPPCLRMVAAIAVLTKDAGKLTMGQPLVILAPHAVEALVKQPPDRWLSNARMTHYQALLLDTDRVQFGPVVALNPATLLPLPEEGLQHNCLDILAEAHGTRPDLTDQPLPDADHTWYTDGSSLLQEGQRKAGAAVTTETEVIWAKALPAGTSAQRAELIALTQALKMAEGKKLNVYTDSRYAFATAHIHGEIYRRRGWLTSEGKEIKNKDEILALLKALFLPKRLSIIHCPGHQKGHSAEARGNRMADQAARKAAITETPDTSTLLAGKRTADGSEFEKRTADGSEFESPKKKAKVE

SEQ ID NO: 2757 - protein, 2094 aa, synthetic construct
MPAAKRVKLDGGDKKYSIGLDIGTNSVGWAVITDEYKVPSKKFKVLGNTDRHSIKKNLIGALLFDSGETAEATRLKRTARRRYTRRKNRICYLQEIFSNEMAKVDDSFFHRLEESFLVEEDKKHERHPIFGNIVDEVAYHEKYPTIYHLRKKLVDSTDKADLRLIYLALAHMIKFRGHFLIEGDLNPDNSDVDKLFIQLVQTYNQLFEENPINASGVDAKAILSARLSKSRRLENLIAQLPGEKKNGLFGNLIALSLGLTPNFKSNFDLAEDAKLQLSKDTYDDDLDNLLAQIGDQYADLFLAAKNLSDAILLSDILRVNTEITKAPLSASMIKRYDEHHQDLTLLKALVRQQLPEKYKEIFFDQSKNGYAGYIDGGASQEEFYKFIKPILEKMDGTEELLVKLNREDLLRKQRTFDNGSIPHQIHLGELHAILRRQEDFYPFLKDNREKIEKILTFRIPYYVGPLARGNSRFAWMTRKSEETITPWNFEEVVDKGASAQSFIERMTNFDKNLPNEKVLPKHSLLYEYFTVYNELTKVKYVTEGMRKPAFLSGEQKKAIVDLLFKTNRKVTVKQLKEDYFKKIECFDSVEISGVEDRFNASLGTYHDLLKIIKDKDFLDNEENEDILEDIVLTLTLFEDREMIEERLKTYAHLFDDKVMKQLKRRRYTGWGRLSRKLINGIRDKQSGKTILDFLKSDGFANRNFMQLIHDDSLTFKEDIQKAQVSGQGDSLHEHIANLAGSPAIKKGILQTVKVVDELVKVMGRHKPENIVIEMARENQTTQKGQKNSRERMKRIEEGIKELGSQILKEHPVENTQLQNEKLYLYYLQNGRDMYVDQELDINRLSDYDVDHIVPQSFLKDDSIDNKVLTRSDKARGKSDNVPSEEVVKKMKNYWRQLLNAKLITQRKFDNLTKAERGGLSELDKAGFIKRQLVETRQITKHVAQILDSRMNTKYDENDKLIREVKVITLKSKLVSDFRKDFQFYKVREINNYHHAHDAYLNAVVGTALIKKYPKLESEFVYGDYKVYDVRKMIAKSEQEIGKATAKYFFYSNIMNFFKTEITLANGEIRKRPLIETNGETGEIVWDKGRDFATVRKVLSMPQVNIVKKTEVQTGGFSKESILPKRNSDKLIARKKDWDPKKYGGFDSPTVAYSVLVVAKVEKGKSKKLKSVKELLGITIMERSSFEKNPIDFLEAKGYKEVKKDLIIKLPKYSLFELENGRKRMLASAGELQKGNELALPSKYVNFLYLASHYEKLKGSPEDNEQKQLFVEQHKHYLDEIIEQISEFSKRVILADANLDKVLSAYNKHRDKPIREQAENIIHLFTLTNLGAPAAFKYFDTTIDRKRYTSTKEVLDATLIHQSITGLYETRIDLSQLGGDGGPAPGSSGGSGGTLNIEDEHRLHETSKEPDVSLGSTWLSDFPQAWAETGGMGLAVRQAPLIIPLKATSTPVSIKQYPMSQEARLGIKPHIQRLLDQGILVPCQSPWNTPLLPVKKPGTNDYRPVQDLREVNKRVEDIHPTVPNPYNLLSGLPPSHQWYTVLDLKDAFFCLRLHPTSQPLFAFEWRDPEMGISGQLTWTRLPQGFKNSPTLFNEALHRDLADFRIQHPDLILLQYVDDLLLAATSELDCQQGTRALLQTLGNLGYRASAKKAQICQKQVKYLGYLLKEGQRWLTEARKETVMGQPTPKTPRQLREFLGTAGFCRLWIPGFAEMAAPLYPLTKPGTLFNWGPDQQKAYQEIKQALLTAPALGLPDLTKPFELFVDEKQGYAKGVLTQKLGPWRRPVAYLSKKLDPVAAGWPPCLRMVAAIAVLTKDAGKLTMGQPLVILAPHAVEALVKQPPDRWLSNARMTHYQALLLDTDRVQFGPVVALNPATLLPLPEEGLQHNCLDILAEAHGTRPDLTDQPLPDADHTWYTDGSSLLQEGQRKAGAAVTTETEVIWAKALPAGTSAQRAELIALTQALKMAEGKKLNVYTDSRYAFATAHIHGEIYRRRGWLTSEGKEIKNKDEILALLKALFLPKRLSIIHCPGHQKGHSAEARGNRMADQAARKAAITETPDTSTLLAGKRTADGSEFEKRTADGSEFESPKKKAKVE

SEQ ID NO: 2758 - protein, 2096 aa, synthetic construct
MPAAKRVKLDGGDKKYSIGLDIGTNSVGWAVITDEYKVPSKKFKVLGNTDRHSIKKNLIGALLFDSGETAEATRLKRTARRRYTRRKNRICYLQEIFSNEMAKVDDSFFHRLEESFLVEEDKKHERHPIFGNIVDEVAYHEKYPTIYHLRKKLVDSTDKADLRLIYLALAHMIKFRGHFLIEGDLNPDNSDVDKLFIQLVQTYNQLFEENPINASGVDAKAILSARLSKSRRLENLIAQLPGEKKNGLFGNLIALSLGLTPNFKSNFDLAEDAKLQLSKDTYDDDLDNLLAQIGDQYADLFLAAKNLSDAILLSDILRVNTEITKAPLSASMIKRYDEHHQDLTLLKALVRQQLPEKYKEIFFDQSKNGYAGYIDGGASQEEFYKFIKPILEKMDGTEELLVKLNREDLLRKQRTFDNGSIPHQIHLGELHAILRRQEDFYPFLKDNREKIEKILTFRIPYYVGPLARGNSRFAWMTRKSEETITPWNFEEVVDKGASAQSFIERMTNFDKNLPNEKVLPKHSLLYEYFTVYNELTKVKYVTEGMRKPAFLSGEQKKAIVDLLFKTNRKVTVKQLKEDYFKKIECFDSVEISGVEDRFNASLGTYHDLLKIIKDKDFLDNEENEDILEDIVLTLTLFEDREMIEERLKTYAHLFDDKVMKQLKRRRYTGWGRLSRKLINGIRDKQSGKTILDFLKSDGFANRNFMQLIHDDSLTFKEDIQKAQVSGQGDSLHEHIANLAGSPAIKKGILQTVKVVDELVKVMGRHKPENIVIEMARENQTTQKGQKNSRERMKRIEEGIKELGSQILKEHPVENTQLQNEKLYLYYLQNGRDMYVDQELDINRLSDYDVDHIVPQSFLKDDSIDNKVLTRSDKARGKSDNVPSEEVVKKMKNYWRQLLNAKLITQRKFDNLTKAERGGLSELDKAGFIKRQLVETRQITKHVAQILDSRMNTKYDENDKLIREVKVITLKSKLVSDFRKDFQFYKVREINNYHHAHDAYLNAVVGTALIKKYPKLESEFVYGDYKVYDVRKMIAKSEQEIGKATAKYFFYSNIMNFFKTEITLANGEIRKRPLIETNGETGEIVWDKGRDFATVRKVLSMPQVNIVKKTEVQTGGFSKESILPKRNSDKLIARKKDWDPKKYGGFDSPTVAYSVLVVAKVEKGKSKKLKSVKELLGITIMERSSFEKNPIDFLEAKGYKEVKKDLIIKLPKYSLFELENGRKRMLASAGELQKGNELALPSKYVNFLYLASHYEKLKGSPEDNEQKQLFVEQHKHYLDEIIEQISEFSKRVILADANLDKVLSAYNKHRDKPIREQAENIIHLFTLTNLGAPAAFKYFDTTIDRKRYTSTKEVLDATLIHQSITGLYETRIDLSQLGGDGGGSSPAPEAAAKGGTLNIEDEHRLHETSKEPDVSLGSTWLSDFPQAWAETGGMGLAVRQAPLIIPLKATSTPVSIKQYPMSQEARLGIKPHIQRLLDQGILVPCQSPWNTPLLPVKKPGTNDYRPVQDLREVNKRVEDIHPTVPNPYNLLSGLPPSHQWYTVLDLKDAFFCLRLHPTSQPLFAFEWRDPEMGISGQLTWTRLPQGFKNSPTLFNEALHRDLADFRIQHPDLILLQYVDDLLLAATSELDCQQGTRALLQTLGNLGYRASAKKAQICQKQVKYLGYLLKEGQRWLTEARKETVMGQPTPKTPRQLREFLGTAGFCRLWIPGFAEMAAPLYPLTKPGTLFNWGPDQQKAYQEIKQALLTAPALGLPDLTKPFELFVDEKQGYAKGVLTQKLGPWRRPVAYLSKKLDPVAAGWPPCLRMVAAIAVLTKDAGKLTMGQPLVILAPHAVEALVKQPPDRWLSNARMTHYQALLLDTDRVQFGPVVALNPATLLPLPEEGLQHNCLDILAEAHGTRPDLTDQPLPDADHTWYTDGSSLLQEGQRKAGAAVTTETEVIWAKALPAGTSAQRAELIALTQALKMAEGKKLNVYTDSRYAFATAHIHGEIYRRRGWLTSEGKEIKNKDEILALLKALFLPKRLSIIHCPGHQKGHSAEARGNRMADQAARKAAITETPDTSTLLAGKRTADGSEFEKRTADGSEFESPKKKAKVE

SEQ ID NO: 2759 - protein, 2096 aa, synthetic construct
MPAAKRVKLDGGDKKYSIGLDIGTNSVGWAVITDEYKVPSKKFKVLGNTDRHSIKKNLIGALLFDSGETAEATRLKRTARRRYTRRKNRICYLQEIFSNEMAKVDDSFFHRLEESFLVEEDKKHERHPIFGNIVDEVAYHEKYPTIYHLRKKLVDSTDKADLRLIYLALAHMIKFRGHFLIEGDLNPDNSDVDKLFIQLVQTYNQLFEENPINASGVDAKAILSARLSKSRRLENLIAQLPGEKKNGLFGNLIALSLGLTPNFKSNFDLAEDAKLQLSKDTYDDDLDNLLAQIGDQYADLFLAAKNLSDAILLSDILRVNTEITKAPLSASMIKRYDEHHQDLTLLKALVRQQLPEKYKEIFFDQSKNGYAGYIDGGASQEEFYKFIKPILEKMDGTEELLVKLNREDLLRKQRTFDNGSIPHQIHLGELHAILRRQEDFYPFLKDNREKIEKILTFRIPYYVGPLARGNSRFAWMTRKSEETITPWNFEEVVDKGASAQSFIERMTNFDKNLPNEKVLPKHSLLYEYFTVYNELTKVKYVTEGMRKPAFLSGEQKKAIVDLLFKTNRKVTVKQLKEDYFKKIECFDSVEISGVEDRFNASLGTYHDLLKIIKDKDFLDNEENEDILEDIVLTLTLFEDREMIEERLKTYAHLFDDKVMKQLKRRRYTGWGRLSRKLINGIRDKQSGKTILDFLKSDGFANRNFMQLIHDDSLTFKEDIQKAQVSGQGDSLHEHIANLAGSPAIKKGILQTVKVVDELVKVMGRHKPENIVIEMARENQTTQKGQKNSRERMKRIEEGIKELGSQILKEHPVENTQLQNEKLYLYYLQNGRDMYVDQELDINRLSDYDVDHIVPQSFLKDDSIDNKVLTRSDKARGKSDNVPSEEVVKKMKNYWRQLLNAKLITQRKFDNLTKAERGGLSELDKAGFIKRQLVETRQITKHVAQILDSRMNTKYDENDKLIREVKVITLKSKLVSDFRKDFQFYKVREINNYHHAHDAYLNAVVGTALIKKYPKLESEFVYGDYKVYDVRKMIAKSEQEIGKATAKYFFYSNIMNFFKTEITLANGEIRKRPLIETNGETGEIVWDKGRDFATVRKVLSMPQVNIVKKTEVQTGGFSKESILPKRNSDKLIARKKDWDPKKYGGFDSPTVAYSVLVVAKVEKGKSKKLKSVKELLGITIMERSSFEKNPIDFLEAKGYKEVKKDLIIKLPKYSLFELENGRKRMLASAGELQKGNELALPSKYVNFLYLASHYEKLKGSPEDNEQKQLFVEQHKHYLDEIIEQISEFSKRVILADANLDKVLSAYNKHRDKPIREQAENIIHLFTLTNLGAPAAFKYFDTTIDRKRYTSTKEVLDATLIHQSITGLYETRIDLSQLGGDGGPAPEAAAKGSSGGTLNIEDEHRLHETSKEPDVSLGSTWLSDFPQAWAETGGMGLAVRQAPLIIPLKATSTPVSIKQYPMSQEARLGIKPHIQRLLDQGILVPCQSPWNTPLLPVKKPGTNDYRPVQDLREVNKRVEDIHPTVPNPYNLLSGLPPSHQWYTVLDLKDAFFCLRLHPTSQPLFAFEWRDPEMGISGQLTWTRLPQGFKNSPTLFNEALHRDLADFRIQHPDLILLQYVDDLLLAATSELDCQQGTRALLQTLGNLGYRASAKKAQICQKQVKYLGYLLKEGQRWLTEARKETVMGQPTPKTPRQLREFLGTAGFCRLWIPGFAEMAAPLYPLTKPGTLFNWGPDQQKAYQEIKQALLTAPALGLPDLTKPFELFVDEKQGYAKGVLTQKLGPWRRPVAYLSKKLDPVAAGWPPCLRMVAAIAVLTKDAGKLTMGQPLVILAPHAVEALVKQPPDRWLSNARMTHYQALLLDTDRVQFGPVVALNPATLLPLPEEGLQHNCLDILAEAHGTRPDLTDQPLPDADHTWYTDGSSLLQEGQRKAGAAVTTETEVIWAKALPAGTSAQRAELIALTQALKMAEGKKLNVYTDSRYAFATAHIHGEIYRRRGWLTSEGKEIKNKDEILALLKALFLPKRLSIIHCPGHQKGHSAEARGNRMADQAARKAAITETPDTSTLLAGKRTADGSEFEKRTADGSEFESPKKKAKVE

SEQ ID NO: 2760 - protein, 2096 aa, synthetic construct
MPAAKRVKLDGGDKKYSIGLDIGTNSVGWAVITDEYKVPSKKFKVLGNTDRHSIKKNLIGALLFDSGETAEATRLKRTARRRYTRRKNRICYLQEIFSNEMAKVDDSFFHRLEESFLVEEDKKHERHPIFGNIVDEVAYHEKYPTIYHLRKKLVDSTDKADLRLIYLALAHMIKFRGHFLIEGDLNPDNSDVDKLFIQLVQTYNQLFEENPINASGVDAKAILSARLSKSRRLENLIAQLPGEKKNGLFGNLIALSLGLTPNFKSNFDLAEDAKLQLSKDTYDDDLDNLLAQIGDQYADLFLAAKNLSDAILLSDILRVNTEITKAPLSASMIKRYDEHHQDLTLLKALVRQQLPEKYKEIFFDQSKNGYAGYIDGGASQEEFYKFIKPILEKMDGTEELLVKLNREDLLRKQRTFDNGSIPHQIHLGELHAILRRQEDFYPFLKDNREKIEKILTFRIPYYVGPLARGNSRFAWMTRKSEETITPWNFEEVVDKGASAQSFIERMTNFDKNLPNEKVLPKHSLLYEYFTVYNELTKVKYVTEGMRKPAFLSGEQKKAIVDLLFKTNRKVTVKQLKEDYFKKIECFDSVEISGVEDRFNASLGTYHDLLKIIKDKDFLDNEENEDILEDIVLTLTLFEDREMIEERLKTYAHLFDDKVMKQLKRRRYTGWGRLSRKLINGIRDKQSGKTILDFLKSDGFANRNFMQLIHDDSLTFKEDIQKAQVSGQGDSLHEHIANLAGSPAIKKGILQTVKVVDELVKVMGRHKPENIVIEMARENQTTQKGQKNSRERMKRIEEGIKELGSQILKEHPVENTQLQNEKLYLYYLQNGRDMYVDQELDINRLSDYDVDHIVPQSFLKDDSIDNKVLTRSDKARGKSDNVPSEEVVKKMKNYWRQLLNAKLITQRKFDNLTKAERGGLSELDKAGFIKRQLVETRQITKHVAQILDSRMNTKYDENDKLIREVKVITLKSKLVSDFRKDFQFYKVREINNYHHAHDAYLNAVVGTALIKKYPKLESEFVYGDYKVYDVRKMIAKSEQEIGKATAKYFFYSNIMNFFKTEITLANGEIRKRPLIETNGETGEIVWDKGRDFATVRKVLSMPQVNIVKKTEVQTGGFSKESILPKRNSDKLIARKKDWDPKKYGGFDSPTVAYSVLVVAKVEKGKSKKLKSVKELLGITIMERSSFEKNPIDFLEAKGYKEVKKDLIIKLPKYSLFELENGRKRMLASAGELQKGNELALPSKYVNFLYLASHYEKLKGSPEDNEQKQLFVEQHKHYLDEIIEQISEFSKRVILADANLDKVLSAYNKHRDKPIREQAENIIHLFTLTNLGAPAAFKYFDTTIDRKRYTSTKEVLDATLIHQSITGLYETRIDLSQLGGDGGGSSGGSEAAAKGGTLNIEDEHRLHETSKEPDVSLGSTWLSDFPQAWAETGGMGLAVRQAPLIIPLKATSTPVSIKQYPMSQEARLGIKPHIQRLLDQGILVPCQSPWNTPLLPVKKPGTNDYRPVQDLREVNKRVEDIHPTVPNPYNLLSGLPPSHQWYTVLDLKDAFFCLRLHPTSQPLFAFEWRDPEMGISGQLTWTRLPQGFKNSPTLFNEALHRDLADFRIQHPDLILLQYVDDLLLAATSELDCQQGTRALLQTLGNLGYRASAKKAQICQKQVKYLGYLLKEGQRWLTEARKETVMGQPTPKTPRQLREFLGTAGFCRLWIPGFAEMAAPLYPLTKPGTLFNWGPDQQKAYQEIKQALLTAPALGLPDLTKPFELFVDEKQGYAKGVLTQKLGPWRRPVAYLSKKLDPVAAGWPPCLRMVAAIAVLTKDAGKLTMGQPLVILAPHAVEALVKQPPDRWLSNARMTHYQALLLDTDRVQFGPVVALNPATLLPLPEEGLQHNCLDILAEAHGTRPDLTDQPLPDADHTWYTDGSSLLQEGQRKAGAAVTTETEVIWAKALPAGTSAQRAELIALTQALKMAEGKKLNVYTDSRYAFATAHIHGEIYRRRGWLTSEGKEIKNKDEILALLKALFLPKRLSIIHCPGHQKGHSAEARGNRMADQAARKAAITETPDTSTLLAGKRTADGSEFEKRTADGSEFESPKKKAKVE

SEQ ID NO: 2761 - protein, 2096 aa, synthetic construct
MPAAKRVKLDGGDKKYSIGLDIGTNSVGWAVITDEYKVPSKKFKVLGNTDRHSIKKNLIGALLFDSGETAEATRLKRTARRRYTRRKNRICYLQEIFSNEMAKVDDSFFHRLEESFLVEEDKKHERHPIFGNIVDEVAYHEKYPTIYHLRKKLVDSTDKADLRLIYLALAHMIKFRGHFLIEGDLNPDNSDVDKLFIQLVQTYNQLFEENPINASGVDAKAILSARLSKSRRLENLIAQLPGEKKNGLFGNLIALSLGLTPNFKSNFDLAEDAKLQLSKDTYDDDLDNLLAQIGDQYADLFLAAKNLSDAILLSDILRVNTEITKAPLSASMIKRYDEHHQDLTLLKALVRQQLPEKYKEIFFDQSKNGYAGYIDGGASQEEFYKFIKPILEKMDGTEELLVKLNREDLLRKQRTFDNGSIPHQIHLGELHAILRRQEDFYPFLKDNREKIEKILTFRIPYYVGPLARGNSRFAWMTRKSEETITPWNFEEVVDKGASAQSFIERMTNFDKNLPNEKVLPKHSLLYEYFTVYNELTKVKYVTEGMRKPAFLSGEQKKAIVDLLFKTNRKVTVKQLKEDYFKKIECFDSVEISGVEDRFNASLGTYHDLLKIIKDKDFLDNEENEDILEDIVLTLTLFEDREMIEERLKTYAHLFDDKVMKQLKRRRYTGWGRLSRKLINGIRDKQSGKTILDFLKSDGFANRNFMQLIHDDSLTFKEDIQKAQVSGQGDSLHEHIANLAGSPAIKKGILQTVKVVDELVKVMGRHKPENIVIEMARENQTTQKGQKNSRERMKRIEEGIKELGSQILKEHPVENTQLQNEKLYLYYLQNGRDMYVDQELDINRLSDYDVDHIVPQSFLKDDSIDNKVLTRSDKARGKSDNVPSEEVVKKMKNYWRQLLNAKLITQRKFDNLTKAERGGLSELDKAGFIKRQLVETRQITKHVAQILDSRMNTKYDENDKLIREVKVITLKSKLVSDFRKDFQFYKVREINNYHHAHDAYLNAVVGTALIKKYPKLESEFVYGDYKVYDVRKMIAKSEQEIGKATAKYFFYSNIMNFFKTEITLANGEIRKRPLIETNGETGEIVWDKGRDFATVRKVLSMPQVNIVKKTEVQTGGFSKESILPKRNSDKLIARKKDWDPKKYGGFDSPTVAYSVLVVAKVEKGKSKKLKSVKELLGITIMERSSFEKNPIDFLEAKGYKEVKKDLIIKLPKYSLFELENGRKRMLASAGELQKGNELALPSKYVNFLYLASHYEKLKGSPEDNEQKQLFVEQHKHYLDEIIEQISEFSKRVILADANLDKVLSAYNKHRDKPIREQAENIIHLFTLTNLGAPAAFKYFDTTIDRKRYTSTKEVLDATLIHQSITGLYETRIDLSQLGGDGGGGSEAAAKGSSGGTLNIEDEHRLHETSKEPDVSLGSTWLSDFPQAWAETGGMGLAVRQAPLIIPLKATSTPVSIKQYPMSQEARLGIKPHIQRLLDQGILVPCQSPWNTPLLPVKKPGTNDYRPVQDLREVNKRVEDIHPTVPNPYNLLSGLPPSHQWYTVLDLKDAFFCLRLHPTSQPLFAFEWRDPEMGISGQLTWTRLPQGFKNSPTLFNEALHRDLADFRIQHPDLILLQYVDDLLLAATSELDCQQGTRALLQTLGNLGYRASAKKAQICQKQVKYLGYLLKEGQRWLTEARKETVMGQPTPKTPRQLREFLGTAGFCRLWIPGFAEMAAPLYPLTKPGTLFNWGPDQQKAYQEIKQALLTAPALGLPDLTKPFELFVDEKQGYAKGVLTQKLGPWRRPVAYLSKKLDPVAAGWPPCLRMVAAIAVLTKDAGKLTMGQPLVILAPHAVEALVKQPPDRWLSNARMTHYQALLLDTDRVQFGPVVALNPATLLPLPEEGLQHNCLDILAEAHGTRPDLTDQPLPDADHTWYTDGSSLLQEGQRKAGAAVTTETEVIWAKALPAGTSAQRAELIALTQALKMAEGKKLNVYTDSRYAFATAHIHGEIYRRRGWLTSEGKEIKNKDEILALLKALFLPKRLSIIHCPGHQKGHSAEARGNRMADQAARKAAITETPDTSTLLAGKRTADGSEFEKRTADGSEFESPKKKAKVE

SEQ ID NO: 2762 - protein, 2094 aa, synthetic construct
MPAAKRVKLDGGDKKYSIGLDIGTNSVGWAVITDEYKVPSKKFKVLGNTDRHSIKKNLIGALLFDSGETAEATRLKRTARRRYTRRKNRICYLQEIFSNEMAKVDDSFFHRLEESFLVEEDKKHERHPIFGNIVDEVAYHEKYPTIYHLRKKLVDSTDKADLRLIYLALAHMIKFRGHFLIEGDLNPDNSDVDKLFIQLVQTYNQLFEENPINASGVDAKAILSARLSKSRRLENLIAQLPGEKKNGLFGNLIALSLGLTPNFKSNFDLAEDAKLQLSKDTYDDDLDNLLAQIGDQYADLFLAAKNLSDAILLSDILRVNTEITKAPLSASMIKRYDEHHQDLTLLKALVRQQLPEKYKEIFFDQSKNGYAGYIDGGASQEEFYKFIKPILEKMDGTEELLVKLNREDLLRKQRTFDNGSIPHQIHLGELHAILRRQEDFYPFLKDNREKIEKILTFRIPYYVGPLARGNSRFAWMTRKSEETITPWNFEEVVDKGASAQSFIERMTNFDKNLPNEKVLPKHSLLYEYFTVYNELTKVKYVTEGMRKPAFLSGEQKKAIVDLLFKTNRKVTVKQLKEDYFKKIECFDSVEISGVEDRFNASLGTYHDLLKIIKDKDFLDNEENEDILEDIVLTLTLFEDREMIEERLKTYAHLFDDKVMKQLKRRRYTGWGRLSRKLINGIRDKQSGKTILDFLKSDGFANRNFMQLIHDDSLTFKEDIQKAQVSGQGDSLHEHIANLAGSPAIKKGILQTVKVVDELVKVMGRHKPENIVIEMARENQTTQKGQKNSRERMKRIEEGIKELGSQILKEHPVENTQLQNEKLYLYYLQNGRDMYVDQELDINRLSDYDVDHIVPQSFLKDDSIDNKVLTRSDKARGKSDNVPSEEVVKKMKNYWRQLLNAKLITQRKFDNLTKAERGGLSELDKAGFIKRQLVETRQITKHVAQILDSRMNTKYDENDKLIREVKVITLKSKLVSDFRKDFQFYKVREINNYHHAHDAYLNAVVGTALIKKYPKLESEFVYGDYKVYDVRKMIAKSEQEIGKATAKYFFYSNIMNFFKTEITLANGEIRKRPLIETNGETGEIVWDKGRDFATVRKVLSMPQVNIVKKTEVQTGGFSKESILPKRNSDKLIARKKDWDPKKYGGFDSPTVAYSVLVVAKVEKGKSKKLKSVKELLGITIMERSSFEKNPIDFLEAKGYKEVKKDLIIKLPKYSLFELENGRKRMLASAGELQKGNELALPSKYVNFLYLASHYEKLKGSPEDNEQKQLFVEQHKHYLDEIIEQISEFSKRVILADANLDKVLSAYNKHRDKPIREQAENIIHLFTLTNLGAPAAFKYFDTTIDRKRYTSTKEVLDATLIHQSITGLYETRIDLSQLGGDGGGGSPAPGGGGGTLNIEDEHRLHETSKEPDVSLGSTWLSDFPQAWAETGGMGLAVRQAPLIIPLKATSTPVSIKQYPMSQEARLGIKPHIQRLLDQGILVPCQSPWNTPLLPVKKPGTNDYRPVQDLREVNKRVEDIHPTVPNPYNLLSGLPPSHQWYTVLDLKDAFFCLRLHPTSQPLFAFEWRDPEMGISGQLTWTRLPQGFKNSPTLFNEALHRDLADFRIQHPDLILLQYVDDLLLAATSELDCQQGTRALLQTLGNLGYRASAKKAQICQKQVKYLGYLLKEGQRWLTEARKETVMGQPTPKTPRQLREFLGTAGFCRLWIPGFAEMAAPLYPLTKPGTLFNWGPDQQKAYQEIKQALLTAPALGLPDLTKPFELFVDEKQGYAKGVLTQKLGPWRRPVAYLSKKLDPVAAGWPPCLRMVAAIAVLTKDAGKLTMGQPLVILAPHAVEALVKQPPDRWLSNARMTHYQALLLDTDRVQFGPVVALNPATLLPLPEEGLQHNCLDILAEAHGTRPDLTDQPLPDADHTWYTDGSSLLQEGQRKAGAAVTTETEVIWAKALPAGTSAQRAELIALTQALKMAEGKKLNVYTDSRYAFATAHIHGEIYRRRGWLTSEGKEIKNKDEILALLKALFLPKRLSIIHCPGHQKGHSAEARGNRMADQAARKAAITETPDTSTLLAGKRTADGSEFEKRTADGSEFESPKKKAKVE

SEQ ID NO: 2763 - protein, 2097 aa, synthetic construct
MPAAKRVKLDGGDKKYSIGLDIGTNSVGWAVITDEYKVPSKKFKVLGNTDRHSIKKNLIGALLFDSGETAEATRLKRTARRRYTRRKNRICYLQEIFSNEMAKVDDSFFHRLEESFLVEEDKKHERHPIFGNIVDEVAYHEKYPTIYHLRKKLVDSTDKADLRLIYLALAHMIKFRGHFLIEGDLNPDNSDVDKLFIQLVQTYNQLFEENPINASGVDAKAILSARLSKSRRLENLIAQLPGEKKNGLFGNLIALSLGLTPNFKSNFDLAEDAKLQLSKDTYDDDLDNLLAQIGDQYADLFLAAKNLSDAILLSDILRVNTEITKAPLSASMIKRYDEHHQDLTLLKALVRQQLPEKYKEIFFDQSKNGYAGYIDGGASQEEFYKFIKPILEKMDGTEELLVKLNREDLLRKQRTFDNGSIPHQIHLGELHAILRRQEDFYPFLKDNREKIEKILTFRIPYYVGPLARGNSRFAWMTRKSEETITPWNFEEVVDKGASAQSFIERMTNFDKNLPNEKVLPKHSLLYEYFTVYNELTKVKYVTEGMRKPAFLSGEQKKAIVDLLFKTNRKVTVKQLKEDYFKKIECFDSVEISGVEDRFNASLGTYHDLLKIIKDKDFLDNEENEDILEDIVLTLTLFEDREMIEERLKTYAHLFDDKVMKQLKRRRYTGWGRLSRKLINGIRDKQSGKTILDFLKSDGFANRNFMQLIHDDSLTFKEDIQKAQVSGQGDSLHEHIANLAGSPAIKKGILQTVKVVDELVKVMGRHKPENIVIEMARENQTTQKGQKNSRERMKRIEEGIKELGSQILKEHPVENTQLQNEKLYLYYLQNGRDMYVDQELDINRLSDYDVDHIVPQSFLKDDSIDNKVLTRSDKARGKSDNVPSEEVVKKMKNYWRQLLNAKLITQRKFDNLTKAERGGLSELDKAGFIKRQLVETRQITKHVAQILDSRMNTKYDENDKLIREVKVITLKSKLVSDFRKDFQFYKVREINNYHHAHDAYLNAVVGTALIKKYPKLESEFVYGDYKVYDVRKMIAKSEQEIGKATAKYFFYSNIMNFFKTEITLANGEIRKRPLIETNGETGEIVWDKGRDFATVRKVLSMPQVNIVKKTEVQTGGFSKESILPKRNSDKLIARKKDWDPKKYGGFDSPTVAYSVLVVAKVEKGKSKKLKSVKELLGITIMERSSFEKNPIDFLEAKGYKEVKKDLIIKLPKYSLFELENGRKRMLASAGELQKGNELALPSKYVNFLYLASHYEKLKGSPEDNEQKQLFVEQHKHYLDEIIEQISEFSKRVILADANLDKVLSAYNKHRDKPIREQAENIIHLFTLTNLGAPAAFKYFDTTIDRKRYTSTKEVLDATLIHQSITGLYETRIDLSQLGGDGGGGSGGSGGSGGSGGTLNIEDEHRLHETSKEPDVSLGSTWLSDFPQAWAETGGMGLAVRQAPLIIPLKATSTPVSIKQYPMSQEARLGIKPHIQRLLDQGILVPCQSPWNTPLLPVKKPGTNDYRPVQDLREVNKRVEDIHPTVPNPYNLLSGLPPSHQWYTVLDLKDAFFCLRLHPTSQPLFAFEWRDPEMGISGQLTWTRLPQGFKNSPTLFNEALHRDLADFRIQHPDLILLQYVDDLLLAATSELDCQQGTRALLQTLGNLGYRASAKKAQICQKQVKYLGYLLKEGQRWLTEARKETVMGQPTPKTPRQLREFLGTAGFCRLWIPGFAEMAAPLYPLTKPGTLFNWGPDQQKAYQEIKQALLTAPALGLPDLTKPFELFVDEKQGYAKGVLTQKLGPWRRPVAYLSKKLDPVAAGWPPCLRMVAAIAVLTKDAGKLTMGQPLVILAPHAVEALVKQPPDRWLSNARMTHYQALLLDTDRVQFGPVVALNPATLLPLPEEGLQHNCLDILAEAHGTRPDLTDQPLPDADHTWYTDGSSLLQEGQRKAGAAVTTETEVIWAKALPAGTSAQRAELIALTQALKMAEGKKLNVYTDSRYAFATAHIHGEIYRRRGWLTSEGKEIKNKDEILALLKALFLPKRLSIIHCPGHQKGHSAEARGNRMADQAARKAAITETPDTSTLLAGKRTADGSEFEKRTADGSEFESPKKKAKVE

SEQ ID NO: 2764 - protein, 2096 aa, synthetic construct
MPAAKRVKLDGGDKKYSIGLDIGTNSVGWAVITDEYKVPSKKFKVLGNTDRHSIKKNLIGALLFDSGETAEATRLKRTARRRYTRRKNRICYLQEIFSNEMAKVDDSFFHRLEESFLVEEDKKHERHPIFGNIVDEVAYHEKYPTIYHLRKKLVDSTDKADLRLIYLALAHMIKFRGHFLIEGDLNPDNSDVDKLFIQLVQTYNQLFEENPINASGVDAKAILSARLSKSRRLENLIAQLPGEKKNGLFGNLIALSLGLTPNFKSNFDLAEDAKLQLSKDTYDDDLDNLLAQIGDQYADLFLAAKNLSDAILLSDILRVNTEITKAPLSASMIKRYDEHHQDLTLLKALVRQQLPEKYKEIFFDQSKNGYAGYIDGGASQEEFYKFIKPILEKMDGTEELLVKLNREDLLRKQRTFDNGSIPHQIHLGELHAILRRQEDFYPFLKDNREKIEKILTFRIPYYVGPLARGNSRFAWMTRKSEETITPWNFEEVVDKGASAQSFIERMTNFDKNLPNEKVLPKHSLLYEYFTVYNELTKVKYVTEGMRKPAFLSGEQKKAIVDLLFKTNRKVTVKQLKEDYFKKIECFDSVEISGVEDRFNASLGTYHDLLKIIKDKDFLDNEENEDILEDIVLTLTLFEDREMIEERLKTYAHLFDDKVMKQLKRRRYTGWGRLSRKLINGIRDKQSGKTILDFLKSDGFANRNFMQLIHDDSLTFKEDIQKAQVSGQGDSLHEHIANLAGSPAIKKGILQTVKVVDELVKVMGRHKPENIVIEMARENQTTQKGQKNSRERMKRIEEGIKELGSQILKEHPVENTQLQNEKLYLYYLQNGRDMYVDQELDINRLSDYDVDHIVPQSFLKDDSIDNKVLTRSDKARGKSDNVPSEEVVKKMKNYWRQLLNAKLITQRKFDNLTKAERGGLSELDKAGFIKRQLVETRQITKHVAQILDSRMNTKYDENDKLIREVKVITLKSKLVSDFRKDFQFYKVREINNYHHAHDAYLNAVVGTALIKKYPKLESEFVYGDYKVYDVRKMIAKSEQEIGKATAKYFFYSNIMNFFKTEITLANGEIRKRPLIETNGETGEIVWDKGRDFATVRKVLSMPQVNIVKKTEVQTGGFSKESILPKRNSDKLIARKKDWDPKKYGGFDSPTVAYSVLVVAKVEKGKSKKLKSVKELLGITIMERSSFEKNPIDFLEAKGYKEVKKDLIIKLPKYSLFELENGRKRMLASAGELQKGNELALPSKYVNFLYLASHYEKLKGSPEDNEQKQLFVEQHKHYLDEIIEQISEFSKRVILADANLDKVLSAYNKHRDKPIREQAENIIHLFTLTNLGAPAAFKYFDTTIDRKRYTSTKEVLDATLIHQSITGLYETRIDLSQLGGDGGGGGGSSEAAAKGGTLNIEDEHRLHETSKEPDVSLGSTWLSDFPQAWAETGGMGLAVRQAPLIIPLKATSTPVSIKQYPMSQEARLGIKPHIQRLLDQGILVPCQSPWNTPLLPVKKPGTNDYRPVQDLREVNKRVEDIHPTVPNPYNLLSGLPPSHQWYTVLDLKDAFFCLRLHPTSQPLFAFEWRDPEMGISGQLTWTRLPQGFKNSPTLFNEALHRDLADFRIQHPDLILLQYVDDLLLAATSELDCQQGTRALLQTLGNLGYRASAKKAQICQKQVKYLGYLLKEGQRWLTEARKETVMGQPTPKTPRQLREFLGTAGFCRLWIPGFAEMAAPLYPLTKPGTLFNWGPDQQKAYQEIKQALLTAPALGLPDLTKPFELFVDEKQGYAKGVLTQKLGPWRRPVAYLSKKLDPVAAGWPPCLRMVAAIAVLTKDAGKLTMGQPLVILAPHAVEALVKQPPDRWLSNARMTHYQALLLDTDRVQFGPVVALNPATLLPLPEEGLQHNCLDILAEAHGTRPDLTDQPLPDADHTWYTDGSSLLQEGQRKAGAAVTTETEVIWAKALPAGTSAQRAELIALTQALKMAEGKKLNVYTDSRYAFATAHIHGEIYRRRGWLTSEGKEIKNKDEILALLKALFLPKRLSIIHCPGHQKGHSAEARGNRMADQAARKAAITETPDTSTLLAGKRTADGSEFEKRTADGSEFESPKKKAKVE

SEQ ID NO: 2765 - protein, 2096 aa, synthetic construct
MPAAKRVKLDGGDKKYSIGLDIGTNSVGWAVITDEYKVPSKKFKVLGNTDRHSIKKNLIGALLFDSGETAEATRLKRTARRRYTRRKNRICYLQEIFSNEMAKVDDSFFHRLEESFLVEEDKKHERHPIFGNIVDEVAYHEKYPTIYHLRKKLVDSTDKADLRLIYLALAHMIKFRGHFLIEGDLNPDNSDVDKLFIQLVQTYNQLFEENPINASGVDAKAILSARLSKSRRLENLIAQLPGEKKNGLFGNLIALSLGLTPNFKSNFDLAEDAKLQLSKDTYDDDLDNLLAQIGDQYADLFLAAKNLSDAILLSDILRVNTEITKAPLSASMIKRYDEHHQDLTLLKALVRQQLPEKYKEIFFDQSKNGYAGYIDGGASQEEFYKFIKPILEKMDGTEELLVKLNREDLLRKQRTFDNGSIPHQIHLGELHAILRRQEDFYPFLKDNREKIEKILTFRIPYYVGPLARGNSRFAWMTRKSEETITPWNFEEVVDKGASAQSFIERMTNFDKNLPNEKVLPKHSLLYEYFTVYNELTKVKYVTEGMRKPAFLSGEQKKAIVDLLFKTNRKVTVKQLKEDYFKKIECFDSVEISGVEDRFNASLGTYHDLLKIIKDKDFLDNEENEDILEDIVLTLTLFEDREMIEERLKTYAHLFDDKVMKQLKRRRYTGWGRLSRKLINGIRDKQSGKTILDFLKSDGFANRNFMQLIHDDSLTFKEDIQKAQVSGQGDSLHEHIANLAGSPAIKKGILQTVKVVDELVKVMGRHKPENIVIEMARENQTTQKGQKNSRERMKRIEEGIKELGSQILKEHPVENTQLQNEKLYLYYLQNGRDMYVDQELDINRLSDYDVDHIVPQSFLKDDSIDNKVLTRSDKARGKSDNVPSEEVVKKMKNYWRQLLNAKLITQRKFDNLTKAERGGLSELDKAGFIKRQLVETRQITKHVAQILDSRMNTKYDENDKLIREVKVITLKSKLVSDFRKDFQFYKVREINNYHHAHDAYLNAVVGTALIKKYPKLESEFVYGDYKVYDVRKMIAKSEQEIGKATAKYFFYSNIMNFFKTEITLANGEIRKRPLIETNGETGEIVWDKGRDFATVRKVLSMPQVNIVKKTEVQTGGFSKESILPKRNSDKLIARKKDWDPKKYGGFDSPTVAYSVLVVAKVEKGKSKKLKSVKELLGITIMERSSFEKNPIDFLEAKGYKEVKKDLIIKLPKYSLFELENGRKRMLASAGELQKGNELALPSKYVNFLYLASHYEKLKGSPEDNEQKQLFVEQHKHYLDEIIEQISEFSKRVILADANLDKVLSAYNKHRDKPIREQAENIIHLFTLTNLGAPAAFKYFDTTIDRKRYTSTKEVLDATLIHQSITGLYETRIDLSQLGGDGGEAAAKPAPGGGGGTLNIEDEHRLHETSKEPDVSLGSTWLSDFPQAWAETGGMGLAVRQAPLIIPLKATSTPVSIKQYPMSQEARLGIKPHIQRLLDQGILVPCQSPWNTPLLPVKKPGTNDYRPVQDLREVNKRVEDIHPTVPNPYNLLSGLPPSHQWYTVLDLKDAFFCLRLHPTSQPLFAFEWRDPEMGISGQLTWTRLPQGFKNSPTLFNEALHRDLADFRIQHPDLILLQYVDDLLLAATSELDCQQGTRALLQTLGNLGYRASAKKAQICQKQVKYLGYLLKEGQRWLTEARKETVMGQPTPKTPRQLREFLGTAGFCRLWIPGFAEMAAPLYPLTKPGTLFNWGPDQQKAYQEIKQALLTAPALGLPDLTKPFELFVDEKQGYAKGVLTQKLGPWRRPVAYLSKKLDPVAAGWPPCLRMVAAIAVLTKDAGKLTMGQPLVILAPHAVEALVKQPPDRWLSNARMTHYQALLLDTDRVQFGPVVALNPATLLPLPEEGLQHNCLDILAEAHGTRPDLTDQPLPDADHTWYTDGSSLLQEGQRKAGAAVTTETEVIWAKALPAGTSAQRAELIALTQALKMAEGKKLNVYTDSRYAFATAHIHGEIYRRRGWLTSEGKEIKNKDEILALLKALFLPKRLSIIHCPGHQKGHSAEARGNRMADQAARKAAITETPDTSTLLAGKRTADGSEFEKRTADGSEFESPKKKAKVE

SEQ ID NO: 2766 - protein, 2094 aa, synthetic construct
MPAAKRVKLDGGDKKYSIGLDIGTNSVGWAVITDEYKVPSKKFKVLGNTDRHSIKKNLIGALLFDSGETAEATRLKRTARRRYTRRKNRICYLQEIFSNEMAKVDDSFFHRLEESFLVEEDKKHERHPIFGNIVDEVAYHEKYPTIYHLRKKLVDSTDKADLRLIYLALAHMIKFRGHFLIEGDLNPDNSDVDKLFIQLVQTYNQLFEENPINASGVDAKAILSARLSKSRRLENLIAQLPGEKKNGLFGNLIALSLGLTPNFKSNFDLAEDAKLQLSKDTYDDDLDNLLAQIGDQYADLFLAAKNLSDAILLSDILRVNTEITKAPLSASMIKRYDEHHQDLTLLKALVRQQLPEKYKEIFFDQSKNGYAGYIDGGASQEEFYKFIKPILEKMDGTEELLVKLNREDLLRKQRTFDNGSIPHQIHLGELHAILRRQEDFYPFLKDNREKIEKILTFRIPYYVGPLARGNSRFAWMTRKSEETITPWNFEEVVDKGASAQSFIERMTNFDKNLPNEKVLPKHSLLYEYFTVYNELTKVKYVTEGMRKPAFLSGEQKKAIVDLLFKTNRKVTVKQLKEDYFKKIECFDSVEISGVEDRFNASLGTYHDLLKIIKDKDFLDNEENEDILEDIVLTLTLFEDREMIEERLKTYAHLFDDKVMKQLKRRRYTGWGRLSRKLINGIRDKQSGKTILDFLKSDGFANRNFMQLIHDDSLTFKEDIQKAQVSGQGDSLHEHIANLAGSPAIKKGILQTVKVVDELVKVMGRHKPENIVIEMARENQTTQKGQKNSRERMKRIEEGIKELGSQILKEHPVENTQLQNEKLYLYYLQNGRDMYVDQELDINRLSDYDVDHIVPQSFLKDDSIDNKVLTRSDKARGKSDNVPSEEVVKKMKNYWRQLLNAKLITQRKFDNLTKAERGGLSELDKAGFIKRQLVETRQITKHVAQILDSRMNTKYDENDKLIREVKVITLKSKLVSDFRKDFQFYKVREINNYHHAHDAYLNAVVGTALIKKYPKLESEFVYGDYKVYDVRKMIAKSEQEIGKATAKYFFYSNIMNFFKTEITLANGEIRKRPLIETNGETGEIVWDKGRDFATVRKVLSMPQVNIVKKTEVQTGGFSKESILPKRNSDKLIARKKDWDPKKYGGFDSPTVAYSVLVVAKVEKGKSKKLKSVKELLGITIMERSSFEKNPIDFLEAKGYKEVKKDLIIKLPKYSLFELENGRKRMLASAGELQKGNELALPSKYVNFLYLASHYEKLKGSPEDNEQKQLFVEQHKHYLDEIIEQISEFSKRVILADANLDKVLSAYNKHRDKPIREQAENIIHLFTLTNLGAPAAFKYFDTTIDRKRYTSTKEVLDATLIHQSITGLYETRIDLSQLGGDGGGGSGGGPAPGGTLNIEDEHRLHETSKEPDVSLGSTWLSDFPQAWAETGGMGLAVRQAPLIIPLKATSTPVSIKQYPMSQEARLGIKPHIQRLLDQGILVPCQSPWNTPLLPVKKPGTNDYRPVQDLREVNKRVEDIHPTVPNPYNLLSGLPPSHQWYTVLDLKDAFFCLRLHPTSQPLFAFEWRDPEMGISGQLTWTRLPQGFKNSPTLFNEALHRDLADFRIQHPDLILLQYVDDLLLAATSELDCQQGTRALLQTLGNLGYRASAKKAQICQKQVKYLGYLLKEGQRWLTEARKETVMGQPTPKTPRQLREFLGTAGFCRLWIPGFAEMAAPLYPLTKPGTLFNWGPDQQKAYQEIKQALLTAPALGLPDLTKPFELFVDEKQGYAKGVLTQKLGPWRRPVAYLSKKLDPVAAGWPPCLRMVAAIAVLTKDAGKLTMGQPLVILAPHAVEALVKQPPDRWLSNARMTHYQALLLDTDRVQFGPVVALNPATLLPLPEEGLQHNCLDILAEAHGTRPDLTDQPLPDADHTWYTDGSSLLQEGQRKAGAAVTTETEVIWAKALPAGTSAQRAELIALTQALKMAEGKKLNVYTDSRYAFATAHIHGEIYRRRGWLTSEGKEIKNKDEILALLKALFLPKRLSIIHCPGHQKGHSAEARGNRMADQAARKAAITETPDTSTLLAGKRTADGSEFEKRTADGSEFESPKKKAKVE

SEQ ID NO: 2767 - protein, 2096 aa, synthetic construct
MPAAKRVKLDGGDKKYSIGLDIGTNSVGWAVITDEYKVPSKKFKVLGNTDRHSIKKNLIGALLFDSGETAEATRLKRTARRRYTRRKNRICYLQEIFSNEMAKVDDSFFHRLEESFLVEEDKKHERHPIFGNIVDEVAYHEKYPTIYHLRKKLVDSTDKADLRLIYLALAHMIKFRGHFLIEGDLNPDNSDVDKLFIQLVQTYNQLFEENPINASGVDAKAILSARLSKSRRLENLIAQLPGEKKNGLFGNLIALSLGLTPNFKSNFDLAEDAKLQLSKDTYDDDLDNLLAQIGDQYADLFLAAKNLSDAILLSDILRVNTEITKAPLSASMIKRYDEHHQDLTLLKALVRQQLPEKYKEIFFDQSKNGYAGYIDGGASQEEFYKFIKPILEKMDGTEELLVKLNREDLLRKQRTFDNGSIPHQIHLGELHAILRRQEDFYPFLKDNREKIEKILTFRIPYYVGPLARGNSRFAWMTRKSEETITPWNFEEVVDKGASAQSFIERMTNFDKNLPNEKVLPKHSLLYEYFTVYNELTKVKYVTEGMRKPAFLSGEQKKAIVDLLFKTNRKVTVKQLKEDYFKKIECFDSVEISGVEDRFNASLGTYHDLLKIIKDKDFLDNEENEDILEDIVLTLTLFEDREMIEERLKTYAHLFDDKVMKQLKRRRYTGWGRLSRKLINGIRDKQSGKTILDFLKSDGFANRNFMQLIHDDSLTFKEDIQKAQVSGQGDSLHEHIANLAGSPAIKKGILQTVKVVDELVKVMGRHKPENIVIEMARENQTTQKGQKNSRERMKRIEEGIKELGSQILKEHPVENTQLQNEKLYLYYLQNGRDMYVDQELDINRLSDYDVDHIVPQSFLKDDSIDNKVLTRSDKARGKSDNVPSEEVVKKMKNYWRQLLNAKLITQRKFDNLTKAERGGLSELDKAGFIKRQLVETRQITKHVAQILDSRMNTKYDENDKLIREVKVITLKSKLVSDFRKDFQFYKVREINNYHHAHDAYLNAVVGTALIKKYPKLESEFVYGDYKVYDVRKMIAKSEQEIGKATAKYFFYSNIMNFFKTEITLANGEIRKRPLIETNGETGEIVWDKGRDFATVRKVLSMPQVNIVKKTEVQTGGFSKESILPKRNSDKLIARKKDWDPKKYGGFDSPTVAYSVLVVAKVEKGKSKKLKSVKELLGITIMERSSFEKNPIDFLEAKGYKEVKKDLIIKLPKYSLFELENGRKRMLASAGELQKGNELALPSKYVNFLYLASHYEKLKGSPEDNEQKQLFVEQHKHYLDEIIEQISEFSKRVILADANLDKVLSAYNKHRDKPIREQAENIIHLFTLTNLGAPAAFKYFDTTIDRKRYTSTKEVLDATLIHQSITGLYETRIDLSQLGGDGGEAAAKGGSGGGGGTLNIEDEHRLHETSKEPDVSLGSTWLSDFPQAWAETGGMGLAVRQAPLIIPLKATSTPVSIKQYPMSQEARLGIKPHIQRLLDQGILVPCQSPWNTPLLPVKKPGTNDYRPVQDLREVNKRVEDIHPTVPNPYNLLSGLPPSHQWYTVLDLKDAFFCLRLHPTSQPLFAFEWRDPEMGISGQLTWTRLPQGFKNSPTLFNEALHRDLADFRIQHPDLILLQYVDDLLLAATSELDCQQGTRALLQTLGNLGYRASAKKAQICQKQVKYLGYLLKEGQRWLTEARKETVMGQPTPKTPRQLREFLGTAGFCRLWIPGFAEMAAPLYPLTKPGTLFNWGPDQQKAYQEIKQALLTAPALGLPDLTKPFELFVDEKQGYAKGVLTQKLGPWRRPVAYLSKKLDPVAAGWPPCLRMVAAIAVLTKDAGKLTMGQPLVILAPHAVEALVKQPPDRWLSNARMTHYQALLLDTDRVQFGPVVALNPATLLPLPEEGLQHNCLDILAEAHGTRPDLTDQPLPDADHTWYTDGSSLLQEGQRKAGAAVTTETEVIWAKALPAGTSAQRAELIALTQALKMAEGKKLNVYTDSRYAFATAHIHGEIYRRRGWLTSEGKEIKNKDEILALLKALFLPKRLSIIHCPGHQKGHSAEARGNRMADQAARKAAITETPDTSTLLAGKRTADGSEFEKRTADGSEFESPKKKAKVE

SEQ ID NO: 2768 - protein, 2094 aa, synthetic construct
MPAAKRVKLDGGDKKYSIGLDIGTNSVGWAVITDEYKVPSKKFKVLGNTDRHSIKKNLIGALLFDSGETAEATRLKRTARRRYTRRKNRICYLQEIFSNEMAKVDDSFFHRLEESFLVEEDKKHERHPIFGNIVDEVAYHEKYPTIYHLRKKLVDSTDKADLRLIYLALAHMIKFRGHFLIEGDLNPDNSDVDKLFIQLVQTYNQLFEENPINASGVDAKAILSARLSKSRRLENLIAQLPGEKKNGLFGNLIALSLGLTPNFKSNFDLAEDAKLQLSKDTYDDDLDNLLAQIGDQYADLFLAAKNLSDAILLSDILRVNTEITKAPLSASMIKRYDEHHQDLTLLKALVRQQLPEKYKEIFFDQSKNGYAGYIDGGASQEEFYKFIKPILEKMDGTEELLVKLNREDLLRKQRTFDNGSIPHQIHLGELHAILRRQEDFYPFLKDNREKIEKILTFRIPYYVGPLARGNSRFAWMTRKSEETITPWNFEEVVDKGASAQSFIERMTNFDKNLPNEKVLPKHSLLYEYFTVYNELTKVKYVTEGMRKPAFLSGEQKKAIVDLLFKTNRKVTVKQLKEDYFKKIECFDSVEISGVEDRFNASLGTYHDLLKIIKDKDFLDNEENEDILEDIVLTLTLFEDREMIEERLKTYAHLFDDKVMKQLKRRRYTGWGRLSRKLINGIRDKQSGKTILDFLKSDGFANRNFMQLIHDDSLTFKEDIQKAQVSGQGDSLHEHIANLAGSPAIKKGILQTVKVVDELVKVMGRHKPENIVIEMARENQTTQKGQKNSRERMKRIEEGIKELGSQILKEHPVENTQLQNEKLYLYYLQNGRDMYVDQELDINRLSDYDVDHIVPQSFLKDDSIDNKVLTRSDKARGKSDNVPSEEVVKKMKNYWRQLLNAKLITQRKFDNLTKAERGGLSELDKAGFIKRQLVETRQITKHVAQILDSRMNTKYDENDKLIREVKVITLKSKLVSDFRKDFQFYKVREINNYHHAHDAYLNAVVGTALIKKYPKLESEFVYGDYKVYDVRKMIAKSEQEIGKATAKYFFYSNIMNFFKTEITLANGEIRKRPLIETNGETGEIVWDKGRDFATVRKVLSMPQVNIVKKTEVQTGGFSKESILPKRNSDKLIARKKDWDPKKYGGFDSPTVAYSVLVVAKVEKGKSKKLKSVKELLGITIMERSSFEKNPIDFLEAKGYKEVKKDLIIKLPKYSLFELENGRKRMLASAGELQKGNELALPSKYVNFLYLASHYEKLKGSPEDNEQKQLFVEQHKHYLDEIIEQISEFSKRVILADANLDKVLSAYNKHRDKPIREQAENIIHLFTLTNLGAPAAFKYFDTTIDRKRYTSTKEVLDATLIHQSITGLYETRIDLSQLGGDGGGSSGGSPAPGGTLNIEDEHRLHETSKEPDVSLGSTWLSDFPQAWAETGGMGLAVRQAPLIIPLKATSTPVSIKQYPMSQEARLGIKPHIQRLLDQGILVPCQSPWNTPLLPVKKPGTNDYRPVQDLREVNKRVEDIHPTVPNPYNLLSGLPPSHQWYTVLDLKDAFFCLRLHPTSQPLFAFEWRDPEMGISGQLTWTRLPQGFKNSPTLFNEALHRDLADFRIQHPDLILLQYVDDLLLAATSELDCQQGTRALLQTLGNLGYRASAKKAQICQKQVKYLGYLLKEGQRWLTEARKETVMGQPTPKTPRQLREFLGTAGFCRLWIPGFAEMAAPLYPLTKPGTLFNWGPDQQKAYQEIKQALLTAPALGLPDLTKPFELFVDEKQGYAKGVLTQKLGPWRRPVAYLSKKLDPVAAGWPPCLRMVAAIAVLTKDAGKLTMGQPLVILAPHAVEALVKQPPDRWLSNARMTHYQALLLDTDRVQFGPVVALNPATLLPLPEEGLQHNCLDILAEAHGTRPDLTDQPLPDADHTWYTDGSSLLQEGQRKAGAAVTTETEVIWAKALPAGTSAQRAELIALTQALKMAEGKKLNVYTDSRYAFATAHIHGEIYRRRGWLTSEGKEIKNKDEILALLKALFLPKRLSIIHCPGHQKGHSAEARGNRMADQAARKAAITETPDTSTLLAGKRTADGSEFEKRTADGSEFESPKKKAKVE

SEQ ID NO: 2769 - protein, 2094 aa, synthetic construct
MPAAKRVKLDGGDKKYSIGLDIGTNSVGWAVITDEYKVPSKKFKVLGNTDRHSIKKNLIGALLFDSGETAEATRLKRTARRRYTRRKNRICYLQEIFSNEMAKVDDSFFHRLEESFLVEEDKKHERHPIFGNIVDEVAYHEKYPTIYHLRKKLVDSTDKADLRLIYLALAHMIKFRGHFLIEGDLNPDNSDVDKLFIQLVQTYNQLFEENPINASGVDAKAILSARLSKSRRLENLIAQLPGEKKNGLFGNLIALSLGLTPNFKSNFDLAEDAKLQLSKDTYDDDLDNLLAQIGDQYADLFLAAKNLSDAILLSDILRVNTEITKAPLSASMIKRYDEHHQDLTLLKALVRQQLPEKYKEIFFDQSKNGYAGYIDGGASQEEFYKFIKPILEKMDGTEELLVKLNREDLLRKQRTFDNGSIPHQIHLGELHAILRRQEDFYPFLKDNREKIEKILTFRIPYYVGPLARGNSRFAWMTRKSEETITPWNFEEVVDKGASAQSFIERMTNFDKNLPNEKVLPKHSLLYEYFTVYNELTKVKYVTEGMRKPAFLSGEQKKAIVDLLFKTNRKVTVKQLKEDYFKKIECFDSVEISGVEDRFNASLGTYHDLLKIIKDKDFLDNEENEDILEDIVLTLTLFEDREMIEERLKTYAHLFDDKVMKQLKRRRYTGWGRLSRKLINGIRDKQSGKTILDFLKSDGFANRNFMQLIHDDSLTFKEDIQKAQVSGQGDSLHEHIANLAGSPAIKKGILQTVKVVDELVKVMGRHKPENIVIEMARENQTTQKGQKNSRERMKRIEEGIKELGSQILKEHPVENTQLQNEKLYLYYLQNGRDMYVDQELDINRLSDYDVDHIVPQSFLKDDSIDNKVLTRSDKARGKSDNVPSEEVVKKMKNYWRQLLNAKLITQRKFDNLTKAERGGLSELDKAGFIKRQLVETRQITKHVAQILDSRMNTKYDENDKLIREVKVITLKSKLVSDFRKDFQFYKVREINNYHHAHDAYLNAVVGTALIKKYPKLESEFVYGDYKVYDVRKMIAKSEQEIGKATAKYFFYSNIMNFFKTEITLANGEIRKRPLIETNGETGEIVWDKGRDFATVRKVLSMPQVNIVKKTEVQTGGFSKESILPKRNSDKLIARKKDWDPKKYGGFDSPTVAYSVLVVAKVEKGKSKKLKSVKELLGITIMERSSFEKNPIDFLEAKGYKEVKKDLIIKLPKYSLFELENGRKRMLASAGELQKGNELALPSKYVNFLYLASHYEKLKGSPEDNEQKQLFVEQHKHYLDEIIEQISEFSKRVILADANLDKVLSAYNKHRDKPIREQAENIIHLFTLTNLGAPAAFKYFDTTIDRKRYTSTKEVLDATLIHQSITGLYETRIDLSQLGGDGGGGGGGSPAPGGTLNIEDEHRLHETSKEPDVSLGSTWLSDFPQAWAETGGMGLAVRQAPLIIPLKATSTPVSIKQYPMSQEARLGIKPHIQRLLDQGILVPCQSPWNTPLLPVKKPGTNDYRPVQDLREVNKRVEDIHPTVPNPYNLLSGLPPSHQWYTVLDLKDAFFCLRLHPTSQPLFAFEWRDPEMGISGQLTWTRLPQGFKNSPTLFNEALHRDLADFRIQHPDLILLQYVDDLLLAATSELDCQQGTRALLQTLGNLGYRASAKKAQICQKQVKYLGYLLKEGQRWLTEARKETVMGQPTPKTPRQLREFLGTAGFCRLWIPGFAEMAAPLYPLTKPGTLFNWGPDQQKAYQEIKQALLTAPALGLPDLTKPFELFVDEKQGYAKGVLTQKLGPWRRPVAYLSKKLDPVAAGWPPCLRMVAAIAVLTKDAGKLTMGQPLVILAPHAVEALVKQPPDRWLSNARMTHYQALLLDTDRVQFGPVVALNPATLLPLPEEGLQHNCLDILAEAHGTRPDLTDQPLPDADHTWYTDGSSLLQEGQRKAGAAVTTETEVIWAKALPAGTSAQRAELIALTQALKMAEGKKLNVYTDSRYAFATAHIHGEIYRRRGWLTSEGKEIKNKDEILALLKALFLPKRLSIIHCPGHQKGHSAEARGNRMADQAARKAAITETPDTSTLLAGKRTADGSEFEKRTADGSEFESPKKKAKVE

SEQ ID NO: 2770 - protein, 2094 aa, synthetic construct
MPAAKRVKLDGGDKKYSIGLDIGTNSVGWAVITDEYKVPSKKFKVLGNTDRHSIKKNLIGALLFDSGETAEATRLKRTARRRYTRRKNRICYLQEIFSNEMAKVDDSFFHRLEESFLVEEDKKHERHPIFGNIVDEVAYHEKYPTIYHLRKKLVDSTDKADLRLIYLALAHMIKFRGHFLIEGDLNPDNSDVDKLFIQLVQTYNQLFEENPINASGVDAKAILSARLSKSRRLENLIAQLPGEKKNGLFGNLIALSLGLTPNFKSNFDLAEDAKLQLSKDTYDDDLDNLLAQIGDQYADLFLAAKNLSDAILLSDILRVNTEITKAPLSASMIKRYDEHHQDLTLLKALVRQQLPEKYKEIFFDQSKNGYAGYIDGGASQEEFYKFIKPILEKMDGTEELLVKLNREDLLRKQRTFDNGSIPHQIHLGELHAILRRQEDFYPFLKDNREKIEKILTFRIPYYVGPLARGNSRFAWMTRKSEETITPWNFEEVVDKGASAQSFIERMTNFDKNLPNEKVLPKHSLLYEYFTVYNELTKVKYVTEGMRKPAFLSGEQKKAIVDLLFKTNRKVTVKQLKEDYFKKIECFDSVEISGVEDRFNASLGTYHDLLKIIKDKDFLDNEENEDILEDIVLTLTLFEDREMIEERLKTYAHLFDDKVMKQLKRRRYTGWGRLSRKLINGIRDKQSGKTILDFLKSDGFANRNFMQLIHDDSLTFKEDIQKAQVSGQGDSLHEHIANLAGSPAIKKGILQTVKVVDELVKVMGRHKPENIVIEMARENQTTQKGQKNSRERMKRIEEGIKELGSQILKEHPVENTQLQNEKLYLYYLQNGRDMYVDQELDINRLSDYDVDHIVPQSFLKDDSIDNKVLTRSDKARGKSDNVPSEEVVKKMKNYWRQLLNAKLITQRKFDNLTKAERGGLSELDKAGFIKRQLVETRQITKHVAQILDSRMNTKYDENDKLIREVKVITLKSKLVSDFRKDFQFYKVREINNYHHAHDAYLNAVVGTALIKKYPKLESEFVYGDYKVYDVRKMIAKSEQEIGKATAKYFFYSNIMNFFKTEITLANGEIRKRPLIETNGETGEIVWDKGRDFATVRKVLSMPQVNIVKKTEVQTGGFSKESILPKRNSDKLIARKKDWDPKKYGGFDSPTVAYSVLVVAKVEKGKSKKLKSVKELLGITIMERSSFEKNPIDFLEAKGYKEVKKDLIIKLPKYSLFELENGRKRMLASAGELQKGNELALPSKYVNFLYLASHYEKLKGSPEDNEQKQLFVEQHKHYLDEIIEQISEFSKRVILADANLDKVLSAYNKHRDKPIREQAENIIHLFTLTNLGAPAAFKYFDTTIDRKRYTSTKEVLDATLIHQSITGLYETRIDLSQLGGDGGGGGGSSPAPGGTLNIEDEHRLHETSKEPDVSLGSTWLSDFPQAWAETGGMGLAVRQAPLIIPLKATSTPVSIKQYPMSQEARLGIKPHIQRLLDQGILVPCQSPWNTPLLPVKKPGTNDYRPVQDLREVNKRVEDIHPTVPNPYNLLSGLPPSHQWYTVLDLKDAFFCLRLHPTSQPLFAFEWRDPEMGISGQLTWTRLPQGFKNSPTLFNEALHRDLADFRIQHPDLILLQYVDDLLLAATSELDCQQGTRALLQTLGNLGYRASAKKAQICQKQVKYLGYLLKEGQRWLTEARKETVMGQPTPKTPRQLREFLGTAGFCRLWIPGFAEMAAPLYPLTKPGTLFNWGPDQQKAYQEIKQALLTAPALGLPDLTKPFELFVDEKQGYAKGVLTQKLGPWRRPVAYLSKKLDPVAAGWPPCLRMVAAIAVLTKDAGKLTMGQPLVILAPHAVEALVKQPPDRWLSNARMTHYQALLLDTDRVQFGPVVALNPATLLPLPEEGLQHNCLDILAEAHGTRPDLTDQPLPDADHTWYTDGSSLLQEGQRKAGAAVTTETEVIWAKALPAGTSAQRAELIALTQALKMAEGKKLNVYTDSRYAFATAHIHGEIYRRRGWLTSEGKEIKNKDEILALLKALFLPKRLSIIHCPGHQKGHSAEARGNRMADQAARKAAITETPDTSTLLAGKRTADGSEFEKRTADGSEFESPKKKAKVE

SEQ ID NO: 2771 - protein, 2105 aa, synthetic construct
MPAAKRVKLDGGDKKYSIGLDIGTNSVGWAVITDEYKVPSKKFKVLGNTDRHSIKKNLIGALLFDSGETAEATRLKRTARRRYTRRKNRICYLQEIFSNEMAKVDDSFFHRLEESFLVEEDKKHERHPIFGNIVDEVAYHEKYPTIYHLRKKLVDSTDKADLRLIYLALAHMIKFRGHFLIEGDLNPDNSDVDKLFIQLVQTYNQLFEENPINASGVDAKAILSARLSKSRRLENLIAQLPGEKKNGLFGNLIALSLGLTPNFKSNFDLAEDAKLQLSKDTYDDDLDNLLAQIGDQYADLFLAAKNLSDAILLSDILRVNTEITKAPLSASMIKRYDEHHQDLTLLKALVRQQLPEKYKEIFFDQSKNGYAGYIDGGASQEEFYKFIKPILEKMDGTEELLVKLNREDLLRKQRTFDNGSIPHQIHLGELHAILRRQEDFYPFLKDNREKIEKILTFRIPYYVGPLARGNSRFAWMTRKSEETITPWNFEEVVDKGASAQSFIERMTNFDKNLPNEKVLPKHSLLYEYFTVYNELTKVKYVTEGMRKPAFLSGEQKKAIVDLLFKTNRKVTVKQLKEDYFKKIECFDSVEISGVEDRFNASLGTYHDLLKIIKDKDFLDNEENEDILEDIVLTLTLFEDREMIEERLKTYAHLFDDKVMKQLKRRRYTGWGRLSRKLINGIRDKQSGKTILDFLKSDGFANRNFMQLIHDDSLTFKEDIQKAQVSGQGDSLHEHIANLAGSPAIKKGILQTVKVVDELVKVMGRHKPENIVIEMARENQTTQKGQKNSRERMKRIEEGIKELGSQILKEHPVENTQLQNEKLYLYYLQNGRDMYVDQELDINRLSDYDVDHIVPQSFLKDDSIDNKVLTRSDKARGKSDNVPSEEVVKKMKNYWRQLLNAKLITQRKFDNLTKAERGGLSELDKAGFIKRQLVETRQITKHVAQILDSRMNTKYDENDKLIREVKVITLKSKLVSDFRKDFQFYKVREINNYHHAHDAYLNAVVGTALIKKYPKLESEFVYGDYKVYDVRKMIAKSEQEIGKATAKYFFYSNIMNFFKTEITLANGEIRKRPLIETNGETGEIVWDKGRDFATVRKVLSMPQVNIVKKTEVQTGGFSKESILPKRNSDKLIARKKDWDPKKYGGFDSPTVAYSVLVVAKVEKGKSKKLKSVKELLGITIMERSSFEKNPIDFLEAKGYKEVKKDLIIKLPKYSLFELENGRKRMLASAGELQKGNELALPSKYVNFLYLASHYEKLKGSPEDNEQKQLFVEQHKHYLDEIIEQISEFSKRVILADANLDKVLSAYNKHRDKPIREQAENIIHLFTLTNLGAPAAFKYFDTTIDRKRYTSTKEVLDATLIHQSITGLYETRIDLSQLGGDGGGGGGSGGGGSGGGGSGGGGSGGTLNIEDEHRLHETSKEPDVSLGSTWLSDFPQAWAETGGMGLAVRQAPLIIPLKATSTPVSIKQYPMSQEARLGIKPHIQRLLDQGILVPCQSPWNTPLLPVKKPGTNDYRPVQDLREVNKRVEDIHPTVPNPYNLLSGLPPSHQWYTVLDLKDAFFCLRLHPTSQPLFAFEWRDPEMGISGQLTWTRLPQGFKNSPTLFNEALHRDLADFRIQHPDLILLQYVDDLLLAATSELDCQQGTRALLQTLGNLGYRASAKKAQICQKQVKYLGYLLKEGQRWLTEARKETVMGQPTPKTPRQLREFLGTAGFCRLWIPGFAEMAAPLYPLTKPGTLFNWGPDQQKAYQEIKQALLTAPALGLPDLTKPFELFVDEKQGYAKGVLTQKLGPWRRPVAYLSKKLDPVAAGWPPCLRMVAAIAVLTKDAGKLTMGQPLVILAPHAVEALVKQPPDRWLSNARMTHYQALLLDTDRVQFGPVVALNPATLLPLPEEGLQHNCLDILAEAHGTRPDLTDQPLPDADHTWYTDGSSLLQEGQRKAGAAVTTETEVIWAKALPAGTSAQRAELIALTQALKMAEGKKLNVYTDSRYAFATAHIHGEIYRRRGWLTSEGKEIKNKDEILALLKALFLPKRLSIIHCPGHQKGHSAEARGNRMADQAARKAAITETPDTSTLLAGKRTADGSEFEKRTADGSEFESPKKKAKVE

SEQ ID NO: 2772 - protein, 2100 aa, synthetic construct
MPAAKRVKLDGGDKKYSIGLDIGTNSVGWAVITDEYKVPSKKFKVLGNTDRHSIKKNLIGALLFDSGETAEATRLKRTARRRYTRRKNRICYLQEIFSNEMAKVDDSFFHRLEESFLVEEDKKHERHPIFGNIVDEVAYHEKYPTIYHLRKKLVDSTDKADLRLIYLALAHMIKFRGHFLIEGDLNPDNSDVDKLFIQLVQTYNQLFEENPINASGVDAKAILSARLSKSRRLENLIAQLPGEKKNGLFGNLIALSLGLTPNFKSNFDLAEDAKLQLSKDTYDDDLDNLLAQIGDQYADLFLAAKNLSDAILLSDILRVNTEITKAPLSASMIKRYDEHHQDLTLLKALVRQQLPEKYKEIFFDQSKNGYAGYIDGGASQEEFYKFIKPILEKMDGTEELLVKLNREDLLRKQRTFDNGSIPHQIHLGELHAILRRQEDFYPFLKDNREKIEKILTFRIPYYVGPLARGNSRFAWMTRKSEETITPWNFEEVVDKGASAQSFIERMTNFDKNLPNEKVLPKHSLLYEYFTVYNELTKVKYVTEGMRKPAFLSGEQKKAIVDLLFKTNRKVTVKQLKEDYFKKIECFDSVEISGVEDRFNASLGTYHDLLKIIKDKDFLDNEENEDILEDIVLTLTLFEDREMIEERLKTYAHLFDDKVMKQLKRRRYTGWGRLSRKLINGIRDKQSGKTILDFLKSDGFANRNFMQLIHDDSLTFKEDIQKAQVSGQGDSLHEHIANLAGSPAIKKGILQTVKVVDELVKVMGRHKPENIVIEMARENQTTQKGQKNSRERMKRIEEGIKELGSQILKEHPVENTQLQNEKLYLYYLQNGRDMYVDQELDINRLSDYDVDHIVPQSFLKDDSIDNKVLTRSDKARGKSDNVPSEEVVKKMKNYWRQLLNAKLITQRKFDNLTKAERGGLSELDKAGFIKRQLVETRQITKHVAQILDSRMNTKYDENDKLIREVKVITLKSKLVSDFRKDFQFYKVREINNYHHAHDAYLNAVVGTALIKKYPKLESEFVYGDYKVYDVRKMIAKSEQEIGKATAKYFFYSNIMNFFKTEITLANGEIRKRPLIETNGETGEIVWDKGRDFATVRKVLSMPQVNIVKKTEVQTGGFSKESILPKRNSDKLIARKKDWDPKKYGGFDSPTVAYSVLVVAKVEKGKSKKLKSVKELLGITIMERSSFEKNPIDFLEAKGYKEVKKDLIIKLPKYSLFELENGRKRMLASAGELQKGNELALPSKYVNFLYLASHYEKLKGSPEDNEQKQLFVEQHKHYLDEIIEQISEFSKRVILADANLDKVLSAYNKHRDKPIREQAENIIHLFTLTNLGAPAAFKYFDTTIDRKRYTSTKEVLDATLIHQSITGLYETRIDLSQLGGDGGEAAAKEAAAKEAAAKGGTLNIEDEHRLHETSKEPDVSLGSTWLSDFPQAWAETGGMGLAVRQAPLIIPLKATSTPVSIKQYPMSQEARLGIKPHIQRLLDQGILVPCQSPWNTPLLPVKKPGTNDYRPVQDLREVNKRVEDIHPTVPNPYNLLSGLPPSHQWYTVLDLKDAFFCLRLHPTSQPLFAFEWRDPEMGISGQLTWTRLPQGFKNSPTLFNEALHRDLADFRIQHPDLILLQYVDDLLLAATSELDCQQGTRALLQTLGNLGYRASAKKAQICQKQVKYLGYLLKEGQRWLTEARKETVMGQPTPKTPRQLREFLGTAGFCRLWIPGFAEMAAPLYPLTKPGTLFNWGPDQQKAYQEIKQALLTAPALGLPDLTKPFELFVDEKQGYAKGVLTQKLGPWRRPVAYLSKKLDPVAAGWPPCLRMVAAIAVLTKDAGKLTMGQPLVILAPHAVEALVKQPPDRWLSNARMTHYQALLLDTDRVQFGPVVALNPATLLPLPEEGLQHNCLDILAEAHGTRPDLTDQPLPDADHTWYTDGSSLLQEGQRKAGAAVTTETEVIWAKALPAGTSAQRAELIALTQALKMAEGKKLNVYTDSRYAFATAHIHGEIYRRRGWLTSEGKEIKNKDEILALLKALFLPKRLSIIHCPGHQKGHSAEARGNRMADQAARKAAITETPDTSTLLAGKRTADGSEFEKRTADGSEFESPKKKAKVE

SEQ ID NO: 2773 - protein, 2094 aa, synthetic construct
MPAAKRVKLDGGDKKYSIGLDIGTNSVGWAVITDEYKVPSKKFKVLGNTDRHSIKKNLIGALLFDSGETAEATRLKRTARRRYTRRKNRICYLQEIFSNEMAKVDDSFFHRLEESFLVEEDKKHERHPIFGNIVDEVAYHEKYPTIYHLRKKLVDSTDKADLRLIYLALAHMIKFRGHFLIEGDLNPDNSDVDKLFIQLVQTYNQLFEENPINASGVDAKAILSARLSKSRRLENLIAQLPGEKKNGLFGNLIALSLGLTPNFKSNFDLAEDAKLQLSKDTYDDDLDNLLAQIGDQYADLFLAAKNLSDAILLSDILRVNTEITKAPLSASMIKRYDEHHQDLTLLKALVRQQLPEKYKEIFFDQSKNGYAGYIDGGASQEEFYKFIKPILEKMDGTEELLVKLNREDLLRKQRTFDNGSIPHQIHLGELHAILRRQEDFYPFLKDNREKIEKILTFRIPYYVGPLARGNSRFAWMTRKSEETITPWNFEEVVDKGASAQSFIERMTNFDKNLPNEKVLPKHSLLYEYFTVYNELTKVKYVTEGMRKPAFLSGEQKKAIVDLLFKTNRKVTVKQLKEDYFKKIECFDSVEISGVEDRFNASLGTYHDLLKIIKDKDFLDNEENEDILEDIVLTLTLFEDREMIEERLKTYAHLFDDKVMKQLKRRRYTGWGRLSRKLINGIRDKQSGKTILDFLKSDGFANRNFMQLIHDDSLTFKEDIQKAQVSGQGDSLHEHIANLAGSPAIKKGILQTVKVVDELVKVMGRHKPENIVIEMARENQTTQKGQKNSRERMKRIEEGIKELGSQILKEHPVENTQLQNEKLYLYYLQNGRDMYVDQELDINRLSDYDVDHIVPQSFLKDDSIDNKVLTRSDKARGKSDNVPSEEVVKKMKNYWRQLLNAKLITQRKFDNLTKAERGGLSELDKAGFIKRQLVETRQITKHVAQILDSRMNTKYDENDKLIREVKVITLKSKLVSDFRKDFQFYKVREINNYHHAHDAYLNAVVGTALIKKYPKLESEFVYGDYKVYDVRKMIAKSEQEIGKATAKYFFYSNIMNFFKTEITLANGEIRKRPLIETNGETGEIVWDKGRDFATVRKVLSMPQVNIVKKTEVQTGGFSKESILPKRNSDKLIARKKDWDPKKYGGFDSPTVAYSVLVVAKVEKGKSKKLKSVKELLGITIMERSSFEKNPIDFLEAKGYKEVKKDLIIKLPKYSLFELENGRKRMLASAGELQKGNELALPSKYVNFLYLASHYEKLKGSPEDNEQKQLFVEQHKHYLDEIIEQISEFSKRVILADANLDKVLSAYNKHRDKPIREQAENIIHLFTLTNLGAPAAFKYFDTTIDRKRYTSTKEVLDATLIHQSITGLYETRIDLSQLGGDGGGGGPAPGSSGGTLNIEDEHRLHETSKEPDVSLGSTWLSDFPQAWAETGGMGLAVRQAPLIIPLKATSTPVSIKQYPMSQEARLGIKPHIQRLLDQGILVPCQSPWNTPLLPVKKPGTNDYRPVQDLREVNKRVEDIHPTVPNPYNLLSGLPPSHQWYTVLDLKDAFFCLRLHPTSQPLFAFEWRDPEMGISGQLTWTRLPQGFKNSPTLFNEALHRDLADFRIQHPDLILLQYVDDLLLAATSELDCQQGTRALLQTLGNLGYRASAKKAQICQKQVKYLGYLLKEGQRWLTEARKETVMGQPTPKTPRQLREFLGTAGFCRLWIPGFAEMAAPLYPLTKPGTLFNWGPDQQKAYQEIKQALLTAPALGLPDLTKPFELFVDEKQGYAKGVLTQKLGPWRRPVAYLSKKLDPVAAGWPPCLRMVAAIAVLTKDAGKLTMGQPLVILAPHAVEALVKQPPDRWLSNARMTHYQALLLDTDRVQFGPVVALNPATLLPLPEEGLQHNCLDILAEAHGTRPDLTDQPLPDADHTWYTDGSSLLQEGQRKAGAAVTTETEVIWAKALPAGTSAQRAELIALTQALKMAEGKKLNVYTDSRYAFATAHIHGEIYRRRGWLTSEGKEIKNKDEILALLKALFLPKRLSIIHCPGHQKGHSAEARGNRMADQAARKAAITETPDTSTLLAGKRTADGSEFEKRTADGSEFESPKKKAKVE

SEQ ID NO: 2774 - protein, 2093 aa, synthetic construct
MPAAKRVKLDGGDKKYSIGLDIGTNSVGWAVITDEYKVPSKKFKVLGNTDRHSIKKNLIGALLFDSGETAEATRLKRTARRRYTRRKNRICYLQEIFSNEMAKVDDSFFHRLEESFLVEEDKKHERHPIFGNIVDEVAYHEKYPTIYHLRKKLVDSTDKADLRLIYLALAHMIKFRGHFLIEGDLNPDNSDVDKLFIQLVQTYNQLFEENPINASGVDAKAILSARLSKSRRLENLIAQLPGEKKNGLFGNLIALSLGLTPNFKSNFDLAEDAKLQLSKDTYDDDLDNLLAQIGDQYADLFLAAKNLSDAILLSDILRVNTEITKAPLSASMIKRYDEHHQDLTLLKALVRQQLPEKYKEIFFDQSKNGYAGYIDGGASQEEFYKFIKPILEKMDGTEELLVKLNREDLLRKQRTFDNGSIPHQIHLGELHAILRRQEDFYPFLKDNREKIEKILTFRIPYYVGPLARGNSRFAWMTRKSEETITPWNFEEVVDKGASAQSFIERMTNFDKNLPNEKVLPKHSLLYEYFTVYNELTKVKYVTEGMRKPAFLSGEQKKAIVDLLFKTNRKVTVKQLKEDYFKKIECFDSVEISGVEDRFNASLGTYHDLLKIIKDKDFLDNEENEDILEDIVLTLTLFEDREMIEERLKTYAHLFDDKVMKQLKRRRYTGWGRLSRKLINGIRDKQSGKTILDFLKSDGFANRNFMQLIHDDSLTFKEDIQKAQVSGQGDSLHEHIANLAGSPAIKKGILQTVKVVDELVKVMGRHKPENIVIEMARENQTTQKGQKNSRERMKRIEEGIKELGSQILKEHPVENTQLQNEKLYLYYLQNGRDMYVDQELDINRLSDYDVDHIVPQSFLKDDSIDNKVLTRSDKARGKSDNVPSEEVVKKMKNYWRQLLNAKLITQRKFDNLTKAERGGLSELDKAGFIKRQLVETRQITKHVAQILDSRMNTKYDENDKLIREVKVITLKSKLVSDFRKDFQFYKVREINNYHHAHDAYLNAVVGTALIKKYPKLESEFVYGDYKVYDVRKMIAKSEQEIGKATAKYFFYSNIMNFFKTEITLANGEIRKRPLIETNGETGEIVWDKGRDFATVRKVLSMPQVNIVKKTEVQTGGFSKESILPKRNSDKLIARKKDWDPKKYGGFDSPTVAYSVLVVAKVEKGKSKKLKSVKELLGITIMERSSFEKNPIDFLEAKGYKEVKKDLIIKLPKYSLFELENGRKRMLASAGELQKGNELALPSKYVNFLYLASHYEKLKGSPEDNEQKQLFVEQHKHYLDEIIEQISEFSKRVILADANLDKVLSAYNKHRDKPIREQAENIIHLFTLTNLGAPAAFKYFDTTIDRKRYTSTKEVLDATLIHQSITGLYETRIDLSQLGGDGGGGSEAAAKGGTLNIEDEHRLHETSKEPDVSLGSTWLSDFPQAWAETGGMGLAVRQAPLIIPLKATSTPVSIKQYPMSQEARLGIKPHIQRLLDQGILVPCQSPWNTPLLPVKKPGTNDYRPVQDLREVNKRVEDIHPTVPNPYNLLSGLPPSHQWYTVLDLKDAFFCLRLHPTSQPLFAFEWRDPEMGISGQLTWTRLPQGFKNSPTLFNEALHRDLADFRIQHPDLILLQYVDDLLLAATSELDCQQGTRALLQTLGNLGYRASAKKAQICQKQVKYLGYLLKEGQRWLTEARKETVMGQPTPKTPRQLREFLGTAGFCRLWIPGFAEMAAPLYPLTKPGTLFNWGPDQQKAYQEIKQALLTAPALGLPDLTKPFELFVDEKQGYAKGVLTQKLGPWRRPVAYLSKKLDPVAAGWPPCLRMVAAIAVLTKDAGKLTMGQPLVILAPHAVEALVKQPPDRWLSNARMTHYQALLLDTDRVQFGPVVALNPATLLPLPEEGLQHNCLDILAEAHGTRPDLTDQPLPDADHTWYTDGSSLLQEGQRKAGAAVTTETEVIWAKALPAGTSAQRAELIALTQALKMAEGKKLNVYTDSRYAFATAHIHGEIYRRRGWLTSEGKEIKNKDEILALLKALFLPKRLSIIHCPGHQKGHSAEARGNRMADQAARKAAITETPDTSTLLAGKRTADGSEFEKRTADGSEFESPKKKAKVE

SEQ ID NO: 2775 - protein, 2096 aa, synthetic construct
MPAAKRVKLDGGDKKYSIGLDIGTNSVGWAVITDEYKVPSKKFKVLGNTDRHSIKKNLIGALLFDSGETAEATRLKRTARRRYTRRKNRICYLQEIFSNEMAKVDDSFFHRLEESFLVEEDKKHERHPIFGNIVDEVAYHEKYPTIYHLRKKLVDSTDKADLRLIYLALAHMIKFRGHFLIEGDLNPDNSDVDKLFIQLVQTYNQLFEENPINASGVDAKAILSARLSKSRRLENLIAQLPGEKKNGLFGNLIALSLGLTPNFKSNFDLAEDAKLQLSKDTYDDDLDNLLAQIGDQYADLFLAAKNLSDAILLSDILRVNTEITKAPLSASMIKRYDEHHQDLTLLKALVRQQLPEKYKEIFFDQSKNGYAGYIDGGASQEEFYKFIKPILEKMDGTEELLVKLNREDLLRKQRTFDNGSIPHQIHLGELHAILRRQEDFYPFLKDNREKIEKILTFRIPYYVGPLARGNSRFAWMTRKSEETITPWNFEEVVDKGASAQSFIERMTNFDKNLPNEKVLPKHSLLYEYFTVYNELTKVKYVTEGMRKPAFLSGEQKKAIVDLLFKTNRKVTVKQLKEDYFKKIECFDSVEISGVEDRFNASLGTYHDLLKIIKDKDFLDNEENEDILEDIVLTLTLFEDREMIEERLKTYAHLFDDKVMKQLKRRRYTGWGRLSRKLINGIRDKQSGKTILDFLKSDGFANRNFMQLIHDDSLTFKEDIQKAQVSGQGDSLHEHIANLAGSPAIKKGILQTVKVVDELVKVMGRHKPENIVIEMARENQTTQKGQKNSRERMKRIEEGIKELGSQILKEHPVENTQLQNEKLYLYYLQNGRDMYVDQELDINRLSDYDVDHIVPQSFLKDDSIDNKVLTRSDKARGKSDNVPSEEVVKKMKNYWRQLLNAKLITQRKFDNLTKAERGGLSELDKAGFIKRQLVETRQITKHVAQILDSRMNTKYDENDKLIREVKVITLKSKLVSDFRKDFQFYKVREINNYHHAHDAYLNAVVGTALIKKYPKLESEFVYGDYKVYDVRKMIAKSEQEIGKATAKYFFYSNIMNFFKTEITLANGEIRKRPLIETNGETGEIVWDKGRDFATVRKVLSMPQVNIVKKTEVQTGGFSKESILPKRNSDKLIARKKDWDPKKYGGFDSPTVAYSVLVVAKVEKGKSKKLKSVKELLGITIMERSSFEKNPIDFLEAKGYKEVKKDLIIKLPKYSLFELENGRKRMLASAGELQKGNELALPSKYVNFLYLASHYEKLKGSPEDNEQKQLFVEQHKHYLDEIIEQISEFSKRVILADANLDKVLSAYNKHRDKPIREQAENIIHLFTLTNLGAPAAFKYFDTTIDRKRYTSTKEVLDATLIHQSITGLYETRIDLSQLGGDGGGSSEAAAKPAPGGTLNIEDEHRLHETSKEPDVSLGSTWLSDFPQAWAETGGMGLAVRQAPLIIPLKATSTPVSIKQYPMSQEARLGIKPHIQRLLDQGILVPCQSPWNTPLLPVKKPGTNDYRPVQDLREVNKRVEDIHPTVPNPYNLLSGLPPSHQWYTVLDLKDAFFCLRLHPTSQPLFAFEWRDPEMGISGQLTWTRLPQGFKNSPTLFNEALHRDLADFRIQHPDLILLQYVDDLLLAATSELDCQQGTRALLQTLGNLGYRASAKKAQICQKQVKYLGYLLKEGQRWLTEARKETVMGQPTPKTPRQLREFLGTAGFCRLWIPGFAEMAAPLYPLTKPGTLFNWGPDQQKAYQEIKQALLTAPALGLPDLTKPFELFVDEKQGYAKGVLTQKLGPWRRPVAYLSKKLDPVAAGWPPCLRMVAAIAVLTKDAGKLTMGQPLVILAPHAVEALVKQPPDRWLSNARMTHYQALLLDTDRVQFGPVVALNPATLLPLPEEGLQHNCLDILAEAHGTRPDLTDQPLPDADHTWYTDGSSLLQEGQRKAGAAVTTETEVIWAKALPAGTSAQRAELIALTQALKMAEGKKLNVYTDSRYAFATAHIHGEIYRRRGWLTSEGKEIKNKDEILALLKALFLPKRLSIIHCPGHQKGHSAEARGNRMADQAARKAAITETPDTSTLLAGKRTADGSEFEKRTADGSEFESPKKKAKVE

SEQ ID NO: 2776 - protein, 2096 aa, synthetic construct
MPAAKRVKLDGGDKKYSIGLDIGTNSVGWAVITDEYKVPSKKFKVLGNTDRHSIKKNLIGALLFDSGETAEATRLKRTARRRYTRRKNRICYLQEIFSNEMAKVDDSFFHRLEESFLVEEDKKHERHPIFGNIVDEVAYHEKYPTIYHLRKKLVDSTDKADLRLIYLALAHMIKFRGHFLIEGDLNPDNSDVDKLFIQLVQTYNQLFEENPINASGVDAKAILSARLSKSRRLENLIAQLPGEKKNGLFGNLIALSLGLTPNFKSNFDLAEDAKLQLSKDTYDDDLDNLLAQIGDQYADLFLAAKNLSDAILLSDILRVNTEITKAPLSASMIKRYDEHHQDLTLLKALVRQQLPEKYKEIFFDQSKNGYAGYIDGGASQEEFYKFIKPILEKMDGTEELLVKLNREDLLRKQRTFDNGSIPHQIHLGELHAILRRQEDFYPFLKDNREKIEKILTFRIPYYVGPLARGNSRFAWMTRKSEETITPWNFEEVVDKGASAQSFIERMTNFDKNLPNEKVLPKHSLLYEYFTVYNELTKVKYVTEGMRKPAFLSGEQKKAIVDLLFKTNRKVTVKQLKEDYFKKIECFDSVEISGVEDRFNASLGTYHDLLKIIKDKDFLDNEENEDILEDIVLTLTLFEDREMIEERLKTYAHLFDDKVMKQLKRRRYTGWGRLSRKLINGIRDKQSGKTILDFLKSDGFANRNFMQLIHDDSLTFKEDIQKAQVSGQGDSLHEHIANLAGSPAIKKGILQTVKVVDELVKVMGRHKPENIVIEMARENQTTQKGQKNSRERMKRIEEGIKELGSQILKEHPVENTQLQNEKLYLYYLQNGRDMYVDQELDINRLSDYDVDHIVPQSFLKDDSIDNKVLTRSDKARGKSDNVPSEEVVKKMKNYWRQLLNAKLITQRKFDNLTKAERGGLSELDKAGFIKRQLVETRQITKHVAQILDSRMNTKYDENDKLIREVKVITLKSKLVSDFRKDFQFYKVREINNYHHAHDAYLNAVVGTALIKKYPKLESEFVYGDYKVYDVRKMIAKSEQEIGKATAKYFFYSNIMNFFKTEITLANGEIRKRPLIETNGETGEIVWDKGRDFATVRKVLSMPQVNIVKKTEVQTGGFSKESILPKRNSDKLIARKKDWDPKKYGGFDSPTVAYSVLVVAKVEKGKSKKLKSVKELLGITIMERSSFEKNPIDFLEAKGYKEVKKDLIIKLPKYSLFELENGRKRMLASAGELQKGNELALPSKYVNFLYLASHYEKLKGSPEDNEQKQLFVEQHKHYLDEIIEQISEFSKRVILADANLDKVLSAYNKHRDKPIREQAENIIHLFTLTNLGAPAAFKYFDTTIDRKRYTSTKEVLDATLIHQSITGLYETRIDLSQLGGDGGGGSPAPEAAAKGGTLNIEDEHRLHETSKEPDVSLGSTWLSDFPQAWAETGGMGLAVRQAPLIIPLKATSTPVSIKQYPMSQEARLGIKPHIQRLLDQGILVPCQSPWNTPLLPVKKPGTNDYRPVQDLREVNKRVEDIHPTVPNPYNLLSGLPPSHQWYTVLDLKDAFFCLRLHPTSQPLFAFEWRDPEMGISGQLTWTRLPQGFKNSPTLFNEALHRDLADFRIQHPDLILLQYVDDLLLAATSELDCQQGTRALLQTLGNLGYRASAKKAQICQKQVKYLGYLLKEGQRWLTEARKETVMGQPTPKTPRQLREFLGTAGFCRLWIPGFAEMAAPLYPLTKPGTLFNWGPDQQKAYQEIKQALLTAPALGLPDLTKPFELFVDEKQGYAKGVLTQKLGPWRRPVAYLSKKLDPVAAGWPPCLRMVAAIAVLTKDAGKLTMGQPLVILAPHAVEALVKQPPDRWLSNARMTHYQALLLDTDRVQFGPVVALNPATLLPLPEEGLQHNCLDILAEAHGTRPDLTDQPLPDADHTWYTDGSSLLQEGQRKAGAAVTTETEVIWAKALPAGTSAQRAELIALTQALKMAEGKKLNVYTDSRYAFATAHIHGEIYRRRGWLTSEGKEIKNKDEILALLKALFLPKRLSIIHCPGHQKGHSAEARGNRMADQAARKAAITETPDTSTLLAGKRTADGSEFEKRTADGSEFESPKKKAKVE

SEQ ID NO: 2777 - protein, 2096 aa, synthetic construct
MPAAKRVKLDGGDKKYSIGLDIGTNSVGWAVITDEYKVPSKKFKVLGNTDRHSIKKNLIGALLFDSGETAEATRLKRTARRRYTRRKNRICYLQEIFSNEMAKVDDSFFHRLEESFLVEEDKKHERHPIFGNIVDEVAYHEKYPTIYHLRKKLVDSTDKADLRLIYLALAHMIKFRGHFLIEGDLNPDNSDVDKLFIQLVQTYNQLFEENPINASGVDAKAILSARLSKSRRLENLIAQLPGEKKNGLFGNLIALSLGLTPNFKSNFDLAEDAKLQLSKDTYDDDLDNLLAQIGDQYADLFLAAKNLSDAILLSDILRVNTEITKAPLSASMIKRYDEHHQDLTLLKALVRQQLPEKYKEIFFDQSKNGYAGYIDGGASQEEFYKFIKPILEKMDGTEELLVKLNREDLLRKQRTFDNGSIPHQIHLGELHAILRRQEDFYPFLKDNREKIEKILTFRIPYYVGPLARGNSRFAWMTRKSEETITPWNFEEVVDKGASAQSFIERMTNFDKNLPNEKVLPKHSLLYEYFTVYNELTKVKYVTEGMRKPAFLSGEQKKAIVDLLFKTNRKVTVKQLKEDYFKKIECFDSVEISGVEDRFNASLGTYHDLLKIIKDKDFLDNEENEDILEDIVLTLTLFEDREMIEERLKTYAHLFDDKVMKQLKRRRYTGWGRLSRKLINGIRDKQSGKTILDFLKSDGFANRNFMQLIHDDSLTFKEDIQKAQVSGQGDSLHEHIANLAGSPAIKKGILQTVKVVDELVKVMGRHKPENIVIEMARENQTTQKGQKNSRERMKRIEEGIKELGSQILKEHPVENTQLQNEKLYLYYLQNGRDMYVDQELDINRLSDYDVDHIVPQSFLKDDSIDNKVLTRSDKARGKSDNVPSEEVVKKMKNYWRQLLNAKLITQRKFDNLTKAERGGLSELDKAGFIKRQLVETRQITKHVAQILDSRMNTKYDENDKLIREVKVITLKSKLVSDFRKDFQFYKVREINNYHHAHDAYLNAVVGTALIKKYPKLESEFVYGDYKVYDVRKMIAKSEQEIGKATAKYFFYSNIMNFFKTEITLANGEIRKRPLIETNGETGEIVWDKGRDFATVRKVLSMPQVNIVKKTEVQTGGFSKESILPKRNSDKLIARKKDWDPKKYGGFDSPTVAYSVLVVAKVEKGKSKKLKSVKELLGITIMERSSFEKNPIDFLEAKGYKEVKKDLIIKLPKYSLFELENGRKRMLASAGELQKGNELALPSKYVNFLYLASHYEKLKGSPEDNEQKQLFVEQHKHYLDEIIEQISEFSKRVILADANLDKVLSAYNKHRDKPIREQAENIIHLFTLTNLGAPAAFKYFDTTIDRKRYTSTKEVLDATLIHQSITGLYETRIDLSQLGGDGGGSSGGGEAAAKGGTLNIEDEHRLHETSKEPDVSLGSTWLSDFPQAWAETGGMGLAVRQAPLIIPLKATSTPVSIKQYPMSQEARLGIKPHIQRLLDQGILVPCQSPWNTPLLPVKKPGTNDYRPVQDLREVNKRVEDIHPTVPNPYNLLSGLPPSHQWYTVLDLKDAFFCLRLHPTSQPLFAFEWRDPEMGISGQLTWTRLPQGFKNSPTLFNEALHRDLADFRIQHPDLILLQYVDDLLLAATSELDCQQGTRALLQTLGNLGYRASAKKAQICQKQVKYLGYLLKEGQRWLTEARKETVMGQPTPKTPRQLREFLGTAGFCRLWIPGFAEMAAPLYPLTKPGTLFNWGPDQQKAYQEIKQALLTAPALGLPDLTKPFELFVDEKQGYAKGVLTQKLGPWRRPVAYLSKKLDPVAAGWPPCLRMVAAIAVLTKDAGKLTMGQPLVILAPHAVEALVKQPPDRWLSNARMTHYQALLLDTDRVQFGPVVALNPATLLPLPEEGLQHNCLDILAEAHGTRPDLTDQPLPDADHTWYTDGSSLLQEGQRKAGAAVTTETEVIWAKALPAGTSAQRAELIALTQALKMAEGKKLNVYTDSRYAFATAHIHGEIYRRRGWLTSEGKEIKNKDEILALLKALFLPKRLSIIHCPGHQKGHSAEARGNRMADQAARKAAITETPDTSTLLAGKRTADGSEFEKRTADGSEFESPKKKAKVE

SEQ ID NO: 2778 - protein, 2091 aa, synthetic construct
MPAAKRVKLDGGDKKYSIGLDIGTNSVGWAVITDEYKVPSKKFKVLGNTDRHSIKKNLIGALLFDSGETAEATRLKRTARRRYTRRKNRICYLQEIFSNEMAKVDDSFFHRLEESFLVEEDKKHERHPIFGNIVDEVAYHEKYPTIYHLRKKLVDSTDKADLRLIYLALAHMIKFRGHFLIEGDLNPDNSDVDKLFIQLVQTYNQLFEENPINASGVDAKAILSARLSKSRRLENLIAQLPGEKKNGLFGNLIALSLGLTPNFKSNFDLAEDAKLQLSKDTYDDDLDNLLAQIGDQYADLFLAAKNLSDAILLSDILRVNTEITKAPLSASMIKRYDEHHQDLTLLKALVRQQLPEKYKEIFFDQSKNGYAGYIDGGASQEEFYKFIKPILEKMDGTEELLVKLNREDLLRKQRTFDNGSIPHQIHLGELHAILRRQEDFYPFLKDNREKIEKILTFRIPYYVGPLARGNSRFAWMTRKSEETITPWNFEEVVDKGASAQSFIERMTNFDKNLPNEKVLPKHSLLYEYFTVYNELTKVKYVTEGMRKPAFLSGEQKKAIVDLLFKTNRKVTVKQLKEDYFKKIECFDSVEISGVEDRFNASLGTYHDLLKIIKDKDFLDNEENEDILEDIVLTLTLFEDREMIEERLKTYAHLFDDKVMKQLKRRRYTGWGRLSRKLINGIRDKQSGKTILDFLKSDGFANRNFMQLIHDDSLTFKEDIQKAQVSGQGDSLHEHIANLAGSPAIKKGILQTVKVVDELVKVMGRHKPENIVIEMARENQTTQKGQKNSRERMKRIEEGIKELGSQILKEHPVENTQLQNEKLYLYYLQNGRDMYVDQELDINRLSDYDVDHIVPQSFLKDDSIDNKVLTRSDKARGKSDNVPSEEVVKKMKNYWRQLLNAKLITQRKFDNLTKAERGGLSELDKAGFIKRQLVETRQITKHVAQILDSRMNTKYDENDKLIREVKVITLKSKLVSDFRKDFQFYKVREINNYHHAHDAYLNAVVGTALIKKYPKLESEFVYGDYKVYDVRKMIAKSEQEIGKATAKYFFYSNIMNFFKTEITLANGEIRKRPLIETNGETGEIVWDKGRDFATVRKVLSMPQVNIVKKTEVQTGGFSKESILPKRNSDKLIARKKDWDPKKYGGFDSPTVAYSVLVVAKVEKGKSKKLKSVKELLGITIMERSSFEKNPIDFLEAKGYKEVKKDLIIKLPKYSLFELENGRKRMLASAGELQKGNELALPSKYVNFLYLASHYEKLKGSPEDNEQKQLFVEQHKHYLDEIIEQISEFSKRVILADANLDKVLSAYNKHRDKPIREQAENIIHLFTLTNLGAPAAFKYFDTTIDRKRYTSTKEVLDATLIHQSITGLYETRIDLSQLGGDGGGSSGGSGGTLNIEDEHRLHETSKEPDVSLGSTWLSDFPQAWAETGGMGLAVRQAPLIIPLKATSTPVSIKQYPMSQEARLGIKPHIQRLLDQGILVPCQSPWNTPLLPVKKPGTNDYRPVQDLREVNKRVEDIHPTVPNPYNLLSGLPPSHQWYTVLDLKDAFFCLRLHPTSQPLFAFEWRDPEMGISGQLTWTRLPQGFKNSPTLFNEALHRDLADFRIQHPDLILLQYVDDLLLAATSELDCQQGTRALLQTLGNLGYRASAKKAQICQKQVKYLGYLLKEGQRWLTEARKETVMGQPTPKTPRQLREFLGTAGFCRLWIPGFAEMAAPLYPLTKPGTLFNWGPDQQKAYQEIKQALLTAPALGLPDLTKPFELFVDEKQGYAKGVLTQKLGPWRRPVAYLSKKLDPVAAGWPPCLRMVAAIAVLTKDAGKLTMGQPLVILAPHAVEALVKQPPDRWLSNARMTHYQALLLDTDRVQFGPVVALNPATLLPLPEEGLQHNCLDILAEAHGTRPDLTDQPLPDADHTWYTDGSSLLQEGQRKAGAAVTTETEVIWAKALPAGTSAQRAELIALTQALKMAEGKKLNVYTDSRYAFATAHIHGEIYRRRGWLTSEGKEIKNKDEILALLKALFLPKRLSIIHCPGHQKGHSAEARGNRMADQAARKAAITETPDTSTLLAGKRTADGSEFEKRTADGSEFESPKKKAKVE

SEQ ID NO: 2779 - protein, 2091 aa, synthetic construct
MPAAKRVKLDGGDKKYSIGLDIGTNSVGWAVITDEYKVPSKKFKVLGNTDRHSIKKNLIGALLFDSGETAEATRLKRTARRRYTRRKNRICYLQEIFSNEMAKVDDSFFHRLEESFLVEEDKKHERHPIFGNIVDEVAYHEKYPTIYHLRKKLVDSTDKADLRLIYLALAHMIKFRGHFLIEGDLNPDNSDVDKLFIQLVQTYNQLFEENPINASGVDAKAILSARLSKSRRLENLIAQLPGEKKNGLFGNLIALSLGLTPNFKSNFDLAEDAKLQLSKDTYDDDLDNLLAQIGDQYADLFLAAKNLSDAILLSDILRVNTEITKAPLSASMIKRYDEHHQDLTLLKALVRQQLPEKYKEIFFDQSKNGYAGYIDGGASQEEFYKFIKPILEKMDGTEELLVKLNREDLLRKQRTFDNGSIPHQIHLGELHAILRRQEDFYPFLKDNREKIEKILTFRIPYYVGPLARGNSRFAWMTRKSEETITPWNFEEVVDKGASAQSFIERMTNFDKNLPNEKVLPKHSLLYEYFTVYNELTKVKYVTEGMRKPAFLSGEQKKAIVDLLFKTNRKVTVKQLKEDYFKKIECFDSVEISGVEDRFNASLGTYHDLLKIIKDKDFLDNEENEDILEDIVLTLTLFEDREMIEERLKTYAHLFDDKVMKQLKRRRYTGWGRLSRKLINGIRDKQSGKTILDFLKSDGFANRNFMQLIHDDSLTFKEDIQKAQVSGQGDSLHEHIANLAGSPAIKKGILQTVKVVDELVKVMGRHKPENIVIEMARENQTTQKGQKNSRERMKRIEEGIKELGSQILKEHPVENTQLQNEKLYLYYLQNGRDMYVDQELDINRLSDYDVDHIVPQSFLKDDSIDNKVLTRSDKARGKSDNVPSEEVVKKMKNYWRQLLNAKLITQRKFDNLTKAERGGLSELDKAGFIKRQLVETRQITKHVAQILDSRMNTKYDENDKLIREVKVITLKSKLVSDFRKDFQFYKVREINNYHHAHDAYLNAVVGTALIKKYPKLESEFVYGDYKVYDVRKMIAKSEQEIGKATAKYFFYSNIMNFFKTEITLANGEIRKRPLIETNGETGEIVWDKGRDFATVRKVLSMPQVNIVKKTEVQTGGFSKESILPKRNSDKLIARKKDWDPKKYGGFDSPTVAYSVLVVAKVEKGKSKKLKSVKELLGITIMERSSFEKNPIDFLEAKGYKEVKKDLIIKLPKYSLFELENGRKRMLASAGELQKGNELALPSKYVNFLYLASHYEKLKGSPEDNEQKQLFVEQHKHYLDEIIEQISEFSKRVILADANLDKVLSAYNKHRDKPIREQAENIIHLFTLTNLGAPAAFKYFDTTIDRKRYTSTKEVLDATLIHQSITGLYETRIDLSQLGGDGGGSSGSSGGTLNIEDEHRLHETSKEPDVSLGSTWLSDFPQAWAETGGMGLAVRQAPLIIPLKATSTPVSIKQYPMSQEARLGIKPHIQRLLDQGILVPCQSPWNTPLLPVKKPGTNDYRPVQDLREVNKRVEDIHPTVPNPYNLLSGLPPSHQWYTVLDLKDAFFCLRLHPTSQPLFAFEWRDPEMGISGQLTWTRLPQGFKNSPTLFNEALHRDLADFRIQHPDLILLQYVDDLLLAATSELDCQQGTRALLQTLGNLGYRASAKKAQICQKQVKYLGYLLKEGQRWLTEARKETVMGQPTPKTPRQLREFLGTAGFCRLWIPGFAEMAAPLYPLTKPGTLFNWGPDQQKAYQEIKQALLTAPALGLPDLTKPFELFVDEKQGYAKGVLTQKLGPWRRPVAYLSKKLDPVAAGWPPCLRMVAAIAVLTKDAGKLTMGQPLVILAPHAVEALVKQPPDRWLSNARMTHYQALLLDTDRVQFGPVVALNPATLLPLPEEGLQHNCLDILAEAHGTRPDLTDQPLPDADHTWYTDGSSLLQEGQRKAGAAVTTETEVIWAKALPAGTSAQRAELIALTQALKMAEGKKLNVYTDSRYAFATAHIHGEIYRRRGWLTSEGKEIKNKDEILALLKALFLPKRLSIIHCPGHQKGHSAEARGNRMADQAARKAAITETPDTSTLLAGKRTADGSEFEKRTADGSEFESPKKKAKVE

SEQ ID NO: 2780 - protein, 2091 aa, synthetic construct
MPAAKRVKLDGGDKKYSIGLDIGTNSVGWAVITDEYKVPSKKFKVLGNTDRHSIKKNLIGALLFDSGETAEATRLKRTARRRYTRRKNRICYLQEIFSNEMAKVDDSFFHRLEESFLVEEDKKHERHPIFGNIVDEVAYHEKYPTIYHLRKKLVDSTDKADLRLIYLALAHMIKFRGHFLIEGDLNPDNSDVDKLFIQLVQTYNQLFEENPINASGVDAKAILSARLSKSRRLENLIAQLPGEKKNGLFGNLIALSLGLTPNFKSNFDLAEDAKLQLSKDTYDDDLDNLLAQIGDQYADLFLAAKNLSDAILLSDILRVNTEITKAPLSASMIKRYDEHHQDLTLLKALVRQQLPEKYKEIFFDQSKNGYAGYIDGGASQEEFYKFIKPILEKMDGTEELLVKLNREDLLRKQRTFDNGSIPHQIHLGELHAILRRQEDFYPFLKDNREKIEKILTFRIPYYVGPLARGNSRFAWMTRKSEETITPWNFEEVVDKGASAQSFIERMTNFDKNLPNEKVLPKHSLLYEYFTVYNELTKVKYVTEGMRKPAFLSGEQKKAIVDLLFKTNRKVTVKQLKEDYFKKIECFDSVEISGVEDRFNASLGTYHDLLKIIKDKDFLDNEENEDILEDIVLTLTLFEDREMIEERLKTYAHLFDDKVMKQLKRRRYTGWGRLSRKLINGIRDKQSGKTILDFLKSDGFANRNFMQLIHDDSLTFKEDIQKAQVSGQGDSLHEHIANLAGSPAIKKGILQTVKVVDELVKVMGRHKPENIVIEMARENQTTQKGQKNSRERMKRIEEGIKELGSQILKEHPVENTQLQNEKLYLYYLQNGRDMYVDQELDINRLSDYDVDHIVPQSFLKDDSIDNKVLTRSDKARGKSDNVPSEEVVKKMKNYWRQLLNAKLITQRKFDNLTKAERGGLSELDKAGFIKRQLVETRQITKHVAQILDSRMNTKYDENDKLIREVKVITLKSKLVSDFRKDFQFYKVREINNYHHAHDAYLNAVVGTALIKKYPKLESEFVYGDYKVYDVRKMIAKSEQEIGKATAKYFFYSNIMNFFKTEITLANGEIRKRPLIETNGETGEIVWDKGRDFATVRKVLSMPQVNIVKKTEVQTGGFSKESILPKRNSDKLIARKKDWDPKKYGGFDSPTVAYSVLVVAKVEKGKSKKLKSVKELLGITIMERSSFEKNPIDFLEAKGYKEVKKDLIIKLPKYSLFELENGRKRMLASAGELQKGNELALPSKYVNFLYLASHYEKLKGSPEDNEQKQLFVEQHKHYLDEIIEQISEFSKRVILADANLDKVLSAYNKHRDKPIREQAENIIHLFTLTNLGAPAAFKYFDTTIDRKRYTSTKEVLDATLIHQSITGLYETRIDLSQLGGDGGGGGGGSGGTLNIEDEHRLHETSKEPDVSLGSTWLSDFPQAWAETGGMGLAVRQAPLIIPLKATSTPVSIKQYPMSQEARLGIKPHIQRLLDQGILVPCQSPWNTPLLPVKKPGTNDYRPVQDLREVNKRVEDIHPTVPNPYNLLSGLPPSHQWYTVLDLKDAFFCLRLHPTSQPLFAFEWRDPEMGISGQLTWTRLPQGFKNSPTLFNEALHRDLADFRIQHPDLILLQYVDDLLLAATSELDCQQGTRALLQTLGNLGYRASAKKAQICQKQVKYLGYLLKEGQRWLTEARKETVMGQPTPKTPRQLREFLGKAGFCRLFIPGFAEMAAPLYPLTKPGTLFNWGPDQQKAYQEIKQALLTAPALGLPDLTKPFELFVDEKQGYAKGVLTQKLGPWRRPVAYLSKKLDPVAAGWPPCLRMVAAIAVLTKDAGKLTMGQPLVILAPHAVEALVKQPPDRWLSNARMTHYQALLLDTDRVQFGPVVALNPATLLPLPEEGLQHNCLDILAEAHGTRPDLTDQPLPDADHTWYTDGSSLLQEGQRKAGAAVTTETEVIWAKALPAGTSAQRAELIALTQALKMAEGKKLNVYTDSRYAFATAHIHGEIYRRRGWLTSEGKEIKNKDEILALLKALFLPKRLSIIHCPGHQKGHSAEARGNRMADQAARKAAITETPDTSTLLAGKRTADGSEFEKRTADGSEFESPKKKAKVE

SEQ ID NO: 2781 - protein, 2096 aa, synthetic construct
MPAAKRVKLDGGDKKYSIGLDIGTNSVGWAVITDEYKVPSKKFKVLGNTDRHSIKKNLIGALLFDSGETAEATRLKRTARRRYTRRKNRICYLQEIFSNEMAKVDDSFFHRLEESFLVEEDKKHERHPIFGNIVDEVAYHEKYPTIYHLRKKLVDSTDKADLRLIYLALAHMIKFRGHFLIEGDLNPDNSDVDKLFIQLVQTYNQLFEENPINASGVDAKAILSARLSKSRRLENLIAQLPGEKKNGLFGNLIALSLGLTPNFKSNFDLAEDAKLQLSKDTYDDDLDNLLAQIGDQYADLFLAAKNLSDAILLSDILRVNTEITKAPLSASMIKRYDEHHQDLTLLKALVRQQLPEKYKEIFFDQSKNGYAGYIDGGASQEEFYKFIKPILEKMDGTEELLVKLNREDLLRKQRTFDNGSIPHQIHLGELHAILRRQEDFYPFLKDNREKIEKILTFRIPYYVGPLARGNSRFAWMTRKSEETITPWNFEEVVDKGASAQSFIERMTNFDKNLPNEKVLPKHSLLYEYFTVYNELTKVKYVTEGMRKPAFLSGEQKKAIVDLLFKTNRKVTVKQLKEDYFKKIECFDSVEISGVEDRFNASLGTYHDLLKIIKDKDFLDNEENEDILEDIVLTLTLFEDREMIEERLKTYAHLFDDKVMKQLKRRRYTGWGRLSRKLINGIRDKQSGKTILDFLKSDGFANRNFMQLIHDDSLTFKEDIQKAQVSGQGDSLHEHIANLAGSPAIKKGILQTVKVVDELVKVMGRHKPENIVIEMARENQTTQKGQKNSRERMKRIEEGIKELGSQILKEHPVENTQLQNEKLYLYYLQNGRDMYVDQELDINRLSDYDVDHIVPQSFLKDDSIDNKVLTRSDKARGKSDNVPSEEVVKKMKNYWRQLLNAKLITQRKFDNLTKAERGGLSELDKAGFIKRQLVETRQITKHVAQILDSRMNTKYDENDKLIREVKVITLKSKLVSDFRKDFQFYKVREINNYHHAHDAYLNAVVGTALIKKYPKLESEFVYGDYKVYDVRKMIAKSEQEIGKATAKYFFYSNIMNFFKTEITLANGEIRKRPLIETNGETGEIVWDKGRDFATVRKVLSMPQVNIVKKTEVQTGGFSKESILPKRNSDKLIARKKDWDPKKYGGFDSPTVAYSVLVVAKVEKGKSKKLKSVKELLGITIMERSSFEKNPIDFLEAKGYKEVKKDLIIKLPKYSLFELENGRKRMLASAGELQKGNELALPSKYVNFLYLASHYEKLKGSPEDNEQKQLFVEQHKHYLDEIIEQISEFSKRVILADANLDKVLSAYNKHRDKPIREQAENIIHLFTLTNLGAPAAFKYFDTTIDRKRYTSTKEVLDATLIHQSITGLYETRIDLSQLGGDGGEAAAKPAPGSSGGTLNIEDEHRLHETSKEPDVSLGSTWLSDFPQAWAETGGMGLAVRQAPLIIPLKATSTPVSIKQYPMSQEARLGIKPHIQRLLDQGILVPCQSPWNTPLLPVKKPGTNDYRPVQDLREVNKRVEDIHPTVPNPYNLLSGLPPSHQWYTVLDLKDAFFCLRLHPTSQPLFAFEWRDPEMGISGQLTWTRLPQGFKNSPTLFNEALHRDLADFRIQHPDLILLQYVDDLLLAATSELDCQQGTRALLQTLGNLGYRASAKKAQICQKQVKYLGYLLKEGQRWLTEARKETVMGQPTPKTPRQLREFLGKAGFCRLFIPGFAEMAAPLYPLTKPGTLFNWGPDQQKAYQEIKQALLTAPALGLPDLTKPFELFVDEKQGYAKGVLTQKLGPWRRPVAYLSKKLDPVAAGWPPCLRMVAAIAVLTKDAGKLTMGQPLVILAPHAVEALVKQPPDRWLSNARMTHYQALLLDTDRVQFGPVVALNPATLLPLPEEGLQHNCLDILAEAHGTRPDLTDQPLPDADHTWYTDGSSLLQEGQRKAGAAVTTETEVIWAKALPAGTSAQRAELIALTQALKMAEGKKLNVYTDSRYAFATAHIHGEIYRRRGWLTSEGKEIKNKDEILALLKALFLPKRLSIIHCPGHQKGHSAEARGNRMADQAARKAAITETPDTSTLLAGKRTADGSEFEKRTADGSEFESPKKKAKVE

SEQ ID NO: 2782 - protein, 2096 aa, synthetic construct
MPAAKRVKLDGGDKKYSIGLDIGTNSVGWAVITDEYKVPSKKFKVLGNTDRHSIKKNLIGALLFDSGETAEATRLKRTARRRYTRRKNRICYLQEIFSNEMAKVDDSFFHRLEESFLVEEDKKHERHPIFGNIVDEVAYHEKYPTIYHLRKKLVDSTDKADLRLIYLALAHMIKFRGHFLIEGDLNPDNSDVDKLFIQLVQTYNQLFEENPINASGVDAKAILSARLSKSRRLENLIAQLPGEKKNGLFGNLIALSLGLTPNFKSNFDLAEDAKLQLSKDTYDDDLDNLLAQIGDQYADLFLAAKNLSDAILLSDILRVNTEITKAPLSASMIKRYDEHHQDLTLLKALVRQQLPEKYKEIFFDQSKNGYAGYIDGGASQEEFYKFIKPILEKMDGTEELLVKLNREDLLRKQRTFDNGSIPHQIHLGELHAILRRQEDFYPFLKDNREKIEKILTFRIPYYVGPLARGNSRFAWMTRKSEETITPWNFEEVVDKGASAQSFIERMTNFDKNLPNEKVLPKHSLLYEYFTVYNELTKVKYVTEGMRKPAFLSGEQKKAIVDLLFKTNRKVTVKQLKEDYFKKIECFDSVEISGVEDRFNASLGTYHDLLKIIKDKDFLDNEENEDILEDIVLTLTLFEDREMIEERLKTYAHLFDDKVMKQLKRRRYTGWGRLSRKLINGIRDKQSGKTILDFLKSDGFANRNFMQLIHDDSLTFKEDIQKAQVSGQGDSLHEHIANLAGSPAIKKGILQTVKVVDELVKVMGRHKPENIVIEMARENQTTQKGQKNSRERMKRIEEGIKELGSQILKEHPVENTQLQNEKLYLYYLQNGRDMYVDQELDINRLSDYDVDHIVPQSFLKDDSIDNKVLTRSDKARGKSDNVPSEEVVKKMKNYWRQLLNAKLITQRKFDNLTKAERGGLSELDKAGFIKRQLVETRQITKHVAQILDSRMNTKYDENDKLIREVKVITLKSKLVSDFRKDFQFYKVREINNYHHAHDAYLNAVVGTALIKKYPKLESEFVYGDYKVYDVRKMIAKSEQEIGKATAKYFFYSNIMNFFKTEITLANGEIRKRPLIETNGETGEIVWDKGRDFATVRKVLSMPQVNIVKKTEVQTGGFSKESILPKRNSDKLIARKKDWDPKKYGGFDSPTVAYSVLVVAKVEKGKSKKLKSVKELLGITIMERSSFEKNPIDFLEAKGYKEVKKDLIIKLPKYSLFELENGRKRMLASAGELQKGNELALPSKYVNFLYLASHYEKLKGSPEDNEQKQLFVEQHKHYLDEIIEQISEFSKRVILADANLDKVLSAYNKHRDKPIREQAENIIHLFTLTNLGAPAAFKYFDTTIDRKRYTSTKEVLDATLIHQSITGLYETRIDLSQLGGDGGEAAAKGGSPAPGGTLNIEDEHRLHETSKEPDVSLGSTWLSDFPQAWAETGGMGLAVRQAPLIIPLKATSTPVSIKQYPMSQEARLGIKPHIQRLLDQGILVPCQSPWNTPLLPVKKPGTNDYRPVQDLREVNKRVEDIHPTVPNPYNLLSGLPPSHQWYTVLDLKDAFFCLRLHPTSQPLFAFEWRDPEMGISGQLTWTRLPQGFKNSPTLFNEALHRDLADFRIQHPDLILLQYVDDLLLAATSELDCQQGTRALLQTLGNLGYRASAKKAQICQKQVKYLGYLLKEGQRWLTEARKETVMGQPTPKTPRQLREFLGKAGFCRLFIPGFAEMAAPLYPLTKPGTLFNWGPDQQKAYQEIKQALLTAPALGLPDLTKPFELFVDEKQGYAKGVLTQKLGPWRRPVAYLSKKLDPVAAGWPPCLRMVAAIAVLTKDAGKLTMGQPLVILAPHAVEALVKQPPDRWLSNARMTHYQALLLDTDRVQFGPVVALNPATLLPLPEEGLQHNCLDILAEAHGTRPDLTDQPLPDADHTWYTDGSSLLQEGQRKAGAAVTTETEVIWAKALPAGTSAQRAELIALTQALKMAEGKKLNVYTDSRYAFATAHIHGEIYRRRGWLTSEGKEIKNKDEILALLKALFLPKRLSIIHCPGHQKGHSAEARGNRMADQAARKAAITETPDTSTLLAGKRTADGSEFEKRTADGSEFESPKKKAKVE

SEQ ID NO: 2783 - protein, 2093 aa, synthetic construct
MPAAKRVKLDGGDKKYSIGLDIGTNSVGWAVITDEYKVPSKKFKVLGNTDRHSIKKNLIGALLFDSGETAEATRLKRTARRRYTRRKNRICYLQEIFSNEMAKVDDSFFHRLEESFLVEEDKKHERHPIFGNIVDEVAYHEKYPTIYHLRKKLVDSTDKADLRLIYLALAHMIKFRGHFLIEGDLNPDNSDVDKLFIQLVQTYNQLFEENPINASGVDAKAILSARLSKSRRLENLIAQLPGEKKNGLFGNLIALSLGLTPNFKSNFDLAEDAKLQLSKDTYDDDLDNLLAQIGDQYADLFLAAKNLSDAILLSDILRVNTEITKAPLSASMIKRYDEHHQDLTLLKALVRQQLPEKYKEIFFDQSKNGYAGYIDGGASQEEFYKFIKPILEKMDGTEELLVKLNREDLLRKQRTFDNGSIPHQIHLGELHAILRRQEDFYPFLKDNREKIEKILTFRIPYYVGPLARGNSRFAWMTRKSEETITPWNFEEVVDKGASAQSFIERMTNFDKNLPNEKVLPKHSLLYEYFTVYNELTKVKYVTEGMRKPAFLSGEQKKAIVDLLFKTNRKVTVKQLKEDYFKKIECFDSVEISGVEDRFNASLGTYHDLLKIIKDKDFLDNEENEDILEDIVLTLTLFEDREMIEERLKTYAHLFDDKVMKQLKRRRYTGWGRLSRKLINGIRDKQSGKTILDFLKSDGFANRNFMQLIHDDSLTFKEDIQKAQVSGQGDSLHEHIANLAGSPAIKKGILQTVKVVDELVKVMGRHKPENIVIEMARENQTTQKGQKNSRERMKRIEEGIKELGSQILKEHPVENTQLQNEKLYLYYLQNGRDMYVDQELDINRLSDYDVDHIVPQSFLKDDSIDNKVLTRSDKARGKSDNVPSEEVVKKMKNYWRQLLNAKLITQRKFDNLTKAERGGLSELDKAGFIKRQLVETRQITKHVAQILDSRMNTKYDENDKLIREVKVITLKSKLVSDFRKDFQFYKVREINNYHHAHDAYLNAVVGTALIKKYPKLESEFVYGDYKVYDVRKMIAKSEQEIGKATAKYFFYSNIMNFFKTEITLANGEIRKRPLIETNGETGEIVWDKGRDFATVRKVLSMPQVNIVKKTEVQTGGFSKESILPKRNSDKLIARKKDWDPKKYGGFDSPTVAYSVLVVAKVEKGKSKKLKSVKELLGITIMERSSFEKNPIDFLEAKGYKEVKKDLIIKLPKYSLFELENGRKRMLASAGELQKGNELALPSKYVNFLYLASHYEKLKGSPEDNEQKQLFVEQHKHYLDEIIEQISEFSKRVILADANLDKVLSAYNKHRDKPIREQAENIIHLFTLTNLGAPAAFKYFDTTIDRKRYTSTKEVLDATLIHQSITGLYETRIDLSQLGGDGGEAAAKGGSGGTLNIEDEHRLHETSKEPDVSLGSTWLSDFPQAWAETGGMGLAVRQAPLIIPLKATSTPVSIKQYPMSQEARLGIKPHIQRLLDQGILVPCQSPWNTPLLPVKKPGTNDYRPVQDLREVNKRVEDIHPTVPNPYNLLSGLPPSHQWYTVLDLKDAFFCLRLHPTSQPLFAFEWRDPEMGISGQLTWTRLPQGFKNSPTLFNEALHRDLADFRIQHPDLILLQYVDDLLLAATSELDCQQGTRALLQTLGNLGYRASAKKAQICQKQVKYLGYLLKEGQRWLTEARKETVMGQPTPKTPRQLREFLGKAGFCRLFIPGFAEMAAPLYPLTKPGTLFNWGPDQQKAYQEIKQALLTAPALGLPDLTKPFELFVDEKQGYAKGVLTQKLGPWRRPVAYLSKKLDPVAAGWPPCLRMVAAIAVLTKDAGKLTMGQPLVILAPHAVEALVKQPPDRWLSNARMTHYQALLLDTDRVQFGPVVALNPATLLPLPEEGLQHNCLDILAEAHGTRPDLTDQPLPDADHTWYTDGSSLLQEGQRKAGAAVTTETEVIWAKALPAGTSAQRAELIALTQALKMAEGKKLNVYTDSRYAFATAHIHGEIYRRRGWLTSEGKEIKNKDEILALLKALFLPKRLSIIHCPGHQKGHSAEARGNRMADQAARKAAITETPDTSTLLAGKRTADGSEFEKRTADGSEFESPKKKAKVE

SEQ ID NO: 2784 - protein, 2131 aa, synthetic construct
MPAAKRVKLDGGDKKYSIGLDIGTNSVGWAVITDEYKVPSKKFKVLGNTDRHSIKKNLIGALLFDSGETAEATRLKRTARRRYTRRKNRICYLQEIFSNEMAKVDDSFFHRLEESFLVEEDKKHERHPIFGNIVDEVAYHEKYPTIYHLRKKLVDSTDKADLRLIYLALAHMIKFRGHFLIEGDLNPDNSDVDKLFIQLVQTYNQLFEENPINASGVDAKAILSARLSKSRRLENLIAQLPGEKKNGLFGNLIALSLGLTPNFKSNFDLAEDAKLQLSKDTYDDDLDNLLAQIGDQYADLFLAAKNLSDAILLSDILRVNTEITKAPLSASMIKRYDEHHQDLTLLKALVRQQLPEKYKEIFFDQSKNGYAGYIDGGASQEEFYKFIKPILEKMDGTEELLVKLNREDLLRKQRTFDNGSIPHQIHLGELHAILRRQEDFYPFLKDNREKIEKILTFRIPYYVGPLARGNSRFAWMTRKSEETITPWNFEEVVDKGASAQSFIERMTNFDKNLPNEKVLPKHSLLYEYFTVYNELTKVKYVTEGMRKPAFLSGEQKKAIVDLLFKTNRKVTVKQLKEDYFKKIECFDSVEISGVEDRFNASLGTYHDLLKIIKDKDFLDNEENEDILEDIVLTLTLFEDREMIEERLKTYAHLFDDKVMKQLKRRRYTGWGRLSRKLINGIRDKQSGKTILDFLKSDGFANRNFMQLIHDDSLTFKEDIQKAQVSGQGDSLHEHIANLAGSPAIKKGILQTVKVVDELVKVMGRHKPENIVIEMARENQTTQKGQKNSRERMKRIEEGIKELGSQILKEHPVENTQLQNEKLYLYYLQNGRDMYVDQELDINRLSDYDVDHIVPQSFLKDDSIDNKVLTRSDKARGKSDNVPSEEVVKKMKNYWRQLLNAKLITQRKFDNLTKAERGGLSELDKAGFIKRQLVETRQITKHVAQILDSRMNTKYDENDKLIREVKVITLKSKLVSDFRKDFQFYKVREINNYHHAHDAYLNAVVGTALIKKYPKLESEFVYGDYKVYDVRKMIAKSEQEIGKATAKYFFYSNIMNFFKTEITLANGEIRKRPLIETNGETGEIVWDKGRDFATVRKVLSMPQVNIVKKTEVQTGGFSKESILPKRNSDKLIARKKDWDPKKYGGFDSPTVAYSVLVVAKVEKGKSKKLKSVKELLGITIMERSSFEKNPIDFLEAKGYKEVKKDLIIKLPKYSLFELENGRKRMLASAGELQKGNELALPSKYVNFLYLASHYEKLKGSPEDNEQKQLFVEQHKHYLDEIIEQISEFSKRVILADANLDKVLSAYNKHRDKPIREQAENIIHLFTLTNLGAPAAFKYFDTTIDRKRYTSTKEVLDATLIHQSITGLYETRIDLSQLGGDGGAEAAAKEAAAKEAAAKEAAAKALEAEAAAKEAAAKEAAAKEAAAKAGGTLNIEDEHRLHETSKEPDVSLGSTWLSDFPQAWAETGGMGLAVRQAPLIIPLKATSTPVSIKQYPMSQEARLGIKPHIQRLLDQGILVPCQSPWNTPLLPVKKPGTNDYRPVQDLREVNKRVEDIHPTVPNPYNLLSGLPPSHQWYTVLDLKDAFFCLRLHPTSQPLFAFEWRDPEMGISGQLTWTRLPQGFKNSPTLFNEALHRDLADFRIQHPDLILLQYVDDLLLAATSELDCQQGTRALLQTLGNLGYRASAKKAQICQKQVKYLGYLLKEGQRWLTEARKETVMGQPTPKTPRQLREFLGKAGFCRLFIPGFAEMAAPLYPLTKPGTLFNWGPDQQKAYQEIKQALLTAPALGLPDLTKPFELFVDEKQGYAKGVLTQKLGPWRRPVAYLSKKLDPVAAGWPPCLRMVAAIAVLTKDAGKLTMGQPLVILAPHAVEALVKQPPDRWLSNARMTHYQALLLDTDRVQFGPVVALNPATLLPLPEEGLQHNCLDILAEAHGTRPDLTDQPLPDADHTWYTDGSSLLQEGQRKAGAAVTTETEVIWAKALPAGTSAQRAELIALTQALKMAEGKKLNVYTDSRYAFATAHIHGEIYRRRGWLTSEGKEIKNKDEILALLKALFLPKRLSIIHCPGHQKGHSAEARGNRMADQAARKAAITETPDTSTLLAGKRTADGSEFEKRTADGSEFESPKKKAKVE

SEQ ID NO: 2785 - protein, 2096 aa, synthetic construct
MPAAKRVKLDGGDKKYSIGLDIGTNSVGWAVITDEYKVPSKKFKVLGNTDRHSIKKNLIGALLFDSGETAEATRLKRTARRRYTRRKNRICYLQEIFSNEMAKVDDSFFHRLEESFLVEEDKKHERHPIFGNIVDEVAYHEKYPTIYHLRKKLVDSTDKADLRLIYLALAHMIKFRGHFLIEGDLNPDNSDVDKLFIQLVQTYNQLFEENPINASGVDAKAILSARLSKSRRLENLIAQLPGEKKNGLFGNLIALSLGLTPNFKSNFDLAEDAKLQLSKDTYDDDLDNLLAQIGDQYADLFLAAKNLSDAILLSDILRVNTEITKAPLSASMIKRYDEHHQDLTLLKALVRQQLPEKYKEIFFDQSKNGYAGYIDGGASQEEFYKFIKPILEKMDGTEELLVKLNREDLLRKQRTFDNGSIPHQIHLGELHAILRRQEDFYPFLKDNREKIEKILTFRIPYYVGPLARGNSRFAWMTRKSEETITPWNFEEVVDKGASAQSFIERMTNFDKNLPNEKVLPKHSLLYEYFTVYNELTKVKYVTEGMRKPAFLSGEQKKAIVDLLFKTNRKVTVKQLKEDYFKKIECFDSVEISGVEDRFNASLGTYHDLLKIIKDKDFLDNEENEDILEDIVLTLTLFEDREMIEERLKTYAHLFDDKVMKQLKRRRYTGWGRLSRKLINGIRDKQSGKTILDFLKSDGFANRNFMQLIHDDSLTFKEDIQKAQVSGQGDSLHEHIANLAGSPAIKKGILQTVKVVDELVKVMGRHKPENIVIEMARENQTTQKGQKNSRERMKRIEEGIKELGSQILKEHPVENTQLQNEKLYLYYLQNGRDMYVDQELDINRLSDYDVDHIVPQSFLKDDSIDNKVLTRSDKARGKSDNVPSEEVVKKMKNYWRQLLNAKLITQRKFDNLTKAERGGLSELDKAGFIKRQLVETRQITKHVAQILDSRMNTKYDENDKLIREVKVITLKSKLVSDFRKDFQFYKVREINNYHHAHDAYLNAVVGTALIKKYPKLESEFVYGDYKVYDVRKMIAKSEQEIGKATAKYFFYSNIMNFFKTEITLANGEIRKRPLIETNGETGEIVWDKGRDFATVRKVLSMPQVNIVKKTEVQTGGFSKESILPKRNSDKLIARKKDWDPKKYGGFDSPTVAYSVLVVAKVEKGKSKKLKSVKELLGITIMERSSFEKNPIDFLEAKGYKEVKKDLIIKLPKYSLFELENGRKRMLASAGELQKGNELALPSKYVNFLYLASHYEKLKGSPEDNEQKQLFVEQHKHYLDEIIEQISEFSKRVILADANLDKVLSAYNKHRDKPIREQAENIIHLFTLTNLGAPAAFKYFDTTIDRKRYTSTKEVLDATLIHQSITGLYETRIDLSQLGGDGGEAAAKGSSGGGGGTLNIEDEHRLHETSKEPDVSLGSTWLSDFPQAWAETGGMGLAVRQAPLIIPLKATSTPVSIKQYPMSQEARLGIKPHIQRLLDQGILVPCQSPWNTPLLPVKKPGTNDYRPVQDLREVNKRVEDIHPTVPNPYNLLSGLPPSHQWYTVLDLKDAFFCLRLHPTSQPLFAFEWRDPEMGISGQLTWTRLPQGFKNSPTLFNEALHRDLADFRIQHPDLILLQYVDDLLLAATSELDCQQGTRALLQTLGNLGYRASAKKAQICQKQVKYLGYLLKEGQRWLTEARKETVMGQPTPKTPRQLREFLGKAGFCRLFIPGFAEMAAPLYPLTKPGTLFNWGPDQQKAYQEIKQALLTAPALGLPDLTKPFELFVDEKQGYAKGVLTQKLGPWRRPVAYLSKKLDPVAAGWPPCLRMVAAIAVLTKDAGKLTMGQPLVILAPHAVEALVKQPPDRWLSNARMTHYQALLLDTDRVQFGPVVALNPATLLPLPEEGLQHNCLDILAEAHGTRPDLTDQPLPDADHTWYTDGSSLLQEGQRKAGAAVTTETEVIWAKALPAGTSAQRAELIALTQALKMAEGKKLNVYTDSRYAFATAHIHGEIYRRRGWLTSEGKEIKNKDEILALLKALFLPKRLSIIHCPGHQKGHSAEARGNRMADQAARKAAITETPDTSTLLAGKRTADGSEFEKRTADGSEFESPKKKAKVE

SEQ ID NO: 2786 - protein, 2096 aa, synthetic construct
MPAAKRVKLDGGDKKYSIGLDIGTNSVGWAVITDEYKVPSKKFKVLGNTDRHSIKKNLIGALLFDSGETAEATRLKRTARRRYTRRKNRICYLQEIFSNEMAKVDDSFFHRLEESFLVEEDKKHERHPIFGNIVDEVAYHEKYPTIYHLRKKLVDSTDKADLRLIYLALAHMIKFRGHFLIEGDLNPDNSDVDKLFIQLVQTYNQLFEENPINASGVDAKAILSARLSKSRRLENLIAQLPGEKKNGLFGNLIALSLGLTPNFKSNFDLAEDAKLQLSKDTYDDDLDNLLAQIGDQYADLFLAAKNLSDAILLSDILRVNTEITKAPLSASMIKRYDEHHQDLTLLKALVRQQLPEKYKEIFFDQSKNGYAGYIDGGASQEEFYKFIKPILEKMDGTEELLVKLNREDLLRKQRTFDNGSIPHQIHLGELHAILRRQEDFYPFLKDNREKIEKILTFRIPYYVGPLARGNSRFAWMTRKSEETITPWNFEEVVDKGASAQSFIERMTNFDKNLPNEKVLPKHSLLYEYFTVYNELTKVKYVTEGMRKPAFLSGEQKKAIVDLLFKTNRKVTVKQLKEDYFKKIECFDSVEISGVEDRFNASLGTYHDLLKIIKDKDFLDNEENEDILEDIVLTLTLFEDREMIEERLKTYAHLFDDKVMKQLKRRRYTGWGRLSRKLINGIRDKQSGKTILDFLKSDGFANRNFMQLIHDDSLTFKEDIQKAQVSGQGDSLHEHIANLAGSPAIKKGILQTVKVVDELVKVMGRHKPENIVIEMARENQTTQKGQKNSRERMKRIEEGIKELGSQILKEHPVENTQLQNEKLYLYYLQNGRDMYVDQELDINRLSDYDVDHIVPQSFLKDDSIDNKVLTRSDKARGKSDNVPSEEVVKKMKNYWRQLLNAKLITQRKFDNLTKAERGGLSELDKAGFIKRQLVETRQITKHVAQILDSRMNTKYDENDKLIREVKVITLKSKLVSDFRKDFQFYKVREINNYHHAHDAYLNAVVGTALIKKYPKLESEFVYGDYKVYDVRKMIAKSEQEIGKATAKYFFYSNIMNFFKTEITLANGEIRKRPLIETNGETGEIVWDKGRDFATVRKVLSMPQVNIVKKTEVQTGGFSKESILPKRNSDKLIARKKDWDPKKYGGFDSPTVAYSVLVVAKVEKGKSKKLKSVKELLGITIMERSSFEKNPIDFLEAKGYKEVKKDLIIKLPKYSLFELENGRKRMLASAGELQKGNELALPSKYVNFLYLASHYEKLKGSPEDNEQKQLFVEQHKHYLDEIIEQISEFSKRVILADANLDKVLSAYNKHRDKPIREQAENIIHLFTLTNLGAPAAFKYFDTTIDRKRYTSTKEVLDATLIHQSITGLYETRIDLSQLGGDGGPAPGGSEAAAKGGTLNIEDEHRLHETSKEPDVSLGSTWLSDFPQAWAETGGMGLAVRQAPLIIPLKATSTPVSIKQYPMSQEARLGIKPHIQRLLDQGILVPCQSPWNTPLLPVKKPGTNDYRPVQDLREVNKRVEDIHPTVPNPYNLLSGLPPSHQWYTVLDLKDAFFCLRLHPTSQPLFAFEWRDPEMGISGQLTWTRLPQGFKNSPTLFNEALHRDLADFRIQHPDLILLQYVDDLLLAATSELDCQQGTRALLQTLGNLGYRASAKKAQICQKQVKYLGYLLKEGQRWLTEARKETVMGQPTPKTPRQLREFLGKAGFCRLFIPGFAEMAAPLYPLTKPGTLFNWGPDQQKAYQEIKQALLTAPALGLPDLTKPFELFVDEKQGYAKGVLTQKLGPWRRPVAYLSKKLDPVAAGWPPCLRMVAAIAVLTKDAGKLTMGQPLVILAPHAVEALVKQPPDRWLSNARMTHYQALLLDTDRVQFGPVVALNPATLLPLPEEGLQHNCLDILAEAHGTRPDLTDQPLPDADHTWYTDGSSLLQEGQRKAGAAVTTETEVIWAKALPAGTSAQRAELIALTQALKMAEGKKLNVYTDSRYAFATAHIHGEIYRRRGWLTSEGKEIKNKDEILALLKALFLPKRLSIIHCPGHQKGHSAEARGNRMADQAARKAAITETPDTSTLLAGKRTADGSEFEKRTADGSEFESPKKKAKVE

SEQ ID NO: 2787 - protein, 2096 aa, synthetic construct
MPAAKRVKLDGGDKKYSIGLDIGTNSVGWAVITDEYKVPSKKFKVLGNTDRHSIKKNLIGALLFDSGETAEATRLKRTARRRYTRRKNRICYLQEIFSNEMAKVDDSFFHRLEESFLVEEDKKHERHPIFGNIVDEVAYHEKYPTIYHLRKKLVDSTDKADLRLIYLALAHMIKFRGHFLIEGDLNPDNSDVDKLFIQLVQTYNQLFEENPINASGVDAKAILSARLSKSRRLENLIAQLPGEKKNGLFGNLIALSLGLTPNFKSNFDLAEDAKLQLSKDTYDDDLDNLLAQIGDQYADLFLAAKNLSDAILLSDILRVNTEITKAPLSASMIKRYDEHHQDLTLLKALVRQQLPEKYKEIFFDQSKNGYAGYIDGGASQEEFYKFIKPILEKMDGTEELLVKLNREDLLRKQRTFDNGSIPHQIHLGELHAILRRQEDFYPFLKDNREKIEKILTFRIPYYVGPLARGNSRFAWMTRKSEETITPWNFEEVVDKGASAQSFIERMTNFDKNLPNEKVLPKHSLLYEYFTVYNELTKVKYVTEGMRKPAFLSGEQKKAIVDLLFKTNRKVTVKQLKEDYFKKIECFDSVEISGVEDRFNASLGTYHDLLKIIKDKDFLDNEENEDILEDIVLTLTLFEDREMIEERLKTYAHLFDDKVMKQLKRRRYTGWGRLSRKLINGIRDKQSGKTILDFLKSDGFANRNFMQLIHDDSLTFKEDIQKAQVSGQGDSLHEHIANLAGSPAIKKGILQTVKVVDELVKVMGRHKPENIVIEMARENQTTQKGQKNSRERMKRIEEGIKELGSQILKEHPVENTQLQNEKLYLYYLQNGRDMYVDQELDINRLSDYDVDHIVPQSFLKDDSIDNKVLTRSDKARGKSDNVPSEEVVKKMKNYWRQLLNAKLITQRKFDNLTKAERGGLSELDKAGFIKRQLVETRQITKHVAQILDSRMNTKYDENDKLIREVKVITLKSKLVSDFRKDFQFYKVREINNYHHAHDAYLNAVVGTALIKKYPKLESEFVYGDYKVYDVRKMIAKSEQEIGKATAKYFFYSNIMNFFKTEITLANGEIRKRPLIETNGETGEIVWDKGRDFATVRKVLSMPQVNIVKKTEVQTGGFSKESILPKRNSDKLIARKKDWDPKKYGGFDSPTVAYSVLVVAKVEKGKSKKLKSVKELLGITIMERSSFEKNPIDFLEAKGYKEVKKDLIIKLPKYSLFELENGRKRMLASAGELQKGNELALPSKYVNFLYLASHYEKLKGSPEDNEQKQLFVEQHKHYLDEIIEQISEFSKRVILADANLDKVLSAYNKHRDKPIREQAENIIHLFTLTNLGAPAAFKYFDTTIDRKRYTSTKEVLDATLIHQSITGLYETRIDLSQLGGDGGGGSEAAAKGGGGGTLNIEDEHRLHETSKEPDVSLGSTWLSDFPQAWAETGGMGLAVRQAPLIIPLKATSTPVSIKQYPMSQEARLGIKPHIQRLLDQGILVPCQSPWNTPLLPVKKPGTNDYRPVQDLREVNKRVEDIHPTVPNPYNLLSGLPPSHQWYTVLDLKDAFFCLRLHPTSQPLFAFEWRDPEMGISGQLTWTRLPQGFKNSPTLFNEALHRDLADFRIQHPDLILLQYVDDLLLAATSELDCQQGTRALLQTLGNLGYRASAKKAQICQKQVKYLGYLLKEGQRWLTEARKETVMGQPTPKTPRQLREFLGKAGFCRLFIPGFAEMAAPLYPLTKPGTLFNWGPDQQKAYQEIKQALLTAPALGLPDLTKPFELFVDEKQGYAKGVLTQKLGPWRRPVAYLSKKLDPVAAGWPPCLRMVAAIAVLTKDAGKLTMGQPLVILAPHAVEALVKQPPDRWLSNARMTHYQALLLDTDRVQFGPVVALNPATLLPLPEEGLQHNCLDILAEAHGTRPDLTDQPLPDADHTWYTDGSSLLQEGQRKAGAAVTTETEVIWAKALPAGTSAQRAELIALTQALKMAEGKKLNVYTDSRYAFATAHIHGEIYRRRGWLTSEGKEIKNKDEILALLKALFLPKRLSIIHCPGHQKGHSAEARGNRMADQAARKAAITETPDTSTLLAGKRTADGSEFEKRTADGSEFESPKKKAKVE

SEQ ID NO: 2788 - protein, 2100 aa, synthetic construct
MPAAKRVKLDGGDKKYSIGLDIGTNSVGWAVITDEYKVPSKKFKVLGNTDRHSIKKNLIGALLFDSGETAEATRLKRTARRRYTRRKNRICYLQEIFSNEMAKVDDSFFHRLEESFLVEEDKKHERHPIFGNIVDEVAYHEKYPTIYHLRKKLVDSTDKADLRLIYLALAHMIKFRGHFLIEGDLNPDNSDVDKLFIQLVQTYNQLFEENPINASGVDAKAILSARLSKSRRLENLIAQLPGEKKNGLFGNLIALSLGLTPNFKSNFDLAEDAKLQLSKDTYDDDLDNLLAQIGDQYADLFLAAKNLSDAILLSDILRVNTEITKAPLSASMIKRYDEHHQDLTLLKALVRQQLPEKYKEIFFDQSKNGYAGYIDGGASQEEFYKFIKPILEKMDGTEELLVKLNREDLLRKQRTFDNGSIPHQIHLGELHAILRRQEDFYPFLKDNREKIEKILTFRIPYYVGPLARGNSRFAWMTRKSEETITPWNFEEVVDKGASAQSFIERMTNFDKNLPNEKVLPKHSLLYEYFTVYNELTKVKYVTEGMRKPAFLSGEQKKAIVDLLFKTNRKVTVKQLKEDYFKKIECFDSVEISGVEDRFNASLGTYHDLLKIIKDKDFLDNEENEDILEDIVLTLTLFEDREMIEERLKTYAHLFDDKVMKQLKRRRYTGWGRLSRKLINGIRDKQSGKTILDFLKSDGFANRNFMQLIHDDSLTFKEDIQKAQVSGQGDSLHEHIANLAGSPAIKKGILQTVKVVDELVKVMGRHKPENIVIEMARENQTTQKGQKNSRERMKRIEEGIKELGSQILKEHPVENTQLQNEKLYLYYLQNGRDMYVDQELDINRLSDYDVDHIVPQSFLKDDSIDNKVLTRSDKARGKSDNVPSEEVVKKMKNYWRQLLNAKLITQRKFDNLTKAERGGLSELDKAGFIKRQLVETRQITKHVAQILDSRMNTKYDENDKLIREVKVITLKSKLVSDFRKDFQFYKVREINNYHHAHDAYLNAVVGTALIKKYPKLESEFVYGDYKVYDVRKMIAKSEQEIGKATAKYFFYSNIMNFFKTEITLANGEIRKRPLIETNGETGEIVWDKGRDFATVRKVLSMPQVNIVKKTEVQTGGFSKESILPKRNSDKLIARKKDWDPKKYGGFDSPTVAYSVLVVAKVEKGKSKKLKSVKELLGITIMERSSFEKNPIDFLEAKGYKEVKKDLIIKLPKYSLFELENGRKRMLASAGELQKGNELALPSKYVNFLYLASHYEKLKGSPEDNEQKQLFVEQHKHYLDEIIEQISEFSKRVILADANLDKVLSAYNKHRDKPIREQAENIIHLFTLTNLGAPAAFKYFDTTIDRKRYTSTKEVLDATLIHQSITGLYETRIDLSQLGGDGGEAAAKGGGGSEAAAKGGTLNIEDEHRLHETSKEPDVSLGSTWLSDFPQAWAETGGMGLAVRQAPLIIPLKATSTPVSIKQYPMSQEARLGIKPHIQRLLDQGILVPCQSPWNTPLLPVKKPGTNDYRPVQDLREVNKRVEDIHPTVPNPYNLLSGLPPSHQWYTVLDLKDAFFCLRLHPTSQPLFAFEWRDPEMGISGQLTWTRLPQGFKNSPTLFNEALHRDLADFRIQHPDLILLQYVDDLLLAATSELDCQQGTRALLQTLGNLGYRASAKKAQICQKQVKYLGYLLKEGQRWLTEARKETVMGQPTPKTPRQLREFLGKAGFCRLFIPGFAEMAAPLYPLTKPGTLFNWGPDQQKAYQEIKQALLTAPALGLPDLTKPFELFVDEKQGYAKGVLTQKLGPWRRPVAYLSKKLDPVAAGWPPCLRMVAAIAVLTKDAGKLTMGQPLVILAPHAVEALVKQPPDRWLSNARMTHYQALLLDTDRVQFGPVVALNPATLLPLPEEGLQHNCLDILAEAHGTRPDLTDQPLPDADHTWYTDGSSLLQEGQRKAGAAVTTETEVIWAKALPAGTSAQRAELIALTQALKMAEGKKLNVYTDSRYAFATAHIHGEIYRRRGWLTSEGKEIKNKDEILALLKALFLPKRLSIIHCPGHQKGHSAEARGNRMADQAARKAAITETPDTSTLLAGKRTADGSEFEKRTADGSEFESPKKKAKVE

SEQ ID NO: 2789 - protein, 2096 aa, synthetic construct
MPAAKRVKLDGGDKKYSIGLDIGTNSVGWAVITDEYKVPSKKFKVLGNTDRHSIKKNLIGALLFDSGETAEATRLKRTARRRYTRRKNRICYLQEIFSNEMAKVDDSFFHRLEESFLVEEDKKHERHPIFGNIVDEVAYHEKYPTIYHLRKKLVDSTDKADLRLIYLALAHMIKFRGHFLIEGDLNPDNSDVDKLFIQLVQTYNQLFEENPINASGVDAKAILSARLSKSRRLENLIAQLPGEKKNGLFGNLIALSLGLTPNFKSNFDLAEDAKLQLSKDTYDDDLDNLLAQIGDQYADLFLAAKNLSDAILLSDILRVNTEITKAPLSASMIKRYDEHHQDLTLLKALVRQQLPEKYKEIFFDQSKNGYAGYIDGGASQEEFYKFIKPILEKMDGTEELLVKLNREDLLRKQRTFDNGSIPHQIHLGELHAILRRQEDFYPFLKDNREKIEKILTFRIPYYVGPLARGNSRFAWMTRKSEETITPWNFEEVVDKGASAQSFIERMTNFDKNLPNEKVLPKHSLLYEYFTVYNELTKVKYVTEGMRKPAFLSGEQKKAIVDLLFKTNRKVTVKQLKEDYFKKIECFDSVEISGVEDRFNASLGTYHDLLKIIKDKDFLDNEENEDILEDIVLTLTLFEDREMIEERLKTYAHLFDDKVMKQLKRRRYTGWGRLSRKLINGIRDKQSGKTILDFLKSDGFANRNFMQLIHDDSLTFKEDIQKAQVSGQGDSLHEHIANLAGSPAIKKGILQTVKVVDELVKVMGRHKPENIVIEMARENQTTQKGQKNSRERMKRIEEGIKELGSQILKEHPVENTQLQNEKLYLYYLQNGRDMYVDQELDINRLSDYDVDHIVPQSFLKDDSIDNKVLTRSDKARGKSDNVPSEEVVKKMKNYWRQLLNAKLITQRKFDNLTKAERGGLSELDKAGFIKRQLVETRQITKHVAQILDSRMNTKYDENDKLIREVKVITLKSKLVSDFRKDFQFYKVREINNYHHAHDAYLNAVVGTALIKKYPKLESEFVYGDYKVYDVRKMIAKSEQEIGKATAKYFFYSNIMNFFKTEITLANGEIRKRPLIETNGETGEIVWDKGRDFATVRKVLSMPQVNIVKKTEVQTGGFSKESILPKRNSDKLIARKKDWDPKKYGGFDSPTVAYSVLVVAKVEKGKSKKLKSVKELLGITIMERSSFEKNPIDFLEAKGYKEVKKDLIIKLPKYSLFELENGRKRMLASAGELQKGNELALPSKYVNFLYLASHYEKLKGSPEDNEQKQLFVEQHKHYLDEIIEQISEFSKRVILADANLDKVLSAYNKHRDKPIREQAENIIHLFTLTNLGAPAAFKYFDTTIDRKRYTSTKEVLDATLIHQSITGLYETRIDLSQLGGDGGEAAAKGGGGSSGGTLNIEDEHRLHETSKEPDVSLGSTWLSDFPQAWAETGGMGLAVRQAPLIIPLKATSTPVSIKQYPMSQEARLGIKPHIQRLLDQGILVPCQSPWNTPLLPVKKPGTNDYRPVQDLREVNKRVEDIHPTVPNPYNLLSGLPPSHQWYTVLDLKDAFFCLRLHPTSQPLFAFEWRDPEMGISGQLTWTRLPQGFKNSPTLFNEALHRDLADFRIQHPDLILLQYVDDLLLAATSELDCQQGTRALLQTLGNLGYRASAKKAQICQKQVKYLGYLLKEGQRWLTEARKETVMGQPTPKTPRQLREFLGKAGFCRLFIPGFAEMAAPLYPLTKPGTLFNWGPDQQKAYQEIKQALLTAPALGLPDLTKPFELFVDEKQGYAKGVLTQKLGPWRRPVAYLSKKLDPVAAGWPPCLRMVAAIAVLTKDAGKLTMGQPLVILAPHAVEALVKQPPDRWLSNARMTHYQALLLDTDRVQFGPVVALNPATLLPLPEEGLQHNCLDILAEAHGTRPDLTDQPLPDADHTWYTDGSSLLQEGQRKAGAAVTTETEVIWAKALPAGTSAQRAELIALTQALKMAEGKKLNVYTDSRYAFATAHIHGEIYRRRGWLTSEGKEIKNKDEILALLKALFLPKRLSIIHCPGHQKGHSAEARGNRMADQAARKAAITETPDTSTLLAGKRTADGSEFEKRTADGSEFESPKKKAKVE

SEQ ID NO: 2790 - protein, 2092 aa, synthetic construct
MPAAKRVKLDGGDKKYSIGLDIGTNSVGWAVITDEYKVPSKKFKVLGNTDRHSIKKNLIGALLFDSGETAEATRLKRTARRRYTRRKNRICYLQEIFSNEMAKVDDSFFHRLEESFLVEEDKKHERHPIFGNIVDEVAYHEKYPTIYHLRKKLVDSTDKADLRLIYLALAHMIKFRGHFLIEGDLNPDNSDVDKLFIQLVQTYNQLFEENPINASGVDAKAILSARLSKSRRLENLIAQLPGEKKNGLFGNLIALSLGLTPNFKSNFDLAEDAKLQLSKDTYDDDLDNLLAQIGDQYADLFLAAKNLSDAILLSDILRVNTEITKAPLSASMIKRYDEHHQDLTLLKALVRQQLPEKYKEIFFDQSKNGYAGYIDGGASQEEFYKFIKPILEKMDGTEELLVKLNREDLLRKQRTFDNGSIPHQIHLGELHAILRRQEDFYPFLKDNREKIEKILTFRIPYYVGPLARGNSRFAWMTRKSEETITPWNFEEVVDKGASAQSFIERMTNFDKNLPNEKVLPKHSLLYEYFTVYNELTKVKYVTEGMRKPAFLSGEQKKAIVDLLFKTNRKVTVKQLKEDYFKKIECFDSVEISGVEDRFNASLGTYHDLLKIIKDKDFLDNEENEDILEDIVLTLTLFEDREMIEERLKTYAHLFDDKVMKQLKRRRYTGWGRLSRKLINGIRDKQSGKTILDFLKSDGFANRNFMQLIHDDSLTFKEDIQKAQVSGQGDSLHEHIANLAGSPAIKKGILQTVKVVDELVKVMGRHKPENIVIEMARENQTTQKGQKNSRERMKRIEEGIKELGSQILKEHPVENTQLQNEKLYLYYLQNGRDMYVDQELDINRLSDYDVDHIVPQSFLKDDSIDNKVLTRSDKARGKSDNVPSEEVVKKMKNYWRQLLNAKLITQRKFDNLTKAERGGLSELDKAGFIKRQLVETRQITKHVAQILDSRMNTKYDENDKLIREVKVITLKSKLVSDFRKDFQFYKVREINNYHHAHDAYLNAVVGTALIKKYPKLESEFVYGDYKVYDVRKMIAKSEQEIGKATAKYFFYSNIMNFFKTEITLANGEIRKRPLIETNGETGEIVWDKGRDFATVRKVLSMPQVNIVKKTEVQTGGFSKESILPKRNSDKLIARKKDWDPKKYGGFDSPTVAYSVLVVAKVEKGKSKKLKSVKELLGITIMERSSFEKNPIDFLEAKGYKEVKKDLIIKLPKYSLFELENGRKRMLASAGELQKGNELALPSKYVNFLYLASHYEKLKGSPEDNEQKQLFVEQHKHYLDEIIEQISEFSKRVILADANLDKVLSAYNKHRDKPIREQAENIIHLFTLTNLGAPAAFKYFDTTIDRKRYTSTKEVLDATLIHQSITGLYETRIDLSQLGGDGGGGGGGGGGGTLNIEDEHRLHETSKEPDVSLGSTWLSDFPQAWAETGGMGLAVRQAPLIIPLKATSTPVSIKQYPMSQEARLGIKPHIQRLLDQGILVPCQSPWNTPLLPVKKPGTNDYRPVQDLREVNKRVEDIHPTVPNPYNLLSGLPPSHQWYTVLDLKDAFFCLRLHPTSQPLFAFEWRDPEMGISGQLTWTRLPQGFKNSPTLFNEALHRDLADFRIQHPDLILLQYVDDLLLAATSELDCQQGTRALLQTLGNLGYRASAKKAQICQKQVKYLGYLLKEGQRWLTEARKETVMGQPTPKTPRQLREFLGKAGFCRLFIPGFAEMAAPLYPLTKPGTLFNWGPDQQKAYQEIKQALLTAPALGLPDLTKPFELFVDEKQGYAKGVLTQKLGPWRRPVAYLSKKLDPVAAGWPPCLRMVAAIAVLTKDAGKLTMGQPLVILAPHAVEALVKQPPDRWLSNARMTHYQALLLDTDRVQFGPVVALNPATLLPLPEEGLQHNCLDILAEAHGTRPDLTDQPLPDADHTWYTDGSSLLQEGQRKAGAAVTTETEVIWAKALPAGTSAQRAELIALTQALKMAEGKKLNVYTDSRYAFATAHIHGEIYRRRGWLTSEGKEIKNKDEILALLKALFLPKRLSIIHCPGHQKGHSAEARGNRMADQAARKAAITETPDTSTLLAGKRTADGSEFEKRTADGSEFESPKKKAKVE

SEQ ID NO: 2791 - protein, 2100 aa, synthetic construct
MPAAKRVKLDGGDKKYSIGLDIGTNSVGWAVITDEYKVPSKKFKVLGNTDRHSIKKNLIGALLFDSGETAEATRLKRTARRRYTRRKNRICYLQEIFSNEMAKVDDSFFHRLEESFLVEEDKKHERHPIFGNIVDEVAYHEKYPTIYHLRKKLVDSTDKADLRLIYLALAHMIKFRGHFLIEGDLNPDNSDVDKLFIQLVQTYNQLFEENPINASGVDAKAILSARLSKSRRLENLIAQLPGEKKNGLFGNLIALSLGLTPNFKSNFDLAEDAKLQLSKDTYDDDLDNLLAQIGDQYADLFLAAKNLSDAILLSDILRVNTEITKAPLSASMIKRYDEHHQDLTLLKALVRQQLPEKYKEIFFDQSKNGYAGYIDGGASQEEFYKFIKPILEKMDGTEELLVKLNREDLLRKQRTFDNGSIPHQIHLGELHAILRRQEDFYPFLKDNREKIEKILTFRIPYYVGPLARGNSRFAWMTRKSEETITPWNFEEVVDKGASAQSFIERMTNFDKNLPNEKVLPKHSLLYEYFTVYNELTKVKYVTEGMRKPAFLSGEQKKAIVDLLFKTNRKVTVKQLKEDYFKKIECFDSVEISGVEDRFNASLGTYHDLLKIIKDKDFLDNEENEDILEDIVLTLTLFEDREMIEERLKTYAHLFDDKVMKQLKRRRYTGWGRLSRKLINGIRDKQSGKTILDFLKSDGFANRNFMQLIHDDSLTFKEDIQKAQVSGQGDSLHEHIANLAGSPAIKKGILQTVKVVDELVKVMGRHKPENIVIEMARENQTTQKGQKNSRERMKRIEEGIKELGSQILKEHPVENTQLQNEKLYLYYLQNGRDMYVDQELDINRLSDYDVDHIVPQSFLKDDSIDNKVLTRSDKARGKSDNVPSEEVVKKMKNYWRQLLNAKLITQRKFDNLTKAERGGLSELDKAGFIKRQLVETRQITKHVAQILDSRMNTKYDENDKLIREVKVITLKSKLVSDFRKDFQFYKVREINNYHHAHDAYLNAVVGTALIKKYPKLESEFVYGDYKVYDVRKMIAKSEQEIGKATAKYFFYSNIMNFFKTEITLANGEIRKRPLIETNGETGEIVWDKGRDFATVRKVLSMPQVNIVKKTEVQTGGFSKESILPKRNSDKLIARKKDWDPKKYGGFDSPTVAYSVLVVAKVEKGKSKKLKSVKELLGITIMERSSFEKNPIDFLEAKGYKEVKKDLIIKLPKYSLFELENGRKRMLASAGELQKGNELALPSKYVNFLYLASHYEKLKGSPEDNEQKQLFVEQHKHYLDEIIEQISEFSKRVILADANLDKVLSAYNKHRDKPIREQAENIIHLFTLTNLGAPAAFKYFDTTIDRKRYTSTKEVLDATLIHQSITGLYETRIDLSQLGGDGGEAAAKEAAAKEAAAKGGTLNIEDEHRLHETSKEPDVSLGSTWLSDFPQAWAETGGMGLAVRQAPLIIPLKATSTPVSIKQYPMSQEARLGIKPHIQRLLDQGILVPCQSPWNTPLLPVKKPGTNDYRPVQDLREVNKRVEDIHPTVPNPYNLLSGLPPSHQWYTVLDLKDAFFCLRLHPTSQPLFAFEWRDPEMGISGQLTWTRLPQGFKNSPTLFNEALHRDLADFRIQHPDLILLQYVDDLLLAATSELDCQQGTRALLQTLGNLGYRASAKKAQICQKQVKYLGYLLKEGQRWLTEARKETVMGQPTPKTPRQLREFLGKAGFCRLFIPGFAEMAAPLYPLTKPGTLFNWGPDQQKAYQEIKQALLTAPALGLPDLTKPFELFVDEKQGYAKGVLTQKLGPWRRPVAYLSKKLDPVAAGWPPCLRMVAAIAVLTKDAGKLTMGQPLVILAPHAVEALVKQPPDRWLSNARMTHYQALLLDTDRVQFGPVVALNPATLLPLPEEGLQHNCLDILAEAHGTRPDLTDQPLPDADHTWYTDGSSLLQEGQRKAGAAVTTETEVIWAKALPAGTSAQRAELIALTQALKMAEGKKLNVYTDSRYAFATAHIHGEIYRRRGWLTSEGKEIKNKDEILALLKALFLPKRLSIIHCPGHQKGHSAEARGNRMADQAARKAAITETPDTSTLLAGKRTADGSEFEKRTADGSEFESPKKKAKVE

SEQ ID NO: 2792 - protein, 2096 aa, synthetic construct
MPAAKRVKLDGGDKKYSIGLDIGTNSVGWAVITDEYKVPSKKFKVLGNTDRHSIKKNLIGALLFDSGETAEATRLKRTARRRYTRRKNRICYLQEIFSNEMAKVDDSFFHRLEESFLVEEDKKHERHPIFGNIVDEVAYHEKYPTIYHLRKKLVDSTDKADLRLIYLALAHMIKFRGHFLIEGDLNPDNSDVDKLFIQLVQTYNQLFEENPINASGVDAKAILSARLSKSRRLENLIAQLPGEKKNGLFGNLIALSLGLTPNFKSNFDLAEDAKLQLSKDTYDDDLDNLLAQIGDQYADLFLAAKNLSDAILLSDILRVNTEITKAPLSASMIKRYDEHHQDLTLLKALVRQQLPEKYKEIFFDQSKNGYAGYIDGGASQEEFYKFIKPILEKMDGTEELLVKLNREDLLRKQRTFDNGSIPHQIHLGELHAILRRQEDFYPFLKDNREKIEKILTFRIPYYVGPLARGNSRFAWMTRKSEETITPWNFEEVVDKGASAQSFIERMTNFDKNLPNEKVLPKHSLLYEYFTVYNELTKVKYVTEGMRKPAFLSGEQKKAIVDLLFKTNRKVTVKQLKEDYFKKIECFDSVEISGVEDRFNASLGTYHDLLKIIKDKDFLDNEENEDILEDIVLTLTLFEDREMIEERLKTYAHLFDDKVMKQLKRRRYTGWGRLSRKLINGIRDKQSGKTILDFLKSDGFANRNFMQLIHDDSLTFKEDIQKAQVSGQGDSLHEHIANLAGSPAIKKGILQTVKVVDELVKVMGRHKPENIVIEMARENQTTQKGQKNSRERMKRIEEGIKELGSQILKEHPVENTQLQNEKLYLYYLQNGRDMYVDQELDINRLSDYDVDHIVPQSFLKDDSIDNKVLTRSDKARGKSDNVPSEEVVKKMKNYWRQLLNAKLITQRKFDNLTKAERGGLSELDKAGFIKRQLVETRQITKHVAQILDSRMNTKYDENDKLIREVKVITLKSKLVSDFRKDFQFYKVREINNYHHAHDAYLNAVVGTALIKKYPKLESEFVYGDYKVYDVRKMIAKSEQEIGKATAKYFFYSNIMNFFKTEITLANGEIRKRPLIETNGETGEIVWDKGRDFATVRKVLSMPQVNIVKKTEVQTGGFSKESILPKRNSDKLIARKKDWDPKKYGGFDSPTVAYSVLVVAKVEKGKSKKLKSVKELLGITIMERSSFEKNPIDFLEAKGYKEVKKDLIIKLPKYSLFELENGRKRMLASAGELQKGNELALPSKYVNFLYLASHYEKLKGSPEDNEQKQLFVEQHKHYLDEIIEQISEFSKRVILADANLDKVLSAYNKHRDKPIREQAENIIHLFTLTNLGAPAAFKYFDTTIDRKRYTSTKEVLDATLIHQSITGLYETRIDLSQLGGDGGEAAAKGSSPAPGGTLNIEDEHRLHETSKEPDVSLGSTWLSDFPQAWAETGGMGLAVRQAPLIIPLKATSTPVSIKQYPMSQEARLGIKPHIQRLLDQGILVPCQSPWNTPLLPVKKPGTNDYRPVQDLREVNKRVEDIHPTVPNPYNLLSGLPPSHQWYTVLDLKDAFFCLRLHPTSQPLFAFEWRDPEMGISGQLTWTRLPQGFKNSPTLFNEALHRDLADFRIQHPDLILLQYVDDLLLAATSELDCQQGTRALLQTLGNLGYRASAKKAQICQKQVKYLGYLLKEGQRWLTEARKETVMGQPTPKTPRQLREFLGKAGFCRLFIPGFAEMAAPLYPLTKPGTLFNWGPDQQKAYQEIKQALLTAPALGLPDLTKPFELFVDEKQGYAKGVLTQKLGPWRRPVAYLSKKLDPVAAGWPPCLRMVAAIAVLTKDAGKLTMGQPLVILAPHAVEALVKQPPDRWLSNARMTHYQALLLDTDRVQFGPVVALNPATLLPLPEEGLQHNCLDILAEAHGTRPDLTDQPLPDADHTWYTDGSSLLQEGQRKAGAAVTTETEVIWAKALPAGTSAQRAELIALTQALKMAEGKKLNVYTDSRYAFATAHIHGEIYRRRGWLTSEGKEIKNKDEILALLKALFLPKRLSIIHCPGHQKGHSAEARGNRMADQAARKAAITETPDTSTLLAGKRTADGSEFEKRTADGSEFESPKKKAKVE

SEQ ID NO: 2793 - protein, 2094 aa, synthetic construct
MPAAKRVKLDGGDKKYSIGLDIGTNSVGWAVITDEYKVPSKKFKVLGNTDRHSIKKNLIGALLFDSGETAEATRLKRTARRRYTRRKNRICYLQEIFSNEMAKVDDSFFHRLEESFLVEEDKKHERHPIFGNIVDEVAYHEKYPTIYHLRKKLVDSTDKADLRLIYLALAHMIKFRGHFLIEGDLNPDNSDVDKLFIQLVQTYNQLFEENPINASGVDAKAILSARLSKSRRLENLIAQLPGEKKNGLFGNLIALSLGLTPNFKSNFDLAEDAKLQLSKDTYDDDLDNLLAQIGDQYADLFLAAKNLSDAILLSDILRVNTEITKAPLSASMIKRYDEHHQDLTLLKALVRQQLPEKYKEIFFDQSKNGYAGYIDGGASQEEFYKFIKPILEKMDGTEELLVKLNREDLLRKQRTFDNGSIPHQIHLGELHAILRRQEDFYPFLKDNREKIEKILTFRIPYYVGPLARGNSRFAWMTRKSEETITPWNFEEVVDKGASAQSFIERMTNFDKNLPNEKVLPKHSLLYEYFTVYNELTKVKYVTEGMRKPAFLSGEQKKAIVDLLFKTNRKVTVKQLKEDYFKKIECFDSVEISGVEDRFNASLGTYHDLLKIIKDKDFLDNEENEDILEDIVLTLTLFEDREMIEERLKTYAHLFDDKVMKQLKRRRYTGWGRLSRKLINGIRDKQSGKTILDFLKSDGFANRNFMQLIHDDSLTFKEDIQKAQVSGQGDSLHEHIANLAGSPAIKKGILQTVKVVDELVKVMGRHKPENIVIEMARENQTTQKGQKNSRERMKRIEEGIKELGSQILKEHPVENTQLQNEKLYLYYLQNGRDMYVDQELDINRLSDYDVDHIVPQSFLKDDSIDNKVLTRSDKARGKSDNVPSEEVVKKMKNYWRQLLNAKLITQRKFDNLTKAERGGLSELDKAGFIKRQLVETRQITKHVAQILDSRMNTKYDENDKLIREVKVITLKSKLVSDFRKDFQFYKVREINNYHHAHDAYLNAVVGTALIKKYPKLESEFVYGDYKVYDVRKMIAKSEQEIGKATAKYFFYSNIMNFFKTEITLANGEIRKRPLIETNGETGEIVWDKGRDFATVRKVLSMPQVNIVKKTEVQTGGFSKESILPKRNSDKLIARKKDWDPKKYGGFDSPTVAYSVLVVAKVEKGKSKKLKSVKELLGITIMERSSFEKNPIDFLEAKGYKEVKKDLIIKLPKYSLFELENGRKRMLASAGELQKGNELALPSKYVNFLYLASHYEKLKGSPEDNEQKQLFVEQHKHYLDEIIEQISEFSKRVILADANLDKVLSAYNKHRDKPIREQAENIIHLFTLTNLGAPAAFKYFDTTIDRKRYTSTKEVLDATLIHQSITGLYETRIDLSQLGGDGGPAPGGGGSSGGTLNIEDEHRLHETSKEPDVSLGSTWLSDFPQAWAETGGMGLAVRQAPLIIPLKATSTPVSIKQYPMSQEARLGIKPHIQRLLDQGILVPCQSPWNTPLLPVKKPGTNDYRPVQDLREVNKRVEDIHPTVPNPYNLLSGLPPSHQWYTVLDLKDAFFCLRLHPTSQPLFAFEWRDPEMGISGQLTWTRLPQGFKNSPTLFNEALHRDLADFRIQHPDLILLQYVDDLLLAATSELDCQQGTRALLQTLGNLGYRASAKKAQICQKQVKYLGYLLKEGQRWLTEARKETVMGQPTPKTPRQLREFLGKAGFCRLFIPGFAEMAAPLYPLTKPGTLFNWGPDQQKAYQEIKQALLTAPALGLPDLTKPFELFVDEKQGYAKGVLTQKLGPWRRPVAYLSKKLDPVAAGWPPCLRMVAAIAVLTKDAGKLTMGQPLVILAPHAVEALVKQPPDRWLSNARMTHYQALLLDTDRVQFGPVVALNPATLLPLPEEGLQHNCLDILAEAHGTRPDLTDQPLPDADHTWYTDGSSLLQEGQRKAGAAVTTETEVIWAKALPAGTSAQRAELIALTQALKMAEGKKLNVYTDSRYAFATAHIHGEIYRRRGWLTSEGKEIKNKDEILALLKALFLPKRLSIIHCPGHQKGHSAEARGNRMADQAARKAAITETPDTSTLLAGKRTADGSEFEKRTADGSEFESPKKKAKVE

SEQ ID NO: 2794 - protein, 2096 aa, synthetic construct
MPAAKRVKLDGGDKKYSIGLDIGTNSVGWAVITDEYKVPSKKFKVLGNTDRHSIKKNLIGALLFDSGETAEATRLKRTARRRYTRRKNRICYLQEIFSNEMAKVDDSFFHRLEESFLVEEDKKHERHPIFGNIVDEVAYHEKYPTIYHLRKKLVDSTDKADLRLIYLALAHMIKFRGHFLIEGDLNPDNSDVDKLFIQLVQTYNQLFEENPINASGVDAKAILSARLSKSRRLENLIAQLPGEKKNGLFGNLIALSLGLTPNFKSNFDLAEDAKLQLSKDTYDDDLDNLLAQIGDQYADLFLAAKNLSDAILLSDILRVNTEITKAPLSASMIKRYDEHHQDLTLLKALVRQQLPEKYKEIFFDQSKNGYAGYIDGGASQEEFYKFIKPILEKMDGTEELLVKLNREDLLRKQRTFDNGSIPHQIHLGELHAILRRQEDFYPFLKDNREKIEKILTFRIPYYVGPLARGNSRFAWMTRKSEETITPWNFEEVVDKGASAQSFIERMTNFDKNLPNEKVLPKHSLLYEYFTVYNELTKVKYVTEGMRKPAFLSGEQKKAIVDLLFKTNRKVTVKQLKEDYFKKIECFDSVEISGVEDRFNASLGTYHDLLKIIKDKDFLDNEENEDILEDIVLTLTLFEDREMIEERLKTYAHLFDDKVMKQLKRRRYTGWGRLSRKLINGIRDKQSGKTILDFLKSDGFANRNFMQLIHDDSLTFKEDIQKAQVSGQGDSLHEHIANLAGSPAIKKGILQTVKVVDELVKVMGRHKPENIVIEMARENQTTQKGQKNSRERMKRIEEGIKELGSQILKEHPVENTQLQNEKLYLYYLQNGRDMYVDQELDINRLSDYDVDHIVPQSFLKDDSIDNKVLTRSDKARGKSDNVPSEEVVKKMKNYWRQLLNAKLITQRKFDNLTKAERGGLSELDKAGFIKRQLVETRQITKHVAQILDSRMNTKYDENDKLIREVKVITLKSKLVSDFRKDFQFYKVREINNYHHAHDAYLNAVVGTALIKKYPKLESEFVYGDYKVYDVRKMIAKSEQEIGKATAKYFFYSNIMNFFKTEITLANGEIRKRPLIETNGETGEIVWDKGRDFATVRKVLSMPQVNIVKKTEVQTGGFSKESILPKRNSDKLIARKKDWDPKKYGGFDSPTVAYSVLVVAKVEKGKSKKLKSVKELLGITIMERSSFEKNPIDFLEAKGYKEVKKDLIIKLPKYSLFELENGRKRMLASAGELQKGNELALPSKYVNFLYLASHYEKLKGSPEDNEQKQLFVEQHKHYLDEIIEQISEFSKRVILADANLDKVLSAYNKHRDKPIREQAENIIHLFTLTNLGAPAAFKYFDTTIDRKRYTSTKEVLDATLIHQSITGLYETRIDLSQLGGDGGEAAAKGGSGGGGGTLNIEDEHRLHETSKEPDVSLGSTWLSDFPQAWAETGGMGLAVRQAPLIIPLKATSTPVSIKQYPMSQEARLGIKPHIQRLLDQGILVPCQSPWNTPLLPVKKPGTNDYRPVQDLREVNKRVEDIHPTVPNPYNLLSGLPPSHQWYTVLDLKDAFFCLRLHPTSQPLFAFEWRDPEMGISGQLTWTRLPQGFKNSPTLFNEALHRDLADFRIQHPDLILLQYVDDLLLAATSELDCQQGTRALLQTLGNLGYRASAKKAQICQKQVKYLGYLLKEGQRWLTEARKETVMGQPTPKTPRQLREFLGKAGFCRLFIPGFAEMAAPLYPLTKPGTLFNWGPDQQKAYQEIKQALLTAPALGLPDLTKPFELFVDEKQGYAKGVLTQKLGPWRRPVAYLSKKLDPVAAGWPPCLRMVAAIAVLTKDAGKLTMGQPLVILAPHAVEALVKQPPDRWLSNARMTHYQALLLDTDRVQFGPVVALNPATLLPLPEEGLQHNCLDILAEAHGTRPDLTDQPLPDADHTWYTDGSSLLQEGQRKAGAAVTTETEVIWAKALPAGTSAQRAELIALTQALKMAEGKKLNVYTDSRYAFATAHIHGEIYRRRGWLTSEGKEIKNKDEILALLKALFLPKRLSIIHCPGHQKGHSAEARGNRMADQAARKAAITETPDTSTLLAGKRTADGSEFEKRTADGSEFESPKKKAKVE

SEQ ID NO: 2795 - protein, 2097 aa, synthetic construct
MPAAKRVKLDGGDKKYSIGLDIGTNSVGWAVITDEYKVPSKKFKVLGNTDRHSIKKNLIGALLFDSGETAEATRLKRTARRRYTRRKNRICYLQEIFSNEMAKVDDSFFHRLEESFLVEEDKKHERHPIFGNIVDEVAYHEKYPTIYHLRKKLVDSTDKADLRLIYLALAHMIKFRGHFLIEGDLNPDNSDVDKLFIQLVQTYNQLFEENPINASGVDAKAILSARLSKSRRLENLIAQLPGEKKNGLFGNLIALSLGLTPNFKSNFDLAEDAKLQLSKDTYDDDLDNLLAQIGDQYADLFLAAKNLSDAILLSDILRVNTEITKAPLSASMIKRYDEHHQDLTLLKALVRQQLPEKYKEIFFDQSKNGYAGYIDGGASQEEFYKFIKPILEKMDGTEELLVKLNREDLLRKQRTFDNGSIPHQIHLGELHAILRRQEDFYPFLKDNREKIEKILTFRIPYYVGPLARGNSRFAWMTRKSEETITPWNFEEVVDKGASAQSFIERMTNFDKNLPNEKVLPKHSLLYEYFTVYNELTKVKYVTEGMRKPAFLSGEQKKAIVDLLFKTNRKVTVKQLKEDYFKKIECFDSVEISGVEDRFNASLGTYHDLLKIIKDKDFLDNEENEDILEDIVLTLTLFEDREMIEERLKTYAHLFDDKVMKQLKRRRYTGWGRLSRKLINGIRDKQSGKTILDFLKSDGFANRNFMQLIHDDSLTFKEDIQKAQVSGQGDSLHEHIANLAGSPAIKKGILQTVKVVDELVKVMGRHKPENIVIEMARENQTTQKGQKNSRERMKRIEEGIKELGSQILKEHPVENTQLQNEKLYLYYLQNGRDMYVDQELDINRLSDYDVDHIVPQSFLKDDSIDNKVLTRSDKARGKSDNVPSEEVVKKMKNYWRQLLNAKLITQRKFDNLTKAERGGLSELDKAGFIKRQLVETRQITKHVAQILDSRMNTKYDENDKLIREVKVITLKSKLVSDFRKDFQFYKVREINNYHHAHDAYLNAVVGTALIKKYPKLESEFVYGDYKVYDVRKMIAKSEQEIGKATAKYFFYSNIMNFFKTEITLANGEIRKRPLIETNGETGEIVWDKGRDFATVRKVLSMPQVNIVKKTEVQTGGFSKESILPKRNSDKLIARKKDWDPKKYGGFDSPTVAYSVLVVAKVEKGKSKKLKSVKELLGITIMERSSFEKNPIDFLEAKGYKEVKKDLIIKLPKYSLFELENGRKRMLASAGELQKGNELALPSKYVNFLYLASHYEKLKGSPEDNEQKQLFVEQHKHYLDEIIEQISEFSKRVILADANLDKVLSAYNKHRDKPIREQAENIIHLFTLTNLGAPAAFKYFDTTIDRKRYTSTKEVLDATLIHQSITGLYETRIDLSQLGGDGGGGSGGSGGSGGSGGTLNIEDEHRLHETSKEPDVSLGSTWLSDFPQAWAETGGMGLAVRQAPLIIPLKATSTPVSIKQYPMSQEARLGIKPHIQRLLDQGILVPCQSPWNTPLLPVKKPGTNDYRPVQDLREVNKRVEDIHPTVPNPYNLLSGLPPSHQWYTVLDLKDAFFCLRLHPTSQPLFAFEWRDPEMGISGQLTWTRLPQGFKNSPTLFNEALHRDLADFRIQHPDLILLQYVDDLLLAATSELDCQQGTRALLQTLGNLGYRASAKKAQICQKQVKYLGYLLKEGQRWLTEARKETVMGQPTPKTPRQLREFLGKAGFCRLFIPGFAEMAAPLYPLTKPGTLFNWGPDQQKAYQEIKQALLTAPALGLPDLTKPFELFVDEKQGYAKGVLTQKLGPWRRPVAYLSKKLDPVAAGWPPCLRMVAAIAVLTKDAGKLTMGQPLVILAPHAVEALVKQPPDRWLSNARMTHYQALLLDTDRVQFGPVVALNPATLLPLPEEGLQHNCLDILAEAHGTRPDLTDQPLPDADHTWYTDGSSLLQEGQRKAGAAVTTETEVIWAKALPAGTSAQRAELIALTQALKMAEGKKLNVYTDSRYAFATAHIHGEIYRRRGWLTSEGKEIKNKDEILALLKALFLPKRLSIIHCPGHQKGHSAEARGNRMADQAARKAAITETPDTSTLLAGKRTADGSEFEKRTADGSEFESPKKKAKVE

SEQ ID NO: 2796 - protein, 2093 aa, synthetic construct
MPAAKRVKLDGGDKKYSIGLDIGTNSVGWAVITDEYKVPSKKFKVLGNTDRHSIKKNLIGALLFDSGETAEATRLKRTARRRYTRRKNRICYLQEIFSNEMAKVDDSFFHRLEESFLVEEDKKHERHPIFGNIVDEVAYHEKYPTIYHLRKKLVDSTDKADLRLIYLALAHMIKFRGHFLIEGDLNPDNSDVDKLFIQLVQTYNQLFEENPINASGVDAKAILSARLSKSRRLENLIAQLPGEKKNGLFGNLIALSLGLTPNFKSNFDLAEDAKLQLSKDTYDDDLDNLLAQIGDQYADLFLAAKNLSDAILLSDILRVNTEITKAPLSASMIKRYDEHHQDLTLLKALVRQQLPEKYKEIFFDQSKNGYAGYIDGGASQEEFYKFIKPILEKMDGTEELLVKLNREDLLRKQRTFDNGSIPHQIHLGELHAILRRQEDFYPFLKDNREKIEKILTFRIPYYVGPLARGNSRFAWMTRKSEETITPWNFEEVVDKGASAQSFIERMTNFDKNLPNEKVLPKHSLLYEYFTVYNELTKVKYVTEGMRKPAFLSGEQKKAIVDLLFKTNRKVTVKQLKEDYFKKIECFDSVEISGVEDRFNASLGTYHDLLKIIKDKDFLDNEENEDILEDIVLTLTLFEDREMIEERLKTYAHLFDDKVMKQLKRRRYTGWGRLSRKLINGIRDKQSGKTILDFLKSDGFANRNFMQLIHDDSLTFKEDIQKAQVSGQGDSLHEHIANLAGSPAIKKGILQTVKVVDELVKVMGRHKPENIVIEMARENQTTQKGQKNSRERMKRIEEGIKELGSQILKEHPVENTQLQNEKLYLYYLQNGRDMYVDQELDINRLSDYDVDHIVPQSFLKDDSIDNKVLTRSDKARGKSDNVPSEEVVKKMKNYWRQLLNAKLITQRKFDNLTKAERGGLSELDKAGFIKRQLVETRQITKHVAQILDSRMNTKYDENDKLIREVKVITLKSKLVSDFRKDFQFYKVREINNYHHAHDAYLNAVVGTALIKKYPKLESEFVYGDYKVYDVRKMIAKSEQEIGKATAKYFFYSNIMNFFKTEITLANGEIRKRPLIETNGETGEIVWDKGRDFATVRKVLSMPQVNIVKKTEVQTGGFSKESILPKRNSDKLIARKKDWDPKKYGGFDSPTVAYSVLVVAKVEKGKSKKLKSVKELLGITIMERSSFEKNPIDFLEAKGYKEVKKDLIIKLPKYSLFELENGRKRMLASAGELQKGNELALPSKYVNFLYLASHYEKLKGSPEDNEQKQLFVEQHKHYLDEIIEQISEFSKRVILADANLDKVLSAYNKHRDKPIREQAENIIHLFTLTNLGAPAAFKYFDTTIDRKRYTSTKEVLDATLIHQSITGLYETRIDLSQLGGDGGEAAAKGGGGGTLNIEDEHRLHETSKEPDVSLGSTWLSDFPQAWAETGGMGLAVRQAPLIIPLKATSTPVSIKQYPMSQEARLGIKPHIQRLLDQGILVPCQSPWNTPLLPVKKPGTNDYRPVQDLREVNKRVEDIHPTVPNPYNLLSGLPPSHQWYTVLDLKDAFFCLRLHPTSQPLFAFEWRDPEMGISGQLTWTRLPQGFKNSPTLFNEALHRDLADFRIQHPDLILLQYVDDLLLAATSELDCQQGTRALLQTLGNLGYRASAKKAQICQKQVKYLGYLLKEGQRWLTEARKETVMGQPTPKTPRQLREFLGKAGFCRLFIPGFAEMAAPLYPLTKPGTLFNWGPDQQKAYQEIKQALLTAPALGLPDLTKPFELFVDEKQGYAKGVLTQKLGPWRRPVAYLSKKLDPVAAGWPPCLRMVAAIAVLTKDAGKLTMGQPLVILAPHAVEALVKQPPDRWLSNARMTHYQALLLDTDRVQFGPVVALNPATLLPLPEEGLQHNCLDILAEAHGTRPDLTDQPLPDADHTWYTDGSSLLQEGQRKAGAAVTTETEVIWAKALPAGTSAQRAELIALTQALKMAEGKKLNVYTDSRYAFATAHIHGEIYRRRGWLTSEGKEIKNKDEILALLKALFLPKRLSIIHCPGHQKGHSAEARGNRMADQAARKAAITETPDTSTLLAGKRTADGSEFEKRTADGSEFESPKKKAKVE

SEQ ID NO: 2797 - protein, 2098 aa, synthetic construct
MPAAKRVKLDGGDKKYSIGLDIGTNSVGWAVITDEYKVPSKKFKVLGNTDRHSIKKNLIGALLFDSGETAEATRLKRTARRRYTRRKNRICYLQEIFSNEMAKVDDSFFHRLEESFLVEEDKKHERHPIFGNIVDEVAYHEKYPTIYHLRKKLVDSTDKADLRLIYLALAHMIKFRGHFLIEGDLNPDNSDVDKLFIQLVQTYNQLFEENPINASGVDAKAILSARLSKSRRLENLIAQLPGEKKNGLFGNLIALSLGLTPNFKSNFDLAEDAKLQLSKDTYDDDLDNLLAQIGDQYADLFLAAKNLSDAILLSDILRVNTEITKAPLSASMIKRYDEHHQDLTLLKALVRQQLPEKYKEIFFDQSKNGYAGYIDGGASQEEFYKFIKPILEKMDGTEELLVKLNREDLLRKQRTFDNGSIPHQIHLGELHAILRRQEDFYPFLKDNREKIEKILTFRIPYYVGPLARGNSRFAWMTRKSEETITPWNFEEVVDKGASAQSFIERMTNFDKNLPNEKVLPKHSLLYEYFTVYNELTKVKYVTEGMRKPAFLSGEQKKAIVDLLFKTNRKVTVKQLKEDYFKKIECFDSVEISGVEDRFNASLGTYHDLLKIIKDKDFLDNEENEDILEDIVLTLTLFEDREMIEERLKTYAHLFDDKVMKQLKRRRYTGWGRLSRKLINGIRDKQSGKTILDFLKSDGFANRNFMQLIHDDSLTFKEDIQKAQVSGQGDSLHEHIANLAGSPAIKKGILQTVKVVDELVKVMGRHKPENIVIEMARENQTTQKGQKNSRERMKRIEEGIKELGSQILKEHPVENTQLQNEKLYLYYLQNGRDMYVDQELDINRLSDYDVDHIVPQSFLKDDSIDNKVLTRSDKARGKSDNVPSEEVVKKMKNYWRQLLNAKLITQRKFDNLTKAERGGLSELDKAGFIKRQLVETRQITKHVAQILDSRMNTKYDENDKLIREVKVITLKSKLVSDFRKDFQFYKVREINNYHHAHDAYLNAVVGTALIKKYPKLESEFVYGDYKVYDVRKMIAKSEQEIGKATAKYFFYSNIMNFFKTEITLANGEIRKRPLIETNGETGEIVWDKGRDFATVRKVLSMPQVNIVKKTEVQTGGFSKESILPKRNSDKLIARKKDWDPKKYGGFDSPTVAYSVLVVAKVEKGKSKKLKSVKELLGITIMERSSFEKNPIDFLEAKGYKEVKKDLIIKLPKYSLFELENGRKRMLASAGELQKGNELALPSKYVNFLYLASHYEKLKGSPEDNEQKQLFVEQHKHYLDEIIEQISEFSKRVILADANLDKVLSAYNKHRDKPIREQAENIIHLFTLTNLGAPAAFKYFDTTIDRKRYTSTKEVLDATLIHQSITGLYETRIDLSQLGGDGGPAPAPAPAPAPAPGGTLNIEDEHRLHETSKEPDVSLGSTWLSDFPQAWAETGGMGLAVRQAPLIIPLKATSTPVSIKQYPMSQEARLGIKPHIQRLLDQGILVPCQSPWNTPLLPVKKPGTNDYRPVQDLREVNKRVEDIHPTVPNPYNLLSGLPPSHQWYTVLDLKDAFFCLRLHPTSQPLFAFEWRDPEMGISGQLTWTRLPQGFKNSPTLFNEALHRDLADFRIQHPDLILLQYVDDLLLAATSELDCQQGTRALLQTLGNLGYRASAKKAQICQKQVKYLGYLLKEGQRWLTEARKETVMGQPTPKTPRQLREFLGKAGFCRLFIPGFAEMAAPLYPLTKPGTLFNWGPDQQKAYQEIKQALLTAPALGLPDLTKPFELFVDEKQGYAKGVLTQKLGPWRRPVAYLSKKLDPVAAGWPPCLRMVAAIAVLTKDAGKLTMGQPLVILAPHAVEALVKQPPDRWLSNARMTHYQALLLDTDRVQFGPVVALNPATLLPLPEEGLQHNCLDILAEAHGTRPDLTDQPLPDADHTWYTDGSSLLQEGQRKAGAAVTTETEVIWAKALPAGTSAQRAELIALTQALKMAEGKKLNVYTDSRYAFATAHIHGEIYRRRGWLTSEGKEIKNKDEILALLKALFLPKRLSIIHCPGHQKGHSAEARGNRMADQAARKAAITETPDTSTLLAGKRTADGSEFEKRTADGSEFESPKKKAKVE

SEQ ID NO: 2798 - protein, 2096 aa, synthetic construct
MPAAKRVKLDGGDKKYSIGLDIGTNSVGWAVITDEYKVPSKKFKVLGNTDRHSIKKNLIGALLFDSGETAEATRLKRTARRRYTRRKNRICYLQEIFSNEMAKVDDSFFHRLEESFLVEEDKKHERHPIFGNIVDEVAYHEKYPTIYHLRKKLVDSTDKADLRLIYLALAHMIKFRGHFLIEGDLNPDNSDVDKLFIQLVQTYNQLFEENPINASGVDAKAILSARLSKSRRLENLIAQLPGEKKNGLFGNLIALSLGLTPNFKSNFDLAEDAKLQLSKDTYDDDLDNLLAQIGDQYADLFLAAKNLSDAILLSDILRVNTEITKAPLSASMIKRYDEHHQDLTLLKALVRQQLPEKYKEIFFDQSKNGYAGYIDGGASQEEFYKFIKPILEKMDGTEELLVKLNREDLLRKQRTFDNGSIPHQIHLGELHAILRRQEDFYPFLKDNREKIEKILTFRIPYYVGPLARGNSRFAWMTRKSEETITPWNFEEVVDKGASAQSFIERMTNFDKNLPNEKVLPKHSLLYEYFTVYNELTKVKYVTEGMRKPAFLSGEQKKAIVDLLFKTNRKVTVKQLKEDYFKKIECFDSVEISGVEDRFNASLGTYHDLLKIIKDKDFLDNEENEDILEDIVLTLTLFEDREMIEERLKTYAHLFDDKVMKQLKRRRYTGWGRLSRKLINGIRDKQSGKTILDFLKSDGFANRNFMQLIHDDSLTFKEDIQKAQVSGQGDSLHEHIANLAGSPAIKKGILQTVKVVDELVKVMGRHKPENIVIEMARENQTTQKGQKNSRERMKRIEEGIKELGSQILKEHPVENTQLQNEKLYLYYLQNGRDMYVDQELDINRLSDYDVDHIVPQSFLKDDSIDNKVLTRSDKARGKSDNVPSEEVVKKMKNYWRQLLNAKLITQRKFDNLTKAERGGLSELDKAGFIKRQLVETRQITKHVAQILDSRMNTKYDENDKLIREVKVITLKSKLVSDFRKDFQFYKVREINNYHHAHDAYLNAVVGTALIKKYPKLESEFVYGDYKVYDVRKMIAKSEQEIGKATAKYFFYSNIMNFFKTEITLANGEIRKRPLIETNGETGEIVWDKGRDFATVRKVLSMPQVNIVKKTEVQTGGFSKESILPKRNSDKLIARKKDWDPKKYGGFDSPTVAYSVLVVAKVEKGKSKKLKSVKELLGITIMERSSFEKNPIDFLEAKGYKEVKKDLIIKLPKYSLFELENGRKRMLASAGELQKGNELALPSKYVNFLYLASHYEKLKGSPEDNEQKQLFVEQHKHYLDEIIEQISEFSKRVILADANLDKVLSAYNKHRDKPIREQAENIIHLFTLTNLGAPAAFKYFDTTIDRKRYTSTKEVLDATLIHQSITGLYETRIDLSQLGGDGGPAPGSSEAAAKGGTLNIEDEHRLHETSKEPDVSLGSTWLSDFPQAWAETGGMGLAVRQAPLIIPLKATSTPVSIKQYPMSQEARLGIKPHIQRLLDQGILVPCQSPWNTPLLPVKKPGTNDYRPVQDLREVNKRVEDIHPTVPNPYNLLSGLPPSHQWYTVLDLKDAFFCLRLHPTSQPLFAFEWRDPEMGISGQLTWTRLPQGFKNSPTLFNEALHRDLADFRIQHPDLILLQYVDDLLLAATSELDCQQGTRALLQTLGNLGYRASAKKAQICQKQVKYLGYLLKEGQRWLTEARKETVMGQPTPKTPRQLREFLGKAGFCRLFIPGFAEMAAPLYPLTKPGTLFNWGPDQQKAYQEIKQALLTAPALGLPDLTKPFELFVDEKQGYAKGVLTQKLGPWRRPVAYLSKKLDPVAAGWPPCLRMVAAIAVLTKDAGKLTMGQPLVILAPHAVEALVKQPPDRWLSNARMTHYQALLLDTDRVQFGPVVALNPATLLPLPEEGLQHNCLDILAEAHGTRPDLTDQPLPDADHTWYTDGSSLLQEGQRKAGAAVTTETEVIWAKALPAGTSAQRAELIALTQALKMAEGKKLNVYTDSRYAFATAHIHGEIYRRRGWLTSEGKEIKNKDEILALLKALFLPKRLSIIHCPGHQKGHSAEARGNRMADQAARKAAITETPDTSTLLAGKRTADGSEFEKRTADGSEFESPKKKAKVE

SEQ ID NO: 2799 - protein, 2096 aa, synthetic construct
MPAAKRVKLDGGDKKYSIGLDIGTNSVGWAVITDEYKVPSKKFKVLGNTDRHSIKKNLIGALLFDSGETAEATRLKRTARRRYTRRKNRICYLQEIFSNEMAKVDDSFFHRLEESFLVEEDKKHERHPIFGNIVDEVAYHEKYPTIYHLRKKLVDSTDKADLRLIYLALAHMIKFRGHFLIEGDLNPDNSDVDKLFIQLVQTYNQLFEENPINASGVDAKAILSARLSKSRRLENLIAQLPGEKKNGLFGNLIALSLGLTPNFKSNFDLAEDAKLQLSKDTYDDDLDNLLAQIGDQYADLFLAAKNLSDAILLSDILRVNTEITKAPLSASMIKRYDEHHQDLTLLKALVRQQLPEKYKEIFFDQSKNGYAGYIDGGASQEEFYKFIKPILEKMDGTEELLVKLNREDLLRKQRTFDNGSIPHQIHLGELHAILRRQEDFYPFLKDNREKIEKILTFRIPYYVGPLARGNSRFAWMTRKSEETITPWNFEEVVDKGASAQSFIERMTNFDKNLPNEKVLPKHSLLYEYFTVYNELTKVKYVTEGMRKPAFLSGEQKKAIVDLLFKTNRKVTVKQLKEDYFKKIECFDSVEISGVEDRFNASLGTYHDLLKIIKDKDFLDNEENEDILEDIVLTLTLFEDREMIEERLKTYAHLFDDKVMKQLKRRRYTGWGRLSRKLINGIRDKQSGKTILDFLKSDGFANRNFMQLIHDDSLTFKEDIQKAQVSGQGDSLHEHIANLAGSPAIKKGILQTVKVVDELVKVMGRHKPENIVIEMARENQTTQKGQKNSRERMKRIEEGIKELGSQILKEHPVENTQLQNEKLYLYYLQNGRDMYVDQELDINRLSDYDVDHIVPQSFLKDDSIDNKVLTRSDKARGKSDNVPSEEVVKKMKNYWRQLLNAKLITQRKFDNLTKAERGGLSELDKAGFIKRQLVETRQITKHVAQILDSRMNTKYDENDKLIREVKVITLKSKLVSDFRKDFQFYKVREINNYHHAHDAYLNAVVGTALIKKYPKLESEFVYGDYKVYDVRKMIAKSEQEIGKATAKYFFYSNIMNFFKTEITLANGEIRKRPLIETNGETGEIVWDKGRDFATVRKVLSMPQVNIVKKTEVQTGGFSKESILPKRNSDKLIARKKDWDPKKYGGFDSPTVAYSVLVVAKVEKGKSKKLKSVKELLGITIMERSSFEKNPIDFLEAKGYKEVKKDLIIKLPKYSLFELENGRKRMLASAGELQKGNELALPSKYVNFLYLASHYEKLKGSPEDNEQKQLFVEQHKHYLDEIIEQISEFSKRVILADANLDKVLSAYNKHRDKPIREQAENIIHLFTLTNLGAPAAFKYFDTTIDRKRYTSTKEVLDATLIHQSITGLYETRIDLSQLGGDGGEAAAKGSSGGSGGTLNIEDEHRLHETSKEPDVSLGSTWLSDFPQAWAETGGMGLAVRQAPLIIPLKATSTPVSIKQYPMSQEARLGIKPHIQRLLDQGILVPCQSPWNTPLLPVKKPGTNDYRPVQDLREVNKRVEDIHPTVPNPYNLLSGLPPSHQWYTVLDLKDAFFCLRLHPTSQPLFAFEWRDPEMGISGQLTWTRLPQGFKNSPTLFNEALHRDLADFRIQHPDLILLQYVDDLLLAATSELDCQQGTRALLQTLGNLGYRASAKKAQICQKQVKYLGYLLKEGQRWLTEARKETVMGQPTPKTPRQLREFLGKAGFCRLFIPGFAEMAAPLYPLTKPGTLFNWGPDQQKAYQEIKQALLTAPALGLPDLTKPFELFVDEKQGYAKGVLTQKLGPWRRPVAYLSKKLDPVAAGWPPCLRMVAAIAVLTKDAGKLTMGQPLVILAPHAVEALVKQPPDRWLSNARMTHYQALLLDTDRVQFGPVVALNPATLLPLPEEGLQHNCLDILAEAHGTRPDLTDQPLPDADHTWYTDGSSLLQEGQRKAGAAVTTETEVIWAKALPAGTSAQRAELIALTQALKMAEGKKLNVYTDSRYAFATAHIHGEIYRRRGWLTSEGKEIKNKDEILALLKALFLPKRLSIIHCPGHQKGHSAEARGNRMADQAARKAAITETPDTSTLLAGKRTADGSEFEKRTADGSEFESPKKKAKVE

SEQ ID NO: 2800 - protein, 2094 aa, synthetic construct
MPAAKRVKLDGGDKKYSIGLDIGTNSVGWAVITDEYKVPSKKFKVLGNTDRHSIKKNLIGALLFDSGETAEATRLKRTARRRYTRRKNRICYLQEIFSNEMAKVDDSFFHRLEESFLVEEDKKHERHPIFGNIVDEVAYHEKYPTIYHLRKKLVDSTDKADLRLIYLALAHMIKFRGHFLIEGDLNPDNSDVDKLFIQLVQTYNQLFEENPINASGVDAKAILSARLSKSRRLENLIAQLPGEKKNGLFGNLIALSLGLTPNFKSNFDLAEDAKLQLSKDTYDDDLDNLLAQIGDQYADLFLAAKNLSDAILLSDILRVNTEITKAPLSASMIKRYDEHHQDLTLLKALVRQQLPEKYKEIFFDQSKNGYAGYIDGGASQEEFYKFIKPILEKMDGTEELLVKLNREDLLRKQRTFDNGSIPHQIHLGELHAILRRQEDFYPFLKDNREKIEKILTFRIPYYVGPLARGNSRFAWMTRKSEETITPWNFEEVVDKGASAQSFIERMTNFDKNLPNEKVLPKHSLLYEYFTVYNELTKVKYVTEGMRKPAFLSGEQKKAIVDLLFKTNRKVTVKQLKEDYFKKIECFDSVEISGVEDRFNASLGTYHDLLKIIKDKDFLDNEENEDILEDIVLTLTLFEDREMIEERLKTYAHLFDDKVMKQLKRRRYTGWGRLSRKLINGIRDKQSGKTILDFLKSDGFANRNFMQLIHDDSLTFKEDIQKAQVSGQGDSLHEHIANLAGSPAIKKGILQTVKVVDELVKVMGRHKPENIVIEMARENQTTQKGQKNSRERMKRIEEGIKELGSQILKEHPVENTQLQNEKLYLYYLQNGRDMYVDQELDINRLSDYDVDHIVPQSFLKDDSIDNKVLTRSDKARGKSDNVPSEEVVKKMKNYWRQLLNAKLITQRKFDNLTKAERGGLSELDKAGFIKRQLVETRQITKHVAQILDSRMNTKYDENDKLIREVKVITLKSKLVSDFRKDFQFYKVREINNYHHAHDAYLNAVVGTALIKKYPKLESEFVYGDYKVYDVRKMIAKSEQEIGKATAKYFFYSNIMNFFKTEITLANGEIRKRPLIETNGETGEIVWDKGRDFATVRKVLSMPQVNIVKKTEVQTGGFSKESILPKRNSDKLIARKKDWDPKKYGGFDSPTVAYSVLVVAKVEKGKSKKLKSVKELLGITIMERSSFEKNPIDFLEAKGYKEVKKDLIIKLPKYSLFELENGRKRMLASAGELQKGNELALPSKYVNFLYLASHYEKLKGSPEDNEQKQLFVEQHKHYLDEIIEQISEFSKRVILADANLDKVLSAYNKHRDKPIREQAENIIHLFTLTNLGAPAAFKYFDTTIDRKRYTSTKEVLDATLIHQSITGLYETRIDLSQLGGDGGGGGPAPGGSGGTLNIEDEHRLHETSKEPDVSLGSTWLSDFPQAWAETGGMGLAVRQAPLIIPLKATSTPVSIKQYPMSQEARLGIKPHIQRLLDQGILVPCQSPWNTPLLPVKKPGTNDYRPVQDLREVNKRVEDIHPTVPNPYNLLSGLPPSHQWYTVLDLKDAFFCLRLHPTSQPLFAFEWRDPEMGISGQLTWTRLPQGFKNSPTLFNEALHRDLADFRIQHPDLILLQYVDDLLLAATSELDCQQGTRALLQTLGNLGYRASAKKAQICQKQVKYLGYLLKEGQRWLTEARKETVMGQPTPKTPRQLREFLGKAGFCRLFIPGFAEMAAPLYPLTKPGTLFNWGPDQQKAYQEIKQALLTAPALGLPDLTKPFELFVDEKQGYAKGVLTQKLGPWRRPVAYLSKKLDPVAAGWPPCLRMVAAIAVLTKDAGKLTMGQPLVILAPHAVEALVKQPPDRWLSNARMTHYQALLLDTDRVQFGPVVALNPATLLPLPEEGLQHNCLDILAEAHGTRPDLTDQPLPDADHTWYTDGSSLLQEGQRKAGAAVTTETEVIWAKALPAGTSAQRAELIALTQALKMAEGKKLNVYTDSRYAFATAHIHGEIYRRRGWLTSEGKEIKNKDEILALLKALFLPKRLSIIHCPGHQKGHSAEARGNRMADQAARKAAITETPDTSTLLAGKRTADGSEFEKRTADGSEFESPKKKAKVE

SEQ ID NO: 2801 - protein, 2094 aa, synthetic construct
MPAAKRVKLDGGDKKYSIGLDIGTNSVGWAVITDEYKVPSKKFKVLGNTDRHSIKKNLIGALLFDSGETAEATRLKRTARRRYTRRKNRICYLQEIFSNEMAKVDDSFFHRLEESFLVEEDKKHERHPIFGNIVDEVAYHEKYPTIYHLRKKLVDSTDKADLRLIYLALAHMIKFRGHFLIEGDLNPDNSDVDKLFIQLVQTYNQLFEENPINASGVDAKAILSARLSKSRRLENLIAQLPGEKKNGLFGNLIALSLGLTPNFKSNFDLAEDAKLQLSKDTYDDDLDNLLAQIGDQYADLFLAAKNLSDAILLSDILRVNTEITKAPLSASMIKRYDEHHQDLTLLKALVRQQLPEKYKEIFFDQSKNGYAGYIDGGASQEEFYKFIKPILEKMDGTEELLVKLNREDLLRKQRTFDNGSIPHQIHLGELHAILRRQEDFYPFLKDNREKIEKILTFRIPYYVGPLARGNSRFAWMTRKSEETITPWNFEEVVDKGASAQSFIERMTNFDKNLPNEKVLPKHSLLYEYFTVYNELTKVKYVTEGMRKPAFLSGEQKKAIVDLLFKTNRKVTVKQLKEDYFKKIECFDSVEISGVEDRFNASLGTYHDLLKIIKDKDFLDNEENEDILEDIVLTLTLFEDREMIEERLKTYAHLFDDKVMKQLKRRRYTGWGRLSRKLINGIRDKQSGKTILDFLKSDGFANRNFMQLIHDDSLTFKEDIQKAQVSGQGDSLHEHIANLAGSPAIKKGILQTVKVVDELVKVMGRHKPENIVIEMARENQTTQKGQKNSRERMKRIEEGIKELGSQILKEHPVENTQLQNEKLYLYYLQNGRDMYVDQELDINRLSDYDVDHIVPQSFLKDDSIDNKVLTRSDKARGKSDNVPSEEVVKKMKNYWRQLLNAKLITQRKFDNLTKAERGGLSELDKAGFIKRQLVETRQITKHVAQILDSRMNTKYDENDKLIREVKVITLKSKLVSDFRKDFQFYKVREINNYHHAHDAYLNAVVGTALIKKYPKLESEFVYGDYKVYDVRKMIAKSEQEIGKATAKYFFYSNIMNFFKTEITLANGEIRKRPLIETNGETGEIVWDKGRDFATVRKVLSMPQVNIVKKTEVQTGGFSKESILPKRNSDKLIARKKDWDPKKYGGFDSPTVAYSVLVVAKVEKGKSKKLKSVKELLGITIMERSSFEKNPIDFLEAKGYKEVKKDLIIKLPKYSLFELENGRKRMLASAGELQKGNELALPSKYVNFLYLASHYEKLKGSPEDNEQKQLFVEQHKHYLDEIIEQISEFSKRVILADANLDKVLSAYNKHRDKPIREQAENIIHLFTLTNLGAPAAFKYFDTTIDRKRYTSTKEVLDATLIHQSITGLYETRIDLSQLGGDGGGGSPAPGGGGGTLNIEDEHRLHETSKEPDVSLGSTWLSDFPQAWAETGGMGLAVRQAPLIIPLKATSTPVSIKQYPMSQEARLGIKPHIQRLLDQGILVPCQSPWNTPLLPVKKPGTNDYRPVQDLREVNKRVEDIHPTVPNPYNLLSGLPPSHQWYTVLDLKDAFFCLRLHPTSQPLFAFEWRDPEMGISGQLTWTRLPQGFKNSPTLFNEALHRDLADFRIQHPDLILLQYVDDLLLAATSELDCQQGTRALLQTLGNLGYRASAKKAQICQKQVKYLGYLLKEGQRWLTEARKETVMGQPTPKTPRQLREFLGKAGFCRLFIPGFAEMAAPLYPLTKPGTLFNWGPDQQKAYQEIKQALLTAPALGLPDLTKPFELFVDEKQGYAKGVLTQKLGPWRRPVAYLSKKLDPVAAGWPPCLRMVAAIAVLTKDAGKLTMGQPLVILAPHAVEALVKQPPDRWLSNARMTHYQALLLDTDRVQFGPVVALNPATLLPLPEEGLQHNCLDILAEAHGTRPDLTDQPLPDADHTWYTDGSSLLQEGQRKAGAAVTTETEVIWAKALPAGTSAQRAELIALTQALKMAEGKKLNVYTDSRYAFATAHIHGEIYRRRGWLTSEGKEIKNKDEILALLKALFLPKRLSIIHCPGHQKGHSAEARGNRMADQAARKAAITETPDTSTLLAGKRTADGSEFEKRTADGSEFESPKKKAKVE

SEQ ID NO: 2802 - protein, 2100 aa, synthetic construct
MPAAKRVKLDGGDKKYSIGLDIGTNSVGWAVITDEYKVPSKKFKVLGNTDRHSIKKNLIGALLFDSGETAEATRLKRTARRRYTRRKNRICYLQEIFSNEMAKVDDSFFHRLEESFLVEEDKKHERHPIFGNIVDEVAYHEKYPTIYHLRKKLVDSTDKADLRLIYLALAHMIKFRGHFLIEGDLNPDNSDVDKLFIQLVQTYNQLFEENPINASGVDAKAILSARLSKSRRLENLIAQLPGEKKNGLFGNLIALSLGLTPNFKSNFDLAEDAKLQLSKDTYDDDLDNLLAQIGDQYADLFLAAKNLSDAILLSDILRVNTEITKAPLSASMIKRYDEHHQDLTLLKALVRQQLPEKYKEIFFDQSKNGYAGYIDGGASQEEFYKFIKPILEKMDGTEELLVKLNREDLLRKQRTFDNGSIPHQIHLGELHAILRRQEDFYPFLKDNREKIEKILTFRIPYYVGPLARGNSRFAWMTRKSEETITPWNFEEVVDKGASAQSFIERMTNFDKNLPNEKVLPKHSLLYEYFTVYNELTKVKYVTEGMRKPAFLSGEQKKAIVDLLFKTNRKVTVKQLKEDYFKKIECFDSVEISGVEDRFNASLGTYHDLLKIIKDKDFLDNEENEDILEDIVLTLTLFEDREMIEERLKTYAHLFDDKVMKQLKRRRYTGWGRLSRKLINGIRDKQSGKTILDFLKSDGFANRNFMQLIHDDSLTFKEDIQKAQVSGQGDSLHEHIANLAGSPAIKKGILQTVKVVDELVKVMGRHKPENIVIEMARENQTTQKGQKNSRERMKRIEEGIKELGSQILKEHPVENTQLQNEKLYLYYLQNGRDMYVDQELDINRLSDYDVDHIVPQSFLKDDSIDNKVLTRSDKARGKSDNVPSEEVVKKMKNYWRQLLNAKLITQRKFDNLTKAERGGLSELDKAGFIKRQLVETRQITKHVAQILDSRMNTKYDENDKLIREVKVITLKSKLVSDFRKDFQFYKVREINNYHHAHDAYLNAVVGTALIKKYPKLESEFVYGDYKVYDVRKMIAKSEQEIGKATAKYFFYSNIMNFFKTEITLANGEIRKRPLIETNGETGEIVWDKGRDFATVRKVLSMPQVNIVKKTEVQTGGFSKESILPKRNSDKLIARKKDWDPKKYGGFDSPTVAYSVLVVAKVEKGKSKKLKSVKELLGITIMERSSFEKNPIDFLEAKGYKEVKKDLIIKLPKYSLFELENGRKRMLASAGELQKGNELALPSKYVNFLYLASHYEKLKGSPEDNEQKQLFVEQHKHYLDEIIEQISEFSKRVILADANLDKVLSAYNKHRDKPIREQAENIIHLFTLTNLGAPAAFKYFDTTIDRKRYTSTKEVLDATLIHQSITGLYETRIDLSQLGGDGGGSSGSSGSSGSSGSSGGTLNIEDEHRLHETSKEPDVSLGSTWLSDFPQAWAETGGMGLAVRQAPLIIPLKATSTPVSIKQYPMSQEARLGIKPHIQRLLDQGILVPCQSPWNTPLLPVKKPGTNDYRPVQDLREVNKRVEDIHPTVPNPYNLLSGLPPSHQWYTVLDLKDAFFCLRLHPTSQPLFAFEWRDPEMGISGQLTWTRLPQGFKNSPTLFNEALHRDLADFRIQHPDLILLQYVDDLLLAATSELDCQQGTRALLQTLGNLGYRASAKKAQICQKQVKYLGYLLKEGQRWLTEARKETVMGQPTPKTPRQLREFLGKAGFCRLFIPGFAEMAAPLYPLTKPGTLFNWGPDQQKAYQEIKQALLTAPALGLPDLTKPFELFVDEKQGYAKGVLTQKLGPWRRPVAYLSKKLDPVAAGWPPCLRMVAAIAVLTKDAGKLTMGQPLVILAPHAVEALVKQPPDRWLSNARMTHYQALLLDTDRVQFGPVVALNPATLLPLPEEGLQHNCLDILAEAHGTRPDLTDQPLPDADHTWYTDGSSLLQEGQRKAGAAVTTETEVIWAKALPAGTSAQRAELIALTQALKMAEGKKLNVYTDSRYAFATAHIHGEIYRRRGWLTSEGKEIKNKDEILALLKALFLPKRLSIIHCPGHQKGHSAEARGNRMADQAARKAAITETPDTSTLLAGKRTADGSEFEKRTADGSEFESPKKKAKVE

SEQ ID NO: 2803 - protein, 2110 aa, synthetic construct
MPAAKRVKLDGGDKKYSIGLDIGTNSVGWAVITDEYKVPSKKFKVLGNTDRHSIKKNLIGALLFDSGETAEATRLKRTARRRYTRRKNRICYLQEIFSNEMAKVDDSFFHRLEESFLVEEDKKHERHPIFGNIVDEVAYHEKYPTIYHLRKKLVDSTDKADLRLIYLALAHMIKFRGHFLIEGDLNPDNSDVDKLFIQLVQTYNQLFEENPINASGVDAKAILSARLSKSRRLENLIAQLPGEKKNGLFGNLIALSLGLTPNFKSNFDLAEDAKLQLSKDTYDDDLDNLLAQIGDQYADLFLAAKNLSDAILLSDILRVNTEITKAPLSASMIKRYDEHHQDLTLLKALVRQQLPEKYKEIFFDQSKNGYAGYIDGGASQEEFYKFIKPILEKMDGTEELLVKLNREDLLRKQRTFDNGSIPHQIHLGELHAILRRQEDFYPFLKDNREKIEKILTFRIPYYVGPLARGNSRFAWMTRKSEETITPWNFEEVVDKGASAQSFIERMTNFDKNLPNEKVLPKHSLLYEYFTVYNELTKVKYVTEGMRKPAFLSGEQKKAIVDLLFKTNRKVTVKQLKEDYFKKIECFDSVEISGVEDRFNASLGTYHDLLKIIKDKDFLDNEENEDILEDIVLTLTLFEDREMIEERLKTYAHLFDDKVMKQLKRRRYTGWGRLSRKLINGIRDKQSGKTILDFLKSDGFANRNFMQLIHDDSLTFKEDIQKAQVSGQGDSLHEHIANLAGSPAIKKGILQTVKVVDELVKVMGRHKPENIVIEMARENQTTQKGQKNSRERMKRIEEGIKELGSQILKEHPVENTQLQNEKLYLYYLQNGRDMYVDQELDINRLSDYDVDHIVPQSFLKDDSIDNKVLTRSDKARGKSDNVPSEEVVKKMKNYWRQLLNAKLITQRKFDNLTKAERGGLSELDKAGFIKRQLVETRQITKHVAQILDSRMNTKYDENDKLIREVKVITLKSKLVSDFRKDFQFYKVREINNYHHAHDAYLNAVVGTALIKKYPKLESEFVYGDYKVYDVRKMIAKSEQEIGKATAKYFFYSNIMNFFKTEITLANGEIRKRPLIETNGETGEIVWDKGRDFATVRKVLSMPQVNIVKKTEVQTGGFSKESILPKRNSDKLIARKKDWDPKKYGGFDSPTVAYSVLVVAKVEKGKSKKLKSVKELLGITIMERSSFEKNPIDFLEAKGYKEVKKDLIIKLPKYSLFELENGRKRMLASAGELQKGNELALPSKYVNFLYLASHYEKLKGSPEDNEQKQLFVEQHKHYLDEIIEQISEFSKRVILADANLDKVLSAYNKHRDKPIREQAENIIHLFTLTNLGAPAAFKYFDTTIDRKRYTSTKEVLDATLIHQSITGLYETRIDLSQLGGDGGEAAAKEAAAKEAAAKEAAAKEAAAKGGTLNIEDEHRLHETSKEPDVSLGSTWLSDFPQAWAETGGMGLAVRQAPLIIPLKATSTPVSIKQYPMSQEARLGIKPHIQRLLDQGILVPCQSPWNTPLLPVKKPGTNDYRPVQDLREVNKRVEDIHPTVPNPYNLLSGLPPSHQWYTVLDLKDAFFCLRLHPTSQPLFAFEWRDPEMGISGQLTWTRLPQGFKNSPTLFNEALHRDLADFRIQHPDLILLQYVDDLLLAATSELDCQQGTRALLQTLGNLGYRASAKKAQICQKQVKYLGYLLKEGQRWLTEARKETVMGQPTPKTPRQLREFLGKAGFCRLFIPGFAEMAAPLYPLTKPGTLFNWGPDQQKAYQEIKQALLTAPALGLPDLTKPFELFVDEKQGYAKGVLTQKLGPWRRPVAYLSKKLDPVAAGWPPCLRMVAAIAVLTKDAGKLTMGQPLVILAPHAVEALVKQPPDRWLSNARMTHYQALLLDTDRVQFGPVVALNPATLLPLPEEGLQHNCLDILAEAHGTRPDLTDQPLPDADHTWYTDGSSLLQEGQRKAGAAVTTETEVIWAKALPAGTSAQRAELIALTQALKMAEGKKLNVYTDSRYAFATAHIHGEIYRRRGWLTSEGKEIKNKDEILALLKALFLPKRLSIIHCPGHQKGHSAEARGNRMADQAARKAAITETPDTSTLLAGKRTADGSEFEKRTADGSEFESPKKKAKVE

SEQ ID NO: 2804 - protein, 2094 aa, synthetic construct
MPAAKRVKLDGGDKKYSIGLDIGTNSVGWAVITDEYKVPSKKFKVLGNTDRHSIKKNLIGALLFDSGETAEATRLKRTARRRYTRRKNRICYLQEIFSNEMAKVDDSFFHRLEESFLVEEDKKHERHPIFGNIVDEVAYHEKYPTIYHLRKKLVDSTDKADLRLIYLALAHMIKFRGHFLIEGDLNPDNSDVDKLFIQLVQTYNQLFEENPINASGVDAKAILSARLSKSRRLENLIAQLPGEKKNGLFGNLIALSLGLTPNFKSNFDLAEDAKLQLSKDTYDDDLDNLLAQIGDQYADLFLAAKNLSDAILLSDILRVNTEITKAPLSASMIKRYDEHHQDLTLLKALVRQQLPEKYKEIFFDQSKNGYAGYIDGGASQEEFYKFIKPILEKMDGTEELLVKLNREDLLRKQRTFDNGSIPHQIHLGELHAILRRQEDFYPFLKDNREKIEKILTFRIPYYVGPLARGNSRFAWMTRKSEETITPWNFEEVVDKGASAQSFIERMTNFDKNLPNEKVLPKHSLLYEYFTVYNELTKVKYVTEGMRKPAFLSGEQKKAIVDLLFKTNRKVTVKQLKEDYFKKIECFDSVEISGVEDRFNASLGTYHDLLKIIKDKDFLDNEENEDILEDIVLTLTLFEDREMIEERLKTYAHLFDDKVMKQLKRRRYTGWGRLSRKLINGIRDKQSGKTILDFLKSDGFANRNFMQLIHDDSLTFKEDIQKAQVSGQGDSLHEHIANLAGSPAIKKGILQTVKVVDELVKVMGRHKPENIVIEMARENQTTQKGQKNSRERMKRIEEGIKELGSQILKEHPVENTQLQNEKLYLYYLQNGRDMYVDQELDINRLSDYDVDHIVPQSFLKDDSIDNKVLTRSDKARGKSDNVPSEEVVKKMKNYWRQLLNAKLITQRKFDNLTKAERGGLSELDKAGFIKRQLVETRQITKHVAQILDSRMNTKYDENDKLIREVKVITLKSKLVSDFRKDFQFYKVREINNYHHAHDAYLNAVVGTALIKKYPKLESEFVYGDYKVYDVRKMIAKSEQEIGKATAKYFFYSNIMNFFKTEITLANGEIRKRPLIETNGETGEIVWDKGRDFATVRKVLSMPQVNIVKKTEVQTGGFSKESILPKRNSDKLIARKKDWDPKKYGGFDSPTVAYSVLVVAKVEKGKSKKLKSVKELLGITIMERSSFEKNPIDFLEAKGYKEVKKDLIIKLPKYSLFELENGRKRMLASAGELQKGNELALPSKYVNFLYLASHYEKLKGSPEDNEQKQLFVEQHKHYLDEIIEQISEFSKRVILADANLDKVLSAYNKHRDKPIREQAENIIHLFTLTNLGAPAAFKYFDTTIDRKRYTSTKEVLDATLIHQSITGLYETRIDLSQLGGDGGGGSGGGPAPGGTLNIEDEHRLHETSKEPDVSLGSTWLSDFPQAWAETGGMGLAVRQAPLIIPLKATSTPVSIKQYPMSQEARLGIKPHIQRLLDQGILVPCQSPWNTPLLPVKKPGTNDYRPVQDLREVNKRVEDIHPTVPNPYNLLSGLPPSHQWYTVLDLKDAFFCLRLHPTSQPLFAFEWRDPEMGISGQLTWTRLPQGFKNSPTLFNEALHRDLADFRIQHPDLILLQYVDDLLLAATSELDCQQGTRALLQTLGNLGYRASAKKAQICQKQVKYLGYLLKEGQRWLTEARKETVMGQPTPKTPRQLREFLGKAGFCRLFIPGFAEMAAPLYPLTKPGTLFNWGPDQQKAYQEIKQALLTAPALGLPDLTKPFELFVDEKQGYAKGVLTQKLGPWRRPVAYLSKKLDPVAAGWPPCLRMVAAIAVLTKDAGKLTMGQPLVILAPHAVEALVKQPPDRWLSNARMTHYQALLLDTDRVQFGPVVALNPATLLPLPEEGLQHNCLDILAEAHGTRPDLTDQPLPDADHTWYTDGSSLLQEGQRKAGAAVTTETEVIWAKALPAGTSAQRAELIALTQALKMAEGKKLNVYTDSRYAFATAHIHGEIYRRRGWLTSEGKEIKNKDEILALLKALFLPKRLSIIHCPGHQKGHSAEARGNRMADQAARKAAITETPDTSTLLAGKRTADGSEFEKRTADGSEFESPKKKAKVE

SEQ ID NO: 2805 - protein, 2096 aa, synthetic construct
MPAAKRVKLDGGDKKYSIGLDIGTNSVGWAVITDEYKVPSKKFKVLGNTDRHSIKKNLIGALLFDSGETAEATRLKRTARRRYTRRKNRICYLQEIFSNEMAKVDDSFFHRLEESFLVEEDKKHERHPIFGNIVDEVAYHEKYPTIYHLRKKLVDSTDKADLRLIYLALAHMIKFRGHFLIEGDLNPDNSDVDKLFIQLVQTYNQLFEENPINASGVDAKAILSARLSKSRRLENLIAQLPGEKKNGLFGNLIALSLGLTPNFKSNFDLAEDAKLQLSKDTYDDDLDNLLAQIGDQYADLFLAAKNLSDAILLSDILRVNTEITKAPLSASMIKRYDEHHQDLTLLKALVRQQLPEKYKEIFFDQSKNGYAGYIDGGASQEEFYKFIKPILEKMDGTEELLVKLNREDLLRKQRTFDNGSIPHQIHLGELHAILRRQEDFYPFLKDNREKIEKILTFRIPYYVGPLARGNSRFAWMTRKSEETITPWNFEEVVDKGASAQSFIERMTNFDKNLPNEKVLPKHSLLYEYFTVYNELTKVKYVTEGMRKPAFLSGEQKKAIVDLLFKTNRKVTVKQLKEDYFKKIECFDSVEISGVEDRFNASLGTYHDLLKIIKDKDFLDNEENEDILEDIVLTLTLFEDREMIEERLKTYAHLFDDKVMKQLKRRRYTGWGRLSRKLINGIRDKQSGKTILDFLKSDGFANRNFMQLIHDDSLTFKEDIQKAQVSGQGDSLHEHIANLAGSPAIKKGILQTVKVVDELVKVMGRHKPENIVIEMARENQTTQKGQKNSRERMKRIEEGIKELGSQILKEHPVENTQLQNEKLYLYYLQNGRDMYVDQELDINRLSDYDVDHIVPQSFLKDDSIDNKVLTRSDKARGKSDNVPSEEVVKKMKNYWRQLLNAKLITQRKFDNLTKAERGGLSELDKAGFIKRQLVETRQITKHVAQILDSRMNTKYDENDKLIREVKVITLKSKLVSDFRKDFQFYKVREINNYHHAHDAYLNAVVGTALIKKYPKLESEFVYGDYKVYDVRKMIAKSEQEIGKATAKYFFYSNIMNFFKTEITLANGEIRKRPLIETNGETGEIVWDKGRDFATVRKVLSMPQVNIVKKTEVQTGGFSKESILPKRNSDKLIARKKDWDPKKYGGFDSPTVAYSVLVVAKVEKGKSKKLKSVKELLGITIMERSSFEKNPIDFLEAKGYKEVKKDLIIKLPKYSLFELENGRKRMLASAGELQKGNELALPSKYVNFLYLASHYEKLKGSPEDNEQKQLFVEQHKHYLDEIIEQISEFSKRVILADANLDKVLSAYNKHRDKPIREQAENIIHLFTLTNLGAPAAFKYFDTTIDRKRYTSTKEVLDATLIHQSITGLYETRIDLSQLGGDGGGGSPAPEAAAKGGTLNIEDEHRLHETSKEPDVSLGSTWLSDFPQAWAETGGMGLAVRQAPLIIPLKATSTPVSIKQYPMSQEARLGIKPHIQRLLDQGILVPCQSPWNTPLLPVKKPGTNDYRPVQDLREVNKRVEDIHPTVPNPYNLLSGLPPSHQWYTVLDLKDAFFCLRLHPTSQPLFAFEWRDPEMGISGQLTWTRLPQGFKNSPTLFNEALHRDLADFRIQHPDLILLQYVDDLLLAATSELDCQQGTRALLQTLGNLGYRASAKKAQICQKQVKYLGYLLKEGQRWLTEARKETVMGQPTPKTPRQLREFLGKAGFCRLFIPGFAEMAAPLYPLTKPGTLFNWGPDQQKAYQEIKQALLTAPALGLPDLTKPFELFVDEKQGYAKGVLTQKLGPWRRPVAYLSKKLDPVAAGWPPCLRMVAAIAVLTKDAGKLTMGQPLVILAPHAVEALVKQPPDRWLSNARMTHYQALLLDTDRVQFGPVVALNPATLLPLPEEGLQHNCLDILAEAHGTRPDLTDQPLPDADHTWYTDGSSLLQEGQRKAGAAVTTETEVIWAKALPAGTSAQRAELIALTQALKMAEGKKLNVYTDSRYAFATAHIHGEIYRRRGWLTSEGKEIKNKDEILALLKALFLPKRLSIIHCPGHQKGHSAEARGNRMADQAARKAAITETPDTSTLLAGKRTADGSEFEKRTADGSEFESPKKKAKVE

SEQ ID NO: 2806 - protein, 2097 aa, synthetic construct
MPAAKRVKLDGGDKKYSIGLDIGTNSVGWAVITDEYKVPSKKFKVLGNTDRHSIKKNLIGALLFDSGETAEATRLKRTARRRYTRRKNRICYLQEIFSNEMAKVDDSFFHRLEESFLVEEDKKHERHPIFGNIVDEVAYHEKYPTIYHLRKKLVDSTDKADLRLIYLALAHMIKFRGHFLIEGDLNPDNSDVDKLFIQLVQTYNQLFEENPINASGVDAKAILSARLSKSRRLENLIAQLPGEKKNGLFGNLIALSLGLTPNFKSNFDLAEDAKLQLSKDTYDDDLDNLLAQIGDQYADLFLAAKNLSDAILLSDILRVNTEITKAPLSASMIKRYDEHHQDLTLLKALVRQQLPEKYKEIFFDQSKNGYAGYIDGGASQEEFYKFIKPILEKMDGTEELLVKLNREDLLRKQRTFDNGSIPHQIHLGELHAILRRQEDFYPFLKDNREKIEKILTFRIPYYVGPLARGNSRFAWMTRKSEETITPWNFEEVVDKGASAQSFIERMTNFDKNLPNEKVLPKHSLLYEYFTVYNELTKVKYVTEGMRKPAFLSGEQKKAIVDLLFKTNRKVTVKQLKEDYFKKIECFDSVEISGVEDRFNASLGTYHDLLKIIKDKDFLDNEENEDILEDIVLTLTLFEDREMIEERLKTYAHLFDDKVMKQLKRRRYTGWGRLSRKLINGIRDKQSGKTILDFLKSDGFANRNFMQLIHDDSLTFKEDIQKAQVSGQGDSLHEHIANLAGSPAIKKGILQTVKVVDELVKVMGRHKPENIVIEMARENQTTQKGQKNSRERMKRIEEGIKELGSQILKEHPVENTQLQNEKLYLYYLQNGRDMYVDQELDINRLSDYDVDHIVPQSFLKDDSIDNKVLTRSDKARGKSDNVPSEEVVKKMKNYWRQLLNAKLITQRKFDNLTKAERGGLSELDKAGFIKRQLVETRQITKHVAQILDSRMNTKYDENDKLIREVKVITLKSKLVSDFRKDFQFYKVREINNYHHAHDAYLNAVVGTALIKKYPKLESEFVYGDYKVYDVRKMIAKSEQEIGKATAKYFFYSNIMNFFKTEITLANGEIRKRPLIETNGETGEIVWDKGRDFATVRKVLSMPQVNIVKKTEVQTGGFSKESILPKRNSDKLIARKKDWDPKKYGGFDSPTVAYSVLVVAKVEKGKSKKLKSVKELLGITIMERSSFEKNPIDFLEAKGYKEVKKDLIIKLPKYSLFELENGRKRMLASAGELQKGNELALPSKYVNFLYLASHYEKLKGSPEDNEQKQLFVEQHKHYLDEIIEQISEFSKRVILADANLDKVLSAYNKHRDKPIREQAENIIHLFTLTNLGAPAAFKYFDTTIDRKRYTSTKEVLDATLIHQSITGLYETRIDLSQLGGDGGGSSGSSGSSGSSGGTLNIEDEHRLHETSKEPDVSLGSTWLSDFPQAWAETGGMGLAVRQAPLIIPLKATSTPVSIKQYPMSQEARLGIKPHIQRLLDQGILVPCQSPWNTPLLPVKKPGTNDYRPVQDLREVNKRVEDIHPTVPNPYNLLSGLPPSHQWYTVLDLKDAFFCLRLHPTSQPLFAFEWRDPEMGISGQLTWTRLPQGFKNSPTLFNEALHRDLADFRIQHPDLILLQYVDDLLLAATSELDCQQGTRALLQTLGNLGYRASAKKAQICQKQVKYLGYLLKEGQRWLTEARKETVMGQPTPKTPRQLREFLGKAGFCRLFIPGFAEMAAPLYPLTKPGTLFNWGPDQQKAYQEIKQALLTAPALGLPDLTKPFELFVDEKQGYAKGVLTQKLGPWRRPVAYLSKKLDPVAAGWPPCLRMVAAIAVLTKDAGKLTMGQPLVILAPHAVEALVKQPPDRWLSNARMTHYQALLLDTDRVQFGPVVALNPATLLPLPEEGLQHNCLDILAEAHGTRPDLTDQPLPDADHTWYTDGSSLLQEGQRKAGAAVTTETEVIWAKALPAGTSAQRAELIALTQALKMAEGKKLNVYTDSRYAFATAHIHGEIYRRRGWLTSEGKEIKNKDEILALLKALFLPKRLSIIHCPGHQKGHSAEARGNRMADQAARKAAITETPDTSTLLAGKRTADGSEFEKRTADGSEFESPKKKAKVE

SEQ ID NO: 2807 - protein, 2100 aa, synthetic construct
MPAAKRVKLDGGDKKYSIGLDIGTNSVGWAVITDEYKVPSKKFKVLGNTDRHSIKKNLIGALLFDSGETAEATRLKRTARRRYTRRKNRICYLQEIFSNEMAKVDDSFFHRLEESFLVEEDKKHERHPIFGNIVDEVAYHEKYPTIYHLRKKLVDSTDKADLRLIYLALAHMIKFRGHFLIEGDLNPDNSDVDKLFIQLVQTYNQLFEENPINASGVDAKAILSARLSKSRRLENLIAQLPGEKKNGLFGNLIALSLGLTPNFKSNFDLAEDAKLQLSKDTYDDDLDNLLAQIGDQYADLFLAAKNLSDAILLSDILRVNTEITKAPLSASMIKRYDEHHQDLTLLKALVRQQLPEKYKEIFFDQSKNGYAGYIDGGASQEEFYKFIKPILEKMDGTEELLVKLNREDLLRKQRTFDNGSIPHQIHLGELHAILRRQEDFYPFLKDNREKIEKILTFRIPYYVGPLARGNSRFAWMTRKSEETITPWNFEEVVDKGASAQSFIERMTNFDKNLPNEKVLPKHSLLYEYFTVYNELTKVKYVTEGMRKPAFLSGEQKKAIVDLLFKTNRKVTVKQLKEDYFKKIECFDSVEISGVEDRFNASLGTYHDLLKIIKDKDFLDNEENEDILEDIVLTLTLFEDREMIEERLKTYAHLFDDKVMKQLKRRRYTGWGRLSRKLINGIRDKQSGKTILDFLKSDGFANRNFMQLIHDDSLTFKEDIQKAQVSGQGDSLHEHIANLAGSPAIKKGILQTVKVVDELVKVMGRHKPENIVIEMARENQTTQKGQKNSRERMKRIEEGIKELGSQILKEHPVENTQLQNEKLYLYYLQNGRDMYVDQELDINRLSDYDVDHIVPQSFLKDDSIDNKVLTRSDKARGKSDNVPSEEVVKKMKNYWRQLLNAKLITQRKFDNLTKAERGGLSELDKAGFIKRQLVETRQITKHVAQILDSRMNTKYDENDKLIREVKVITLKSKLVSDFRKDFQFYKVREINNYHHAHDAYLNAVVGTALIKKYPKLESEFVYGDYKVYDVRKMIAKSEQEIGKATAKYFFYSNIMNFFKTEITLANGEIRKRPLIETNGETGEIVWDKGRDFATVRKVLSMPQVNIVKKTEVQTGGFSKESILPKRNSDKLIARKKDWDPKKYGGFDSPTVAYSVLVVAKVEKGKSKKLKSVKELLGITIMERSSFEKNPIDFLEAKGYKEVKKDLIIKLPKYSLFELENGRKRMLASAGELQKGNELALPSKYVNFLYLASHYEKLKGSPEDNEQKQLFVEQHKHYLDEIIEQISEFSKRVILADANLDKVLSAYNKHRDKPIREQAENIIHLFTLTNLGAPAAFKYFDTTIDRKRYTSTKEVLDATLIHQSITGLYETRIDLSQLGGDGGGGSGGSGGSGGSGGSGGTLNIEDEHRLHETSKEPDVSLGSTWLSDFPQAWAETGGMGLAVRQAPLIIPLKATSTPVSIKQYPMSQEARLGIKPHIQRLLDQGILVPCQSPWNTPLLPVKKPGTNDYRPVQDLREVNKRVEDIHPTVPNPYNLLSGLPPSHQWYTVLDLKDAFFCLRLHPTSQPLFAFEWRDPEMGISGQLTWTRLPQGFKNSPTLFNEALHRDLADFRIQHPDLILLQYVDDLLLAATSELDCQQGTRALLQTLGNLGYRASAKKAQICQKQVKYLGYLLKEGQRWLTEARKETVMGQPTPKTPRQLREFLGKAGFCRLFIPGFAEMAAPLYPLTKPGTLFNWGPDQQKAYQEIKQALLTAPALGLPDLTKPFELFVDEKQGYAKGVLTQKLGPWRRPVAYLSKKLDPVAAGWPPCLRMVAAIAVLTKDAGKLTMGQPLVILAPHAVEALVKQPPDRWLSNARMTHYQALLLDTDRVQFGPVVALNPATLLPLPEEGLQHNCLDILAEAHGTRPDLTDQPLPDADHTWYTDGSSLLQEGQRKAGAAVTTETEVIWAKALPAGTSAQRAELIALTQALKMAEGKKLNVYTDSRYAFATAHIHGEIYRRRGWLTSEGKEIKNKDEILALLKALFLPKRLSIIHCPGHQKGHSAEARGNRMADQAARKAAITETPDTSTLLAGKRTADGSEFEKRTADGSEFESPKKKAKVE

SEQ ID NO: 2808 - protein, 2091 aa, synthetic construct
MPAAKRVKLDGGDKKYSIGLDIGTNSVGWAVITDEYKVPSKKFKVLGNTDRHSIKKNLIGALLFDSGETAEATRLKRTARRRYTRRKNRICYLQEIFSNEMAKVDDSFFHRLEESFLVEEDKKHERHPIFGNIVDEVAYHEKYPTIYHLRKKLVDSTDKADLRLIYLALAHMIKFRGHFLIEGDLNPDNSDVDKLFIQLVQTYNQLFEENPINASGVDAKAILSARLSKSRRLENLIAQLPGEKKNGLFGNLIALSLGLTPNFKSNFDLAEDAKLQLSKDTYDDDLDNLLAQIGDQYADLFLAAKNLSDAILLSDILRVNTEITKAPLSASMIKRYDEHHQDLTLLKALVRQQLPEKYKEIFFDQSKNGYAGYIDGGASQEEFYKFIKPILEKMDGTEELLVKLNREDLLRKQRTFDNGSIPHQIHLGELHAILRRQEDFYPFLKDNREKIEKILTFRIPYYVGPLARGNSRFAWMTRKSEETITPWNFEEVVDKGASAQSFIERMTNFDKNLPNEKVLPKHSLLYEYFTVYNELTKVKYVTEGMRKPAFLSGEQKKAIVDLLFKTNRKVTVKQLKEDYFKKIECFDSVEISGVEDRFNASLGTYHDLLKIIKDKDFLDNEENEDILEDIVLTLTLFEDREMIEERLKTYAHLFDDKVMKQLKRRRYTGWGRLSRKLINGIRDKQSGKTILDFLKSDGFANRNFMQLIHDDSLTFKEDIQKAQVSGQGDSLHEHIANLAGSPAIKKGILQTVKVVDELVKVMGRHKPENIVIEMARENQTTQKGQKNSRERMKRIEEGIKELGSQILKEHPVENTQLQNEKLYLYYLQNGRDMYVDQELDINRLSDYDVDHIVPQSFLKDDSIDNKVLTRSDKARGKSDNVPSEEVVKKMKNYWRQLLNAKLITQRKFDNLTKAERGGLSELDKAGFIKRQLVETRQITKHVAQILDSRMNTKYDENDKLIREVKVITLKSKLVSDFRKDFQFYKVREINNYHHAHDAYLNAVVGTALIKKYPKLESEFVYGDYKVYDVRKMIAKSEQEIGKATAKYFFYSNIMNFFKTEITLANGEIRKRPLIETNGETGEIVWDKGRDFATVRKVLSMPQVNIVKKTEVQTGGFSKESILPKRNSDKLIARKKDWDPKKYGGFDSPTVAYSVLVVAKVEKGKSKKLKSVKELLGITIMERSSFEKNPIDFLEAKGYKEVKKDLIIKLPKYSLFELENGRKRMLASAGELQKGNELALPSKYVNFLYLASHYEKLKGSPEDNEQKQLFVEQHKHYLDEIIEQISEFSKRVILADANLDKVLSAYNKHRDKPIREQAENIIHLFTLTNLGAPAAFKYFDTTIDRKRYTSTKEVLDATLIHQSITGLYETRIDLSQLGGDGGGGSPAPGGTLNIEDEHRLHETSKEPDVSLGSTWLSDFPQAWAETGGMGLAVRQAPLIIPLKATSTPVSIKQYPMSQEARLGIKPHIQRLLDQGILVPCQSPWNTPLLPVKKPGTNDYRPVQDLREVNKRVEDIHPTVPNPYNLLSGLPPSHQWYTVLDLKDAFFCLRLHPTSQPLFAFEWRDPEMGISGQLTWTRLPQGFKNSPTLFNEALHRDLADFRIQHPDLILLQYVDDLLLAATSELDCQQGTRALLQTLGNLGYRASAKKAQICQKQVKYLGYLLKEGQRWLTEARKETVMGQPTPKTPRQLREFLGKAGFCRLFIPGFAEMAAPLYPLTKPGTLFNWGPDQQKAYQEIKQALLTAPALGLPDLTKPFELFVDEKQGYAKGVLTQKLGPWRRPVAYLSKKLDPVAAGWPPCLRMVAAIAVLTKDAGKLTMGQPLVILAPHAVEALVKQPPDRWLSNARMTHYQALLLDTDRVQFGPVVALNPATLLPLPEEGLQHNCLDILAEAHGTRPDLTDQPLPDADHTWYTDGSSLLQEGQRKAGAAVTTETEVIWAKALPAGTSAQRAELIALTQALKMAEGKKLNVYTDSRYAFATAHIHGEIYRRRGWLTSEGKEIKNKDEILALLKALFLPKRLSIIHCPGHQKGHSAEARGNRMADQAARKAAITETPDTSTLLAGKRTADGSEFEKRTADGSEFESPKKKAKVE

SEQ ID NO: 2809 - protein, 2094 aa, synthetic construct
MPAAKRVKLDGGDKKYSIGLDIGTNSVGWAVITDEYKVPSKKFKVLGNTDRHSIKKNLIGALLFDSGETAEATRLKRTARRRYTRRKNRICYLQEIFSNEMAKVDDSFFHRLEESFLVEEDKKHERHPIFGNIVDEVAYHEKYPTIYHLRKKLVDSTDKADLRLIYLALAHMIKFRGHFLIEGDLNPDNSDVDKLFIQLVQTYNQLFEENPINASGVDAKAILSARLSKSRRLENLIAQLPGEKKNGLFGNLIALSLGLTPNFKSNFDLAEDAKLQLSKDTYDDDLDNLLAQIGDQYADLFLAAKNLSDAILLSDILRVNTEITKAPLSASMIKRYDEHHQDLTLLKALVRQQLPEKYKEIFFDQSKNGYAGYIDGGASQEEFYKFIKPILEKMDGTEELLVKLNREDLLRKQRTFDNGSIPHQIHLGELHAILRRQEDFYPFLKDNREKIEKILTFRIPYYVGPLARGNSRFAWMTRKSEETITPWNFEEVVDKGASAQSFIERMTNFDKNLPNEKVLPKHSLLYEYFTVYNELTKVKYVTEGMRKPAFLSGEQKKAIVDLLFKTNRKVTVKQLKEDYFKKIECFDSVEISGVEDRFNASLGTYHDLLKIIKDKDFLDNEENEDILEDIVLTLTLFEDREMIEERLKTYAHLFDDKVMKQLKRRRYTGWGRLSRKLINGIRDKQSGKTILDFLKSDGFANRNFMQLIHDDSLTFKEDIQKAQVSGQGDSLHEHIANLAGSPAIKKGILQTVKVVDELVKVMGRHKPENIVIEMARENQTTQKGQKNSRERMKRIEEGIKELGSQILKEHPVENTQLQNEKLYLYYLQNGRDMYVDQELDINRLSDYDVDHIVPQSFLKDDSIDNKVLTRSDKARGKSDNVPSEEVVKKMKNYWRQLLNAKLITQRKFDNLTKAERGGLSELDKAGFIKRQLVETRQITKHVAQILDSRMNTKYDENDKLIREVKVITLKSKLVSDFRKDFQFYKVREINNYHHAHDAYLNAVVGTALIKKYPKLESEFVYGDYKVYDVRKMIAKSEQEIGKATAKYFFYSNIMNFFKTEITLANGEIRKRPLIETNGETGEIVWDKGRDFATVRKVLSMPQVNIVKKTEVQTGGFSKESILPKRNSDKLIARKKDWDPKKYGGFDSPTVAYSVLVVAKVEKGKSKKLKSVKELLGITIMERSSFEKNPIDFLEAKGYKEVKKDLIIKLPKYSLFELENGRKRMLASAGELQKGNELALPSKYVNFLYLASHYEKLKGSPEDNEQKQLFVEQHKHYLDEIIEQISEFSKRVILADANLDKVLSAYNKHRDKPIREQAENIIHLFTLTNLGAPAAFKYFDTTIDRKRYTSTKEVLDATLIHQSITGLYETRIDLSQLGGDGGGGSGGSGGSGGTLNIEDEHRLHETSKEPDVSLGSTWLSDFPQAWAETGGMGLAVRQAPLIIPLKATSTPVSIKQYPMSQEARLGIKPHIQRLLDQGILVPCQSPWNTPLLPVKKPGTNDYRPVQDLREVNKRVEDIHPTVPNPYNLLSGLPPSHQWYTVLDLKDAFFCLRLHPTSQPLFAFEWRDPEMGISGQLTWTRLPQGFKNSPTLFNEALHRDLADFRIQHPDLILLQYVDDLLLAATSELDCQQGTRALLQTLGNLGYRASAKKAQICQKQVKYLGYLLKEGQRWLTEARKETVMGQPTPKTPRQLREFLGKAGFCRLFIPGFAEMAAPLYPLTKPGTLFNWGPDQQKAYQEIKQALLTAPALGLPDLTKPFELFVDEKQGYAKGVLTQKLGPWRRPVAYLSKKLDPVAAGWPPCLRMVAAIAVLTKDAGKLTMGQPLVILAPHAVEALVKQPPDRWLSNARMTHYQALLLDTDRVQFGPVVALNPATLLPLPEEGLQHNCLDILAEAHGTRPDLTDQPLPDADHTWYTDGSSLLQEGQRKAGAAVTTETEVIWAKALPAGTSAQRAELIALTQALKMAEGKKLNVYTDSRYAFATAHIHGEIYRRRGWLTSEGKEIKNKDEILALLKALFLPKRLSIIHCPGHQKGHSAEARGNRMADQAARKAAITETPDTSTLLAGKRTADGSEFEKRTADGSEFESPKKKAKVE

SEQ ID NO: 2810 - protein, 2096 aa, synthetic construct
MPAAKRVKLDGGDKKYSIGLDIGTNSVGWAVITDEYKVPSKKFKVLGNTDRHSIKKNLIGALLFDSGETAEATRLKRTARRRYTRRKNRICYLQEIFSNEMAKVDDSFFHRLEESFLVEEDKKHERHPIFGNIVDEVAYHEKYPTIYHLRKKLVDSTDKADLRLIYLALAHMIKFRGHFLIEGDLNPDNSDVDKLFIQLVQTYNQLFEENPINASGVDAKAILSARLSKSRRLENLIAQLPGEKKNGLFGNLIALSLGLTPNFKSNFDLAEDAKLQLSKDTYDDDLDNLLAQIGDQYADLFLAAKNLSDAILLSDILRVNTEITKAPLSASMIKRYDEHHQDLTLLKALVRQQLPEKYKEIFFDQSKNGYAGYIDGGASQEEFYKFIKPILEKMDGTEELLVKLNREDLLRKQRTFDNGSIPHQIHLGELHAILRRQEDFYPFLKDNREKIEKILTFRIPYYVGPLARGNSRFAWMTRKSEETITPWNFEEVVDKGASAQSFIERMTNFDKNLPNEKVLPKHSLLYEYFTVYNELTKVKYVTEGMRKPAFLSGEQKKAIVDLLFKTNRKVTVKQLKEDYFKKIECFDSVEISGVEDRFNASLGTYHDLLKIIKDKDFLDNEENEDILEDIVLTLTLFEDREMIEERLKTYAHLFDDKVMKQLKRRRYTGWGRLSRKLINGIRDKQSGKTILDFLKSDGFANRNFMQLIHDDSLTFKEDIQKAQVSGQGDSLHEHIANLAGSPAIKKGILQTVKVVDELVKVMGRHKPENIVIEMARENQTTQKGQKNSRERMKRIEEGIKELGSQILKEHPVENTQLQNEKLYLYYLQNGRDMYVDQELDINRLSDYDVDHIVPQSFLKDDSIDNKVLTRSDKARGKSDNVPSEEVVKKMKNYWRQLLNAKLITQRKFDNLTKAERGGLSELDKAGFIKRQLVETRQITKHVAQILDSRMNTKYDENDKLIREVKVITLKSKLVSDFRKDFQFYKVREINNYHHAHDAYLNAVVGTALIKKYPKLESEFVYGDYKVYDVRKMIAKSEQEIGKATAKYFFYSNIMNFFKTEITLANGEIRKRPLIETNGETGEIVWDKGRDFATVRKVLSMPQVNIVKKTEVQTGGFSKESILPKRNSDKLIARKKDWDPKKYGGFDSPTVAYSVLVVAKVEKGKSKKLKSVKELLGITIMERSSFEKNPIDFLEAKGYKEVKKDLIIKLPKYSLFELENGRKRMLASAGELQKGNELALPSKYVNFLYLASHYEKLKGSPEDNEQKQLFVEQHKHYLDEIIEQISEFSKRVILADANLDKVLSAYNKHRDKPIREQAENIIHLFTLTNLGAPAAFKYFDTTIDRKRYTSTKEVLDATLIHQSITGLYETRIDLSQLGGDGGGSSGGGEAAAKGGTLNIEDEHRLHETSKEPDVSLGSTWLSDFPQAWAETGGMGLAVRQAPLIIPLKATSTPVSIKQYPMSQEARLGIKPHIQRLLDQGILVPCQSPWNTPLLPVKKPGTNDYRPVQDLREVNKRVEDIHPTVPNPYNLLSGLPPSHQWYTVLDLKDAFFCLRLHPTSQPLFAFEWRDPEMGISGQLTWTRLPQGFKNSPTLFNEALHRDLADFRIQHPDLILLQYVDDLLLAATSELDCQQGTRALLQTLGNLGYRASAKKAQICQKQVKYLGYLLKEGQRWLTEARKETVMGQPTPKTPRQLREFLGKAGFCRLFIPGFAEMAAPLYPLTKPGTLFNWGPDQQKAYQEIKQALLTAPALGLPDLTKPFELFVDEKQGYAKGVLTQKLGPWRRPVAYLSKKLDPVAAGWPPCLRMVAAIAVLTKDAGKLTMGQPLVILAPHAVEALVKQPPDRWLSNARMTHYQALLLDTDRVQFGPVVALNPATLLPLPEEGLQHNCLDILAEAHGTRPDLTDQPLPDADHTWYTDGSSLLQEGQRKAGAAVTTETEVIWAKALPAGTSAQRAELIALTQALKMAEGKKLNVYTDSRYAFATAHIHGEIYRRRGWLTSEGKEIKNKDEILALLKALFLPKRLSIIHCPGHQKGHSAEARGNRMADQAARKAAITETPDTSTLLAGKRTADGSEFEKRTADGSEFESPKKKAKVE

SEQ ID NO: 2811 - protein, 2094 aa, synthetic construct
MPAAKRVKLDGGDKKYSIGLDIGTNSVGWAVITDEYKVPSKKFKVLGNTDRHSIKKNLIGALLFDSGETAEATRLKRTARRRYTRRKNRICYLQEIFSNEMAKVDDSFFHRLEESFLVEEDKKHERHPIFGNIVDEVAYHEKYPTIYHLRKKLVDSTDKADLRLIYLALAHMIKFRGHFLIEGDLNPDNSDVDKLFIQLVQTYNQLFEENPINASGVDAKAILSARLSKSRRLENLIAQLPGEKKNGLFGNLIALSLGLTPNFKSNFDLAEDAKLQLSKDTYDDDLDNLLAQIGDQYADLFLAAKNLSDAILLSDILRVNTEITKAPLSASMIKRYDEHHQDLTLLKALVRQQLPEKYKEIFFDQSKNGYAGYIDGGASQEEFYKFIKPILEKMDGTEELLVKLNREDLLRKQRTFDNGSIPHQIHLGELHAILRRQEDFYPFLKDNREKIEKILTFRIPYYVGPLARGNSRFAWMTRKSEETITPWNFEEVVDKGASAQSFIERMTNFDKNLPNEKVLPKHSLLYEYFTVYNELTKVKYVTEGMRKPAFLSGEQKKAIVDLLFKTNRKVTVKQLKEDYFKKIECFDSVEISGVEDRFNASLGTYHDLLKIIKDKDFLDNEENEDILEDIVLTLTLFEDREMIEERLKTYAHLFDDKVMKQLKRRRYTGWGRLSRKLINGIRDKQSGKTILDFLKSDGFANRNFMQLIHDDSLTFKEDIQKAQVSGQGDSLHEHIANLAGSPAIKKGILQTVKVVDELVKVMGRHKPENIVIEMARENQTTQKGQKNSRERMKRIEEGIKELGSQILKEHPVENTQLQNEKLYLYYLQNGRDMYVDQELDINRLSDYDVDHIVPQSFLKDDSIDNKVLTRSDKARGKSDNVPSEEVVKKMKNYWRQLLNAKLITQRKFDNLTKAERGGLSELDKAGFIKRQLVETRQITKHVAQILDSRMNTKYDENDKLIREVKVITLKSKLVSDFRKDFQFYKVREINNYHHAHDAYLNAVVGTALIKKYPKLESEFVYGDYKVYDVRKMIAKSEQEIGKATAKYFFYSNIMNFFKTEITLANGEIRKRPLIETNGETGEIVWDKGRDFATVRKVLSMPQVNIVKKTEVQTGGFSKESILPKRNSDKLIARKKDWDPKKYGGFDSPTVAYSVLVVAKVEKGKSKKLKSVKELLGITIMERSSFEKNPIDFLEAKGYKEVKKDLIIKLPKYSLFELENGRKRMLASAGELQKGNELALPSKYVNFLYLASHYEKLKGSPEDNEQKQLFVEQHKHYLDEIIEQISEFSKRVILADANLDKVLSAYNKHRDKPIREQAENIIHLFTLTNLGAPAAFKYFDTTIDRKRYTSTKEVLDATLIHQSITGLYETRIDLSQLGGDGGGSSGSSGSSGGTLNIEDEHRLHETSKEPDVSLGSTWLSDFPQAWAETGGMGLAVRQAPLIIPLKATSTPVSIKQYPMSQEARLGIKPHIQRLLDQGILVPCQSPWNTPLLPVKKPGTNDYRPVQDLREVNKRVEDIHPTVPNPYNLLSGLPPSHQWYTVLDLKDAFFCLRLHPTSQPLFAFEWRDPEMGISGQLTWTRLPQGFKNSPTLFNEALHRDLADFRIQHPDLILLQYVDDLLLAATSELDCQQGTRALLQTLGNLGYRASAKKAQICQKQVKYLGYLLKEGQRWLTEARKETVMGQPTPKTPRQLREFLGKAGFCRLFIPGFAEMAAPLYPLTKPGTLFNWGPDQQKAYQEIKQALLTAPALGLPDLTKPFELFVDEKQGYAKGVLTQKLGPWRRPVAYLSKKLDPVAAGWPPCLRMVAAIAVLTKDAGKLTMGQPLVILAPHAVEALVKQPPDRWLSNARMTHYQALLLDTDRVQFGPVVALNPATLLPLPEEGLQHNCLDILAEAHGTRPDLTDQPLPDADHTWYTDGSSLLQEGQRKAGAAVTTETEVIWAKALPAGTSAQRAELIALTQALKMAEGKKLNVYTDSRYAFATAHIHGEIYRRRGWLTSEGKEIKNKDEILALLKALFLPKRLSIIHCPGHQKGHSAEARGNRMADQAARKAAITETPDTSTLLAGKRTADGSEFEKRTADGSEFESPKKKAKVE

SEQ ID NO: 2812 - protein, 2088 aa, synthetic construct
MPAAKRVKLDGGDKKYSIGLDIGTNSVGWAVITDEYKVPSKKFKVLGNTDRHSIKKNLIGALLFDSGETAEATRLKRTARRRYTRRKNRICYLQEIFSNEMAKVDDSFFHRLEESFLVEEDKKHERHPIFGNIVDEVAYHEKYPTIYHLRKKLVDSTDKADLRLIYLALAHMIKFRGHFLIEGDLNPDNSDVDKLFIQLVQTYNQLFEENPINASGVDAKAILSARLSKSRRLENLIAQLPGEKKNGLFGNLIALSLGLTPNFKSNFDLAEDAKLQLSKDTYDDDLDNLLAQIGDQYADLFLAAKNLSDAILLSDILRVNTEITKAPLSASMIKRYDEHHQDLTLLKALVRQQLPEKYKEIFFDQSKNGYAGYIDGGASQEEFYKFIKPILEKMDGTEELLVKLNREDLLRKQRTFDNGSIPHQIHLGELHAILRRQEDFYPFLKDNREKIEKILTFRIPYYVGPLARGNSRFAWMTRKSEETITPWNFEEVVDKGASAQSFIERMTNFDKNLPNEKVLPKHSLLYEYFTVYNELTKVKYVTEGMRKPAFLSGEQKKAIVDLLFKTNRKVTVKQLKEDYFKKIECFDSVEISGVEDRFNASLGTYHDLLKIIKDKDFLDNEENEDILEDIVLTLTLFEDREMIEERLKTYAHLFDDKVMKQLKRRRYTGWGRLSRKLINGIRDKQSGKTILDFLKSDGFANRNFMQLIHDDSLTFKEDIQKAQVSGQGDSLHEHIANLAGSPAIKKGILQTVKVVDELVKVMGRHKPENIVIEMARENQTTQKGQKNSRERMKRIEEGIKELGSQILKEHPVENTQLQNEKLYLYYLQNGRDMYVDQELDINRLSDYDVDHIVPQSFLKDDSIDNKVLTRSDKARGKSDNVPSEEVVKKMKNYWRQLLNAKLITQRKFDNLTKAERGGLSELDKAGFIKRQLVETRQITKHVAQILDSRMNTKYDENDKLIREVKVITLKSKLVSDFRKDFQFYKVREINNYHHAHDAYLNAVVGTALIKKYPKLESEFVYGDYKVYDVRKMIAKSEQEIGKATAKYFFYSNIMNFFKTEITLANGEIRKRPLIETNGETGEIVWDKGRDFATVRKVLSMPQVNIVKKTEVQTGGFSKESILPKRNSDKLIARKKDWDPKKYGGFDSPTVAYSVLVVAKVEKGKSKKLKSVKELLGITIMERSSFEKNPIDFLEAKGYKEVKKDLIIKLPKYSLFELENGRKRMLASAGELQKGNELALPSKYVNFLYLASHYEKLKGSPEDNEQKQLFVEQHKHYLDEIIEQISEFSKRVILADANLDKVLSAYNKHRDKPIREQAENIIHLFTLTNLGAPAAFKYFDTTIDRKRYTSTKEVLDATLIHQSITGLYETRIDLSQLGGDGGPAPGGTLNIEDEHRLHETSKEPDVSLGSTWLSDFPQAWAETGGMGLAVRQAPLIIPLKATSTPVSIKQYPMSQEARLGIKPHIQRLLDQGILVPCQSPWNTPLLPVKKPGTNDYRPVQDLREVNKRVEDIHPTVPNPYNLLSGLPPSHQWYTVLDLKDAFFCLRLHPTSQPLFAFEWRDPEMGISGQLTWTRLPQGFKNSPTLFNEALHRDLADFRIQHPDLILLQYVDDLLLAATSELDCQQGTRALLQTLGNLGYRASAKKAQICQKQVKYLGYLLKEGQRWLTEARKETVMGQPTPKTPRQLREFLGKAGFCRLFIPGFAEMAAPLYPLTKPGTLFNWGPDQQKAYQEIKQALLTAPALGLPDLTKPFELFVDEKQGYAKGVLTQKLGPWRRPVAYLSKKLDPVAAGWPPCLRMVAAIAVLTKDAGKLTMGQPLVILAPHAVEALVKQPPDRWLSNARMTHYQALLLDTDRVQFGPVVALNPATLLPLPEEGLQHNCLDILAEAHGTRPDLTDQPLPDADHTWYTDGSSLLQEGQRKAGAAVTTETEVIWAKALPAGTSAQRAELIALTQALKMAEGKKLNVYTDSRYAFATAHIHGEIYRRRGWLTSEGKEIKNKDEILALLKALFLPKRLSIIHCPGHQKGHSAEARGNRMADQAARKAAITETPDTSTLLAGKRTADGSEFEKRTADGSEFESPKKKAKVE

SEQ ID NO: 2813 - protein, 2115 aa, synthetic construct
MPAAKRVKLDGGDKKYSIGLDIGTNSVGWAVITDEYKVPSKKFKVLGNTDRHSIKKNLIGALLFDSGETAEATRLKRTARRRYTRRKNRICYLQEIFSNEMAKVDDSFFHRLEESFLVEEDKKHERHPIFGNIVDEVAYHEKYPTIYHLRKKLVDSTDKADLRLIYLALAHMIKFRGHFLIEGDLNPDNSDVDKLFIQLVQTYNQLFEENPINASGVDAKAILSARLSKSRRLENLIAQLPGEKKNGLFGNLIALSLGLTPNFKSNFDLAEDAKLQLSKDTYDDDLDNLLAQIGDQYADLFLAAKNLSDAILLSDILRVNTEITKAPLSASMIKRYDEHHQDLTLLKALVRQQLPEKYKEIFFDQSKNGYAGYIDGGASQEEFYKFIKPILEKMDGTEELLVKLNREDLLRKQRTFDNGSIPHQIHLGELHAILRRQEDFYPFLKDNREKIEKILTFRIPYYVGPLARGNSRFAWMTRKSEETITPWNFEEVVDKGASAQSFIERMTNFDKNLPNEKVLPKHSLLYEYFTVYNELTKVKYVTEGMRKPAFLSGEQKKAIVDLLFKTNRKVTVKQLKEDYFKKIECFDSVEISGVEDRFNASLGTYHDLLKIIKDKDFLDNEENEDILEDIVLTLTLFEDREMIEERLKTYAHLFDDKVMKQLKRRRYTGWGRLSRKLINGIRDKQSGKTILDFLKSDGFANRNFMQLIHDDSLTFKEDIQKAQVSGQGDSLHEHIANLAGSPAIKKGILQTVKVVDELVKVMGRHKPENIVIEMARENQTTQKGQKNSRERMKRIEEGIKELGSQILKEHPVENTQLQNEKLYLYYLQNGRDMYVDQELDINRLSDYDVDHIVPQSFLKDDSIDNKVLTRSDKARGKSDNVPSEEVVKKMKNYWRQLLNAKLITQRKFDNLTKAERGGLSELDKAGFIKRQLVETRQITKHVAQILDSRMNTKYDENDKLIREVKVITLKSKLVSDFRKDFQFYKVREINNYHHAHDAYLNAVVGTALIKKYPKLESEFVYGDYKVYDVRKMIAKSEQEIGKATAKYFFYSNIMNFFKTEITLANGEIRKRPLIETNGETGEIVWDKGRDFATVRKVLSMPQVNIVKKTEVQTGGFSKESILPKRNSDKLIARKKDWDPKKYGGFDSPTVAYSVLVVAKVEKGKSKKLKSVKELLGITIMERSSFEKNPIDFLEAKGYKEVKKDLIIKLPKYSLFELENGRKRMLASAGELQKGNELALPSKYVNFLYLASHYEKLKGSPEDNEQKQLFVEQHKHYLDEIIEQISEFSKRVILADANLDKVLSAYNKHRDKPIREQAENIIHLFTLTNLGAPAAFKYFDTTIDRKRYTSTKEVLDATLIHQSITGLYETRIDLSQLGGDGGEAAAKEAAAKEAAAKEAAAKEAAAKEAAAKGGTLNIEDEHRLHETSKEPDVSLGSTWLSDFPQAWAETGGMGLAVRQAPLIIPLKATSTPVSIKQYPMSQEARLGIKPHIQRLLDQGILVPCQSPWNTPLLPVKKPGTNDYRPVQDLREVNKRVEDIHPTVPNPYNLLSGLPPSHQWYTVLDLKDAFFCLRLHPTSQPLFAFEWRDPEMGISGQLTWTRLPQGFKNSPTLFNEALHRDLADFRIQHPDLILLQYVDDLLLAATSELDCQQGTRALLQTLGNLGYRASAKKAQICQKQVKYLGYLLKEGQRWLTEARKETVMGQPTPKTPRQLREFLGKAGFCRLFIPGFAEMAAPLYPLTKPGTLFNWGPDQQKAYQEIKQALLTAPALGLPDLTKPFELFVDEKQGYAKGVLTQKLGPWRRPVAYLSKKLDPVAAGWPPCLRMVAAIAVLTKDAGKLTMGQPLVILAPHAVEALVKQPPDRWLSNARMTHYQALLLDTDRVQFGPVVALNPATLLPLPEEGLQHNCLDILAEAHGTRPDLTDQPLPDADHTWYTDGSSLLQEGQRKAGAAVTTETEVIWAKALPAGTSAQRAELIALTQALKMAEGKKLNVYTDSRYAFATAHIHGEIYRRRGWLTSEGKEIKNKDEILALLKALFLPKRLSIIHCPGHQKGHSAEARGNRMADQAARKAAITETPDTSTLLAGKRTADGSEFEKRTADGSEFESPKKKAKVE

SEQ ID NO: 2814 - protein, 2097 aa, synthetic construct
MPAAKRVKLDGGDKKYSIGLDIGTNSVGWAVITDEYKVPSKKFKVLGNTDRHSIKKNLIGALLFDSGETAEATRLKRTARRRYTRRKNRICYLQEIFSNEMAKVDDSFFHRLEESFLVEEDKKHERHPIFGNIVDEVAYHEKYPTIYHLRKKLVDSTDKADLRLIYLALAHMIKFRGHFLIEGDLNPDNSDVDKLFIQLVQTYNQLFEENPINASGVDAKAILSARLSKSRRLENLIAQLPGEKKNGLFGNLIALSLGLTPNFKSNFDLAEDAKLQLSKDTYDDDLDNLLAQIGDQYADLFLAAKNLSDAILLSDILRVNTEITKAPLSASMIKRYDEHHQDLTLLKALVRQQLPEKYKEIFFDQSKNGYAGYIDGGASQEEFYKFIKPILEKMDGTEELLVKLNREDLLRKQRTFDNGSIPHQIHLGELHAILRRQEDFYPFLKDNREKIEKILTFRIPYYVGPLARGNSRFAWMTRKSEETITPWNFEEVVDKGASAQSFIERMTNFDKNLPNEKVLPKHSLLYEYFTVYNELTKVKYVTEGMRKPAFLSGEQKKAIVDLLFKTNRKVTVKQLKEDYFKKIECFDSVEISGVEDRFNASLGTYHDLLKIIKDKDFLDNEENEDILEDIVLTLTLFEDREMIEERLKTYAHLFDDKVMKQLKRRRYTGWGRLSRKLINGIRDKQSGKTILDFLKSDGFANRNFMQLIHDDSLTFKEDIQKAQVSGQGDSLHEHIANLAGSPAIKKGILQTVKVVDELVKVMGRHKPENIVIEMARENQTTQKGQKNSRERMKRIEEGIKELGSQILKEHPVENTQLQNEKLYLYYLQNGRDMYVDQELDINRLSDYDVDHIVPQSFLKDDSIDNKVLTRSDKARGKSDNVPSEEVVKKMKNYWRQLLNAKLITQRKFDNLTKAERGGLSELDKAGFIKRQLVETRQITKHVAQILDSRMNTKYDENDKLIREVKVITLKSKLVSDFRKDFQFYKVREINNYHHAHDAYLNAVVGTALIKKYPKLESEFVYGDYKVYDVRKMIAKSEQEIGKATAKYFFYSNIMNFFKTEITLANGEIRKRPLIETNGETGEIVWDKGRDFATVRKVLSMPQVNIVKKTEVQTGGFSKESILPKRNSDKLIARKKDWDPKKYGGFDSPTVAYSVLVVAKVEKGKSKKLKSVKELLGITIMERSSFEKNPIDFLEAKGYKEVKKDLIIKLPKYSLFELENGRKRMLASAGELQKGNELALPSKYVNFLYLASHYEKLKGSPEDNEQKQLFVEQHKHYLDEIIEQISEFSKRVILADANLDKVLSAYNKHRDKPIREQAENIIHLFTLTNLGAPAAFKYFDTTIDRKRYTSTKEVLDATLIHQSITGLYETRIDLSQLGGDGGGSAGSAAGSGEFGGTLNIEDEHRLHETSKEPDVSLGSTWLSDFPQAWAETGGMGLAVRQAPLIIPLKATSTPVSIKQYPMSQEARLGIKPHIQRLLDQGILVPCQSPWNTPLLPVKKPGTNDYRPVQDLREVNKRVEDIHPTVPNPYNLLSGLPPSHQWYTVLDLKDAFFCLRLHPTSQPLFAFEWRDPEMGISGQLTWTRLPQGFKNSPTLFNEALHRDLADFRIQHPDLILLQYVDDLLLAATSELDCQQGTRALLQTLGNLGYRASAKKAQICQKQVKYLGYLLKEGQRWLTEARKETVMGQPTPKTPRQLREFLGKAGFCRLFIPGFAEMAAPLYPLTKPGTLFNWGPDQQKAYQEIKQALLTAPALGLPDLTKPFELFVDEKQGYAKGVLTQKLGPWRRPVAYLSKKLDPVAAGWPPCLRMVAAIAVLTKDAGKLTMGQPLVILAPHAVEALVKQPPDRWLSNARMTHYQALLLDTDRVQFGPVVALNPATLLPLPEEGLQHNCLDILAEAHGTRPDLTDQPLPDADHTWYTDGSSLLQEGQRKAGAAVTTETEVIWAKALPAGTSAQRAELIALTQALKMAEGKKLNVYTDSRYAFATAHIHGEIYRRRGWLTSEGKEIKNKDEILALLKALFLPKRLSIIHCPGHQKGHSAEARGNRMADQAARKAAITETPDTSTLLAGKRTADGSEFEKRTADGSEFESPKKKAKVE

SEQ ID NO: 2815 - protein, 2096 aa, synthetic construct
MPAAKRVKLDGGDKKYSIGLDIGTNSVGWAVITDEYKVPSKKFKVLGNTDRHSIKKNLIGALLFDSGETAEATRLKRTARRRYTRRKNRICYLQEIFSNEMAKVDDSFFHRLEESFLVEEDKKHERHPIFGNIVDEVAYHEKYPTIYHLRKKLVDSTDKADLRLIYLALAHMIKFRGHFLIEGDLNPDNSDVDKLFIQLVQTYNQLFEENPINASGVDAKAILSARLSKSRRLENLIAQLPGEKKNGLFGNLIALSLGLTPNFKSNFDLAEDAKLQLSKDTYDDDLDNLLAQIGDQYADLFLAAKNLSDAILLSDILRVNTEITKAPLSASMIKRYDEHHQDLTLLKALVRQQLPEKYKEIFFDQSKNGYAGYIDGGASQEEFYKFIKPILEKMDGTEELLVKLNREDLLRKQRTFDNGSIPHQIHLGELHAILRRQEDFYPFLKDNREKIEKILTFRIPYYVGPLARGNSRFAWMTRKSEETITPWNFEEVVDKGASAQSFIERMTNFDKNLPNEKVLPKHSLLYEYFTVYNELTKVKYVTEGMRKPAFLSGEQKKAIVDLLFKTNRKVTVKQLKEDYFKKIECFDSVEISGVEDRFNASLGTYHDLLKIIKDKDFLDNEENEDILEDIVLTLTLFEDREMIEERLKTYAHLFDDKVMKQLKRRRYTGWGRLSRKLINGIRDKQSGKTILDFLKSDGFANRNFMQLIHDDSLTFKEDIQKAQVSGQGDSLHEHIANLAGSPAIKKGILQTVKVVDELVKVMGRHKPENIVIEMARENQTTQKGQKNSRERMKRIEEGIKELGSQILKEHPVENTQLQNEKLYLYYLQNGRDMYVDQELDINRLSDYDVDHIVPQSFLKDDSIDNKVLTRSDKARGKSDNVPSEEVVKKMKNYWRQLLNAKLITQRKFDNLTKAERGGLSELDKAGFIKRQLVETRQITKHVAQILDSRMNTKYDENDKLIREVKVITLKSKLVSDFRKDFQFYKVREINNYHHAHDAYLNAVVGTALIKKYPKLESEFVYGDYKVYDVRKMIAKSEQEIGKATAKYFFYSNIMNFFKTEITLANGEIRKRPLIETNGETGEIVWDKGRDFATVRKVLSMPQVNIVKKTEVQTGGFSKESILPKRNSDKLIARKKDWDPKKYGGFDSPTVAYSVLVVAKVEKGKSKKLKSVKELLGITIMERSSFEKNPIDFLEAKGYKEVKKDLIIKLPKYSLFELENGRKRMLASAGELQKGNELALPSKYVNFLYLASHYEKLKGSPEDNEQKQLFVEQHKHYLDEIIEQISEFSKRVILADANLDKVLSAYNKHRDKPIREQAENIIHLFTLTNLGAPAAFKYFDTTIDRKRYTSTKEVLDATLIHQSITGLYETRIDLSQLGGDGGEAAAKGGGGGSGGTLNIEDEHRLHETSKEPDVSLGSTWLSDFPQAWAETGGMGLAVRQAPLIIPLKATSTPVSIKQYPMSQEARLGIKPHIQRLLDQGILVPCQSPWNTPLLPVKKPGTNDYRPVQDLREVNKRVEDIHPTVPNPYNLLSGLPPSHQWYTVLDLKDAFFCLRLHPTSQPLFAFEWRDPEMGISGQLTWTRLPQGFKNSPTLFNEALHRDLADFRIQHPDLILLQYVDDLLLAATSELDCQQGTRALLQTLGNLGYRASAKKAQICQKQVKYLGYLLKEGQRWLTEARKETVMGQPTPKTPRQLREFLGKAGFCRLFIPGFAEMAAPLYPLTKPGTLFNWGPDQQKAYQEIKQALLTAPALGLPDLTKPFELFVDEKQGYAKGVLTQKLGPWRRPVAYLSKKLDPVAAGWPPCLRMVAAIAVLTKDAGKLTMGQPLVILAPHAVEALVKQPPDRWLSNARMTHYQALLLDTDRVQFGPVVALNPATLLPLPEEGLQHNCLDILAEAHGTRPDLTDQPLPDADHTWYTDGSSLLQEGQRKAGAAVTTETEVIWAKALPAGTSAQRAELIALTQALKMAEGKKLNVYTDSRYAFATAHIHGEIYRRRGWLTSEGKEIKNKDEILALLKALFLPKRLSIIHCPGHQKGHSAEARGNRMADQAARKAAITETPDTSTLLAGKRTADGSEFEKRTADGSEFESPKKKAKVE

SEQ ID NO: 2816 - protein, 2103 aa, synthetic construct
MPAAKRVKLDGGDKKYSIGLDIGTNSVGWAVITDEYKVPSKKFKVLGNTDRHSIKKNLIGALLFDSGETAEATRLKRTARRRYTRRKNRICYLQEIFSNEMAKVDDSFFHRLEESFLVEEDKKHERHPIFGNIVDEVAYHEKYPTIYHLRKKLVDSTDKADLRLIYLALAHMIKFRGHFLIEGDLNPDNSDVDKLFIQLVQTYNQLFEENPINASGVDAKAILSARLSKSRRLENLIAQLPGEKKNGLFGNLIALSLGLTPNFKSNFDLAEDAKLQLSKDTYDDDLDNLLAQIGDQYADLFLAAKNLSDAILLSDILRVNTEITKAPLSASMIKRYDEHHQDLTLLKALVRQQLPEKYKEIFFDQSKNGYAGYIDGGASQEEFYKFIKPILEKMDGTEELLVKLNREDLLRKQRTFDNGSIPHQIHLGELHAILRRQEDFYPFLKDNREKIEKILTFRIPYYVGPLARGNSRFAWMTRKSEETITPWNFEEVVDKGASAQSFIERMTNFDKNLPNEKVLPKHSLLYEYFTVYNELTKVKYVTEGMRKPAFLSGEQKKAIVDLLFKTNRKVTVKQLKEDYFKKIECFDSVEISGVEDRFNASLGTYHDLLKIIKDKDFLDNEENEDILEDIVLTLTLFEDREMIEERLKTYAHLFDDKVMKQLKRRRYTGWGRLSRKLINGIRDKQSGKTILDFLKSDGFANRNFMQLIHDDSLTFKEDIQKAQVSGQGDSLHEHIANLAGSPAIKKGILQTVKVVDELVKVMGRHKPENIVIEMARENQTTQKGQKNSRERMKRIEEGIKELGSQILKEHPVENTQLQNEKLYLYYLQNGRDMYVDQELDINRLSDYDVDHIVPQSFLKDDSIDNKVLTRSDKARGKSDNVPSEEVVKKMKNYWRQLLNAKLITQRKFDNLTKAERGGLSELDKAGFIKRQLVETRQITKHVAQILDSRMNTKYDENDKLIREVKVITLKSKLVSDFRKDFQFYKVREINNYHHAHDAYLNAVVGTALIKKYPKLESEFVYGDYKVYDVRKMIAKSEQEIGKATAKYFFYSNIMNFFKTEITLANGEIRKRPLIETNGETGEIVWDKGRDFATVRKVLSMPQVNIVKKTEVQTGGFSKESILPKRNSDKLIARKKDWDPKKYGGFDSPTVAYSVLVVAKVEKGKSKKLKSVKELLGITIMERSSFEKNPIDFLEAKGYKEVKKDLIIKLPKYSLFELENGRKRMLASAGELQKGNELALPSKYVNFLYLASHYEKLKGSPEDNEQKQLFVEQHKHYLDEIIEQISEFSKRVILADANLDKVLSAYNKHRDKPIREQAENIIHLFTLTNLGAPAAFKYFDTTIDRKRYTSTKEVLDATLIHQSITGLYETRIDLSQLGGDGGGSSGSSGSSGSSGSSGSSGGTLNIEDEHRLHETSKEPDVSLGSTWLSDFPQAWAETGGMGLAVRQAPLIIPLKATSTPVSIKQYPMSQEARLGIKPHIQRLLDQGILVPCQSPWNTPLLPVKKPGTNDYRPVQDLREVNKRVEDIHPTVPNPYNLLSGLPPSHQWYTVLDLKDAFFCLRLHPTSQPLFAFEWRDPEMGISGQLTWTRLPQGFKNSPTLFNEALHRDLADFRIQHPDLILLQYVDDLLLAATSELDCQQGTRALLQTLGNLGYRASAKKAQICQKQVKYLGYLLKEGQRWLTEARKETVMGQPTPKTPRQLREFLGKAGFCRLFIPGFAEMAAPLYPLTKPGTLFNWGPDQQKAYQEIKQALLTAPALGLPDLTKPFELFVDEKQGYAKGVLTQKLGPWRRPVAYLSKKLDPVAAGWPPCLRMVAAIAVLTKDAGKLTMGQPLVILAPHAVEALVKQPPDRWLSNARMTHYQALLLDTDRVQFGPVVALNPATLLPLPEEGLQHNCLDILAEAHGTRPDLTDQPLPDADHTWYTDGSSLLQEGQRKAGAAVTTETEVIWAKALPAGTSAQRAELIALTQALKMAEGKKLNVYTDSRYAFATAHIHGEIYRRRGWLTSEGKEIKNKDEILALLKALFLPKRLSIIHCPGHQKGHSAEARGNRMADQAARKAAITETPDTSTLLAGKRTADGSEFEKRTADGSEFESPKKKAKVE

SEQ ID NO: 2817 - protein, 2096 aa, synthetic construct
MPAAKRVKLDGGDKKYSIGLDIGTNSVGWAVITDEYKVPSKKFKVLGNTDRHSIKKNLIGALLFDSGETAEATRLKRTARRRYTRRKNRICYLQEIFSNEMAKVDDSFFHRLEESFLVEEDKKHERHPIFGNIVDEVAYHEKYPTIYHLRKKLVDSTDKADLRLIYLALAHMIKFRGHFLIEGDLNPDNSDVDKLFIQLVQTYNQLFEENPINASGVDAKAILSARLSKSRRLENLIAQLPGEKKNGLFGNLIALSLGLTPNFKSNFDLAEDAKLQLSKDTYDDDLDNLLAQIGDQYADLFLAAKNLSDAILLSDILRVNTEITKAPLSASMIKRYDEHHQDLTLLKALVRQQLPEKYKEIFFDQSKNGYAGYIDGGASQEEFYKFIKPILEKMDGTEELLVKLNREDLLRKQRTFDNGSIPHQIHLGELHAILRRQEDFYPFLKDNREKIEKILTFRIPYYVGPLARGNSRFAWMTRKSEETITPWNFEEVVDKGASAQSFIERMTNFDKNLPNEKVLPKHSLLYEYFTVYNELTKVKYVTEGMRKPAFLSGEQKKAIVDLLFKTNRKVTVKQLKEDYFKKIECFDSVEISGVEDRFNASLGTYHDLLKIIKDKDFLDNEENEDILEDIVLTLTLFEDREMIEERLKTYAHLFDDKVMKQLKRRRYTGWGRLSRKLINGIRDKQSGKTILDFLKSDGFANRNFMQLIHDDSLTFKEDIQKAQVSGQGDSLHEHIANLAGSPAIKKGILQTVKVVDELVKVMGRHKPENIVIEMARENQTTQKGQKNSRERMKRIEEGIKELGSQILKEHPVENTQLQNEKLYLYYLQNGRDMYVDQELDINRLSDYDVDHIVPQSFLKDDSIDNKVLTRSDKARGKSDNVPSEEVVKKMKNYWRQLLNAKLITQRKFDNLTKAERGGLSELDKAGFIKRQLVETRQITKHVAQILDSRMNTKYDENDKLIREVKVITLKSKLVSDFRKDFQFYKVREINNYHHAHDAYLNAVVGTALIKKYPKLESEFVYGDYKVYDVRKMIAKSEQEIGKATAKYFFYSNIMNFFKTEITLANGEIRKRPLIETNGETGEIVWDKGRDFATVRKVLSMPQVNIVKKTEVQTGGFSKESILPKRNSDKLIARKKDWDPKKYGGFDSPTVAYSVLVVAKVEKGKSKKLKSVKELLGITIMERSSFEKNPIDFLEAKGYKEVKKDLIIKLPKYSLFELENGRKRMLASAGELQKGNELALPSKYVNFLYLASHYEKLKGSPEDNEQKQLFVEQHKHYLDEIIEQISEFSKRVILADANLDKVLSAYNKHRDKPIREQAENIIHLFTLTNLGAPAAFKYFDTTIDRKRYTSTKEVLDATLIHQSITGLYETRIDLSQLGGDGGEAAAKGGSGSSGGTLNIEDEHRLHETSKEPDVSLGSTWLSDFPQAWAETGGMGLAVRQAPLIIPLKATSTPVSIKQYPMSQEARLGIKPHIQRLLDQGILVPCQSPWNTPLLPVKKPGTNDYRPVQDLREVNKRVEDIHPTVPNPYNLLSGLPPSHQWYTVLDLKDAFFCLRLHPTSQPLFAFEWRDPEMGISGQLTWTRLPQGFKNSPTLFNEALHRDLADFRIQHPDLILLQYVDDLLLAATSELDCQQGTRALLQTLGNLGYRASAKKAQICQKQVKYLGYLLKEGQRWLTEARKETVMGQPTPKTPRQLREFLGKAGFCRLFIPGFAEMAAPLYPLTKPGTLFNWGPDQQKAYQEIKQALLTAPALGLPDLTKPFELFVDEKQGYAKGVLTQKLGPWRRPVAYLSKKLDPVAAGWPPCLRMVAAIAVLTKDAGKLTMGQPLVILAPHAVEALVKQPPDRWLSNARMTHYQALLLDTDRVQFGPVVALNPATLLPLPEEGLQHNCLDILAEAHGTRPDLTDQPLPDADHTWYTDGSSLLQEGQRKAGAAVTTETEVIWAKALPAGTSAQRAELIALTQALKMAEGKKLNVYTDSRYAFATAHIHGEIYRRRGWLTSEGKEIKNKDEILALLKALFLPKRLSIIHCPGHQKGHSAEARGNRMADQAARKAAITETPDTSTLLAGKRTADGSEFEKRTADGSEFESPKKKAKVE

SEQ ID NO: 2818 - protein, 2094 aa, synthetic construct
MPAAKRVKLDGGDKKYSIGLDIGTNSVGWAVITDEYKVPSKKFKVLGNTDRHSIKKNLIGALLFDSGETAEATRLKRTARRRYTRRKNRICYLQEIFSNEMAKVDDSFFHRLEESFLVEEDKKHERHPIFGNIVDEVAYHEKYPTIYHLRKKLVDSTDKADLRLIYLALAHMIKFRGHFLIEGDLNPDNSDVDKLFIQLVQTYNQLFEENPINASGVDAKAILSARLSKSRRLENLIAQLPGEKKNGLFGNLIALSLGLTPNFKSNFDLAEDAKLQLSKDTYDDDLDNLLAQIGDQYADLFLAAKNLSDAILLSDILRVNTEITKAPLSASMIKRYDEHHQDLTLLKALVRQQLPEKYKEIFFDQSKNGYAGYIDGGASQEEFYKFIKPILEKMDGTEELLVKLNREDLLRKQRTFDNGSIPHQIHLGELHAILRRQEDFYPFLKDNREKIEKILTFRIPYYVGPLARGNSRFAWMTRKSEETITPWNFEEVVDKGASAQSFIERMTNFDKNLPNEKVLPKHSLLYEYFTVYNELTKVKYVTEGMRKPAFLSGEQKKAIVDLLFKTNRKVTVKQLKEDYFKKIECFDSVEISGVEDRFNASLGTYHDLLKIIKDKDFLDNEENEDILEDIVLTLTLFEDREMIEERLKTYAHLFDDKVMKQLKRRRYTGWGRLSRKLINGIRDKQSGKTILDFLKSDGFANRNFMQLIHDDSLTFKEDIQKAQVSGQGDSLHEHIANLAGSPAIKKGILQTVKVVDELVKVMGRHKPENIVIEMARENQTTQKGQKNSRERMKRIEEGIKELGSQILKEHPVENTQLQNEKLYLYYLQNGRDMYVDQELDINRLSDYDVDHIVPQSFLKDDSIDNKVLTRSDKARGKSDNVPSEEVVKKMKNYWRQLLNAKLITQRKFDNLTKAERGGLSELDKAGFIKRQLVETRQITKHVAQILDSRMNTKYDENDKLIREVKVITLKSKLVSDFRKDFQFYKVREINNYHHAHDAYLNAVVGTALIKKYPKLESEFVYGDYKVYDVRKMIAKSEQEIGKATAKYFFYSNIMNFFKTEITLANGEIRKRPLIETNGETGEIVWDKGRDFATVRKVLSMPQVNIVKKTEVQTGGFSKESILPKRNSDKLIARKKDWDPKKYGGFDSPTVAYSVLVVAKVEKGKSKKLKSVKELLGITIMERSSFEKNPIDFLEAKGYKEVKKDLIIKLPKYSLFELENGRKRMLASAGELQKGNELALPSKYVNFLYLASHYEKLKGSPEDNEQKQLFVEQHKHYLDEIIEQISEFSKRVILADANLDKVLSAYNKHRDKPIREQAENIIHLFTLTNLGAPAAFKYFDTTIDRKRYTSTKEVLDATLIHQSITGLYETRIDLSQLGGDGGGGSGSSGGGGGTLNIEDEHRLHETSKEPDVSLGSTWLSDFPQAWAETGGMGLAVRQAPLIIPLKATSTPVSIKQYPMSQEARLGIKPHIQRLLDQGILVPCQSPWNTPLLPVKKPGTNDYRPVQDLREVNKRVEDIHPTVPNPYNLLSGLPPSHQWYTVLDLKDAFFCLRLHPTSQPLFAFEWRDPEMGISGQLTWTRLPQGFKNSPTLFNEALHRDLADFRIQHPDLILLQYVDDLLLAATSELDCQQGTRALLQTLGNLGYRASAKKAQICQKQVKYLGYLLKEGQRWLTEARKETVMGQPTPKTPRQLREFLGKAGFCRLFIPGFAEMAAPLYPLTKPGTLFNWGPDQQKAYQEIKQALLTAPALGLPDLTKPFELFVDEKQGYAKGVLTQKLGPWRRPVAYLSKKLDPVAAGWPPCLRMVAAIAVLTKDAGKLTMGQPLVILAPHAVEALVKQPPDRWLSNARMTHYQALLLDTDRVQFGPVVALNPATLLPLPEEGLQHNCLDILAEAHGTRPDLTDQPLPDADHTWYTDGSSLLQEGQRKAGAAVTTETEVIWAKALPAGTSAQRAELIALTQALKMAEGKKLNVYTDSRYAFATAHIHGEIYRRRGWLTSEGKEIKNKDEILALLKALFLPKRLSIIHCPGHQKGHSAEARGNRMADQAARKAAITETPDTSTLLAGKRTADGSEFEKRTADGSEFESPKKKAKVE

SEQ ID NO: 2819 - protein, 2100 aa, synthetic construct
MPAAKRVKLDGGDKKYSIGLDIGTNSVGWAVITDEYKVPSKKFKVLGNTDRHSIKKNLIGALLFDSGETAEATRLKRTARRRYTRRKNRICYLQEIFSNEMAKVDDSFFHRLEESFLVEEDKKHERHPIFGNIVDEVAYHEKYPTIYHLRKKLVDSTDKADLRLIYLALAHMIKFRGHFLIEGDLNPDNSDVDKLFIQLVQTYNQLFEENPINASGVDAKAILSARLSKSRRLENLIAQLPGEKKNGLFGNLIALSLGLTPNFKSNFDLAEDAKLQLSKDTYDDDLDNLLAQIGDQYADLFLAAKNLSDAILLSDILRVNTEITKAPLSASMIKRYDEHHQDLTLLKALVRQQLPEKYKEIFFDQSKNGYAGYIDGGASQEEFYKFIKPILEKMDGTEELLVKLNREDLLRKQRTFDNGSIPHQIHLGELHAILRRQEDFYPFLKDNREKIEKILTFRIPYYVGPLARGNSRFAWMTRKSEETITPWNFEEVVDKGASAQSFIERMTNFDKNLPNEKVLPKHSLLYEYFTVYNELTKVKYVTEGMRKPAFLSGEQKKAIVDLLFKTNRKVTVKQLKEDYFKKIECFDSVEISGVEDRFNASLGTYHDLLKIIKDKDFLDNEENEDILEDIVLTLTLFEDREMIEERLKTYAHLFDDKVMKQLKRRRYTGWGRLSRKLINGIRDKQSGKTILDFLKSDGFANRNFMQLIHDDSLTFKEDIQKAQVSGQGDSLHEHIANLAGSPAIKKGILQTVKVVDELVKVMGRHKPENIVIEMARENQTTQKGQKNSRERMKRIEEGIKELGSQILKEHPVENTQLQNEKLYLYYLQNGRDMYVDQELDINRLSDYDVDHIVPQSFLKDDSIDNKVLTRSDKARGKSDNVPSEEVVKKMKNYWRQLLNAKLITQRKFDNLTKAERGGLSELDKAGFIKRQLVETRQITKHVAQILDSRMNTKYDENDKLIREVKVITLKSKLVSDFRKDFQFYKVREINNYHHAHDAYLNAVVGTALIKKYPKLESEFVYGDYKVYDVRKMIAKSEQEIGKATAKYFFYSNIMNFFKTEITLANGEIRKRPLIETNGETGEIVWDKGRDFATVRKVLSMPQVNIVKKTEVQTGGFSKESILPKRNSDKLIARKKDWDPKKYGGFDSPTVAYSVLVVAKVEKGKSKKLKSVKELLGITIMERSSFEKNPIDFLEAKGYKEVKKDLIIKLPKYSLFELENGRKRMLASAGELQKGNELALPSKYVNFLYLASHYEKLKGSPEDNEQKQLFVEQHKHYLDEIIEQISEFSKRVILADANLDKVLSAYNKHRDKPIREQAENIIHLFTLTNLGAPAAFKYFDTTIDRKRYTSTKEVLDATLIHQSITGLYETRIDLSQLGGDGGGGGGSGGGGSGGGGSGGTLNIEDEHRLHETSKEPDVSLGSTWLSDFPQAWAETGGMGLAVRQAPLIIPLKATSTPVSIKQYPMSQEARLGIKPHIQRLLDQGILVPCQSPWNTPLLPVKKPGTNDYRPVQDLREVNKRVEDIHPTVPNPYNLLSGLPPSHQWYTVLDLKDAFFCLRLHPTSQPLFAFEWRDPEMGISGQLTWTRLPQGFKNSPTLFNEALHRDLADFRIQHPDLILLQYVDDLLLAATSELDCQQGTRALLQTLGNLGYRASAKKAQICQKQVKYLGYLLKEGQRWLTEARKETVMGQPTPKTPRQLREFLGKAGFCRLFIPGFAEMAAPLYPLTKPGTLFNWGPDQQKAYQEIKQALLTAPALGLPDLTKPFELFVDEKQGYAKGVLTQKLGPWRRPVAYLSKKLDPVAAGWPPCLRMVAAIAVLTKDAGKLTMGQPLVILAPHAVEALVKQPPDRWLSNARMTHYQALLLDTDRVQFGPVVALNPATLLPLPEEGLQHNCLDILAEAHGTRPDLTDQPLPDADHTWYTDGSSLLQEGQRKAGAAVTTETEVIWAKALPAGTSAQRAELIALTQALKMAEGKKLNVYTDSRYAFATAHIHGEIYRRRGWLTSEGKEIKNKDEILALLKALFLPKRLSIIHCPGHQKGHSAEARGNRMADQAARKAAITETPDTSTLLAGKRTADGSEFEKRTADGSEFESPKKKAKVE

SEQ ID NO: 2820 - protein, 2091 aa, synthetic construct
MPAAKRVKLDGGDKKYSIGLDIGTNSVGWAVITDEYKVPSKKFKVLGNTDRHSIKKNLIGALLFDSGETAEATRLKRTARRRYTRRKNRICYLQEIFSNEMAKVDDSFFHRLEESFLVEEDKKHERHPIFGNIVDEVAYHEKYPTIYHLRKKLVDSTDKADLRLIYLALAHMIKFRGHFLIEGDLNPDNSDVDKLFIQLVQTYNQLFEENPINASGVDAKAILSARLSKSRRLENLIAQLPGEKKNGLFGNLIALSLGLTPNFKSNFDLAEDAKLQLSKDTYDDDLDNLLAQIGDQYADLFLAAKNLSDAILLSDILRVNTEITKAPLSASMIKRYDEHHQDLTLLKALVRQQLPEKYKEIFFDQSKNGYAGYIDGGASQEEFYKFIKPILEKMDGTEELLVKLNREDLLRKQRTFDNGSIPHQIHLGELHAILRRQEDFYPFLKDNREKIEKILTFRIPYYVGPLARGNSRFAWMTRKSEETITPWNFEEVVDKGASAQSFIERMTNFDKNLPNEKVLPKHSLLYEYFTVYNELTKVKYVTEGMRKPAFLSGEQKKAIVDLLFKTNRKVTVKQLKEDYFKKIECFDSVEISGVEDRFNASLGTYHDLLKIIKDKDFLDNEENEDILEDIVLTLTLFEDREMIEERLKTYAHLFDDKVMKQLKRRRYTGWGRLSRKLINGIRDKQSGKTILDFLKSDGFANRNFMQLIHDDSLTFKEDIQKAQVSGQGDSLHEHIANLAGSPAIKKGILQTVKVVDELVKVMGRHKPENIVIEMARENQTTQKGQKNSRERMKRIEEGIKELGSQILKEHPVENTQLQNEKLYLYYLQNGRDMYVDQELDINRLSDYDVDHIVPQSFLKDDSIDNKVLTRSDKARGKSDNVPSEEVVKKMKNYWRQLLNAKLITQRKFDNLTKAERGGLSELDKAGFIKRQLVETRQITKHVAQILDSRMNTKYDENDKLIREVKVITLKSKLVSDFRKDFQFYKVREINNYHHAHDAYLNAVVGTALIKKYPKLESEFVYGDYKVYDVRKMIAKSEQEIGKATAKYFFYSNIMNFFKTEITLANGEIRKRPLIETNGETGEIVWDKGRDFATVRKVLSMPQVNIVKKTEVQTGGFSKESILPKRNSDKLIARKKDWDPKKYGGFDSPTVAYSVLVVAKVEKGKSKKLKSVKELLGITIMERSSFEKNPIDFLEAKGYKEVKKDLIIKLPKYSLFELENGRKRMLASAGELQKGNELALPSKYVNFLYLASHYEKLKGSPEDNEQKQLFVEQHKHYLDEIIEQISEFSKRVILADANLDKVLSAYNKHRDKPIREQAENIIHLFTLTNLGAPAAFKYFDTTIDRKRYTSTKEVLDATLIHQSITGLYETRIDLSQLGGDGGGGGGSSGGTLNIEDEHRLHETSKEPDVSLGSTWLSDFPQAWAETGGMGLAVRQAPLIIPLKATSTPVSIKQYPMSQEARLGIKPHIQRLLDQGILVPCQSPWNTPLLPVKKPGTNDYRPVQDLREVNKRVEDIHPTVPNPYNLLSGLPPSHQWYTVLDLKDAFFCLRLHPTSQPLFAFEWRDPEMGISGQLTWTRLPQGFKNSPTLFNEALHRDLADFRIQHPDLILLQYVDDLLLAATSELDCQQGTRALLQTLGNLGYRASAKKAQICQKQVKYLGYLLKEGQRWLTEARKETVMGQPTPKTPRQLREFLGKAGFCRLFIPGFAEMAAPLYPLTKPGTLFNWGPDQQKAYQEIKQALLTAPALGLPDLTKPFELFVDEKQGYAKGVLTQKLGPWRRPVAYLSKKLDPVAAGWPPCLRMVAAIAVLTKDAGKLTMGQPLVILAPHAVEALVKQPPDRWLSNARMTHYQALLLDTDRVQFGPVVALNPATLLPLPEEGLQHNCLDILAEAHGTRPDLTDQPLPDADHTWYTDGSSLLQEGQRKAGAAVTTETEVIWAKALPAGTSAQRAELIALTQALKMAEGKKLNVYTDSRYAFATAHIHGEIYRRRGWLTSEGKEIKNKDEILALLKALFLPKRLSIIHCPGHQKGHSAEARGNRMADQAARKAAITETPDTSTLLAGKRTADGSEFEKRTADGSEFESPKKKAKVE

SEQ ID NO: 2821 - protein, 2093 aa, synthetic construct
MPAAKRVKLDGGDKKYSIGLDIGTNSVGWAVITDEYKVPSKKFKVLGNTDRHSIKKNLIGALLFDSGETAEATRLKRTARRRYTRRKNRICYLQEIFSNEMAKVDDSFFHRLEESFLVEEDKKHERHPIFGNIVDEVAYHEKYPTIYHLRKKLVDSTDKADLRLIYLALAHMIKFRGHFLIEGDLNPDNSDVDKLFIQLVQTYNQLFEENPINASGVDAKAILSARLSKSRRLENLIAQLPGEKKNGLFGNLIALSLGLTPNFKSNFDLAEDAKLQLSKDTYDDDLDNLLAQIGDQYADLFLAAKNLSDAILLSDILRVNTEITKAPLSASMIKRYDEHHQDLTLLKALVRQQLPEKYKEIFFDQSKNGYAGYIDGGASQEEFYKFIKPILEKMDGTEELLVKLNREDLLRKQRTFDNGSIPHQIHLGELHAILRRQEDFYPFLKDNREKIEKILTFRIPYYVGPLARGNSRFAWMTRKSEETITPWNFEEVVDKGASAQSFIERMTNFDKNLPNEKVLPKHSLLYEYFTVYNELTKVKYVTEGMRKPAFLSGEQKKAIVDLLFKTNRKVTVKQLKEDYFKKIECFDSVEISGVEDRFNASLGTYHDLLKIIKDKDFLDNEENEDILEDIVLTLTLFEDREMIEERLKTYAHLFDDKVMKQLKRRRYTGWGRLSRKLINGIRDKQSGKTILDFLKSDGFANRNFMQLIHDDSLTFKEDIQKAQVSGQGDSLHEHIANLAGSPAIKKGILQTVKVVDELVKVMGRHKPENIVIEMARENQTTQKGQKNSRERMKRIEEGIKELGSQILKEHPVENTQLQNEKLYLYYLQNGRDMYVDQELDINRLSDYDVDHIVPQSFLKDDSIDNKVLTRSDKARGKSDNVPSEEVVKKMKNYWRQLLNAKLITQRKFDNLTKAERGGLSELDKAGFIKRQLVETRQITKHVAQILDSRMNTKYDENDKLIREVKVITLKSKLVSDFRKDFQFYKVREINNYHHAHDAYLNAVVGTALIKKYPKLESEFVYGDYKVYDVRKMIAKSEQEIGKATAKYFFYSNIMNFFKTEITLANGEIRKRPLIETNGETGEIVWDKGRDFATVRKVLSMPQVNIVKKTEVQTGGFSKESILPKRNSDKLIARKKDWDPKKYGGFDSPTVAYSVLVVAKVEKGKSKKLKSVKELLGITIMERSSFEKNPIDFLEAKGYKEVKKDLIIKLPKYSLFELENGRKRMLASAGELQKGNELALPSKYVNFLYLASHYEKLKGSPEDNEQKQLFVEQHKHYLDEIIEQISEFSKRVILADANLDKVLSAYNKHRDKPIREQAENIIHLFTLTNLGAPAAFKYFDTTIDRKRYTSTKEVLDATLIHQSITGLYETRIDLSQLGGDGGEAAAKGSSGGTLNIEDEHRLHETSKEPDVSLGSTWLSDFPQAWAETGGMGLAVRQAPLIIPLKATSTPVSIKQYPMSQEARLGIKPHIQRLLDQGILVPCQSPWNTPLLPVKKPGTNDYRPVQDLREVNKRVEDIHPTVPNPYNLLSGLPPSHQWYTVLDLKDAFFCLRLHPTSQPLFAFEWRDPEMGISGQLTWTRLPQGFKNSPTLFNEALHRDLADFRIQHPDLILLQYVDDLLLAATSELDCQQGTRALLQTLGNLGYRASAKKAQICQKQVKYLGYLLKEGQRWLTEARKETVMGQPTPKTPRQLREFLGKAGFCRLFIPGFAEMAAPLYPLTKPGTLFNWGPDQQKAYQEIKQALLTAPALGLPDLTKPFELFVDEKQGYAKGVLTQKLGPWRRPVAYLSKKLDPVAAGWPPCLRMVAAIAVLTKDAGKLTMGQPLVILAPHAVEALVKQPPDRWLSNARMTHYQALLLDTDRVQFGPVVALNPATLLPLPEEGLQHNCLDILAEAHGTRPDLTDQPLPDADHTWYTDGSSLLQEGQRKAGAAVTTETEVIWAKALPAGTSAQRAELIALTQALKMAEGKKLNVYTDSRYAFATAHIHGEIYRRRGWLTSEGKEIKNKDEILALLKALFLPKRLSIIHCPGHQKGHSAEARGNRMADQAARKAAITETPDTSTLLAGKRTADGSEFEKRTADGSEFESPKKKAKVE

SEQ ID NO: 2822 - protein, 2096 aa, synthetic construct
MPAAKRVKLDGGDKKYSIGLDIGTNSVGWAVITDEYKVPSKKFKVLGNTDRHSIKKNLIGALLFDSGETAEATRLKRTARRRYTRRKNRICYLQEIFSNEMAKVDDSFFHRLEESFLVEEDKKHERHPIFGNIVDEVAYHEKYPTIYHLRKKLVDSTDKADLRLIYLALAHMIKFRGHFLIEGDLNPDNSDVDKLFIQLVQTYNQLFEENPINASGVDAKAILSARLSKSRRLENLIAQLPGEKKNGLFGNLIALSLGLTPNFKSNFDLAEDAKLQLSKDTYDDDLDNLLAQIGDQYADLFLAAKNLSDAILLSDILRVNTEITKAPLSASMIKRYDEHHQDLTLLKALVRQQLPEKYKEIFFDQSKNGYAGYIDGGASQEEFYKFIKPILEKMDGTEELLVKLNREDLLRKQRTFDNGSIPHQIHLGELHAILRRQEDFYPFLKDNREKIEKILTFRIPYYVGPLARGNSRFAWMTRKSEETITPWNFEEVVDKGASAQSFIERMTNFDKNLPNEKVLPKHSLLYEYFTVYNELTKVKYVTEGMRKPAFLSGEQKKAIVDLLFKTNRKVTVKQLKEDYFKKIECFDSVEISGVEDRFNASLGTYHDLLKIIKDKDFLDNEENEDILEDIVLTLTLFEDREMIEERLKTYAHLFDDKVMKQLKRRRYTGWGRLSRKLINGIRDKQSGKTILDFLKSDGFANRNFMQLIHDDSLTFKEDIQKAQVSGQGDSLHEHIANLAGSPAIKKGILQTVKVVDELVKVMGRHKPENIVIEMARENQTTQKGQKNSRERMKRIEEGIKELGSQILKEHPVENTQLQNEKLYLYYLQNGRDMYVDQELDINRLSDYDVDHIVPQSFLKDDSIDNKVLTRSDKARGKSDNVPSEEVVKKMKNYWRQLLNAKLITQRKFDNLTKAERGGLSELDKAGFIKRQLVETRQITKHVAQILDSRMNTKYDENDKLIREVKVITLKSKLVSDFRKDFQFYKVREINNYHHAHDAYLNAVVGTALIKKYPKLESEFVYGDYKVYDVRKMIAKSEQEIGKATAKYFFYSNIMNFFKTEITLANGEIRKRPLIETNGETGEIVWDKGRDFATVRKVLSMPQVNIVKKTEVQTGGFSKESILPKRNSDKLIARKKDWDPKKYGGFDSPTVAYSVLVVAKVEKGKSKKLKSVKELLGITIMERSSFEKNPIDFLEAKGYKEVKKDLIIKLPKYSLFELENGRKRMLASAGELQKGNELALPSKYVNFLYLASHYEKLKGSPEDNEQKQLFVEQHKHYLDEIIEQISEFSKRVILADANLDKVLSAYNKHRDKPIREQAENIIHLFTLTNLGAPAAFKYFDTTIDRKRYTSTKEVLDATLIHQSITGLYETRIDLSQLGGDGGPAPGGGEAAAKGGTLNIEDEHRLHETSKEPDVSLGSTWLSDFPQAWAETGGMGLAVRQAPLIIPLKATSTPVSIKQYPMSQEARLGIKPHIQRLLDQGILVPCQSPWNTPLLPVKKPGTNDYRPVQDLREVNKRVEDIHPTVPNPYNLLSGLPPSHQWYTVLDLKDAFFCLRLHPTSQPLFAFEWRDPEMGISGQLTWTRLPQGFKNSPTLFNEALHRDLADFRIQHPDLILLQYVDDLLLAATSELDCQQGTRALLQTLGNLGYRASAKKAQICQKQVKYLGYLLKEGQRWLTEARKETVMGQPTPKTPRQLREFLGKAGFCRLFIPGFAEMAAPLYPLTKPGTLFNWGPDQQKAYQEIKQALLTAPALGLPDLTKPFELFVDEKQGYAKGVLTQKLGPWRRPVAYLSKKLDPVAAGWPPCLRMVAAIAVLTKDAGKLTMGQPLVILAPHAVEALVKQPPDRWLSNARMTHYQALLLDTDRVQFGPVVALNPATLLPLPEEGLQHNCLDILAEAHGTRPDLTDQPLPDADHTWYTDGSSLLQEGQRKAGAAVTTETEVIWAKALPAGTSAQRAELIALTQALKMAEGKKLNVYTDSRYAFATAHIHGEIYRRRGWLTSEGKEIKNKDEILALLKALFLPKRLSIIHCPGHQKGHSAEARGNRMADQAARKAAITETPDTSTLLAGKRTADGSEFEKRTADGSEFESPKKKAKVE

SEQ ID NO: 2823 - protein, 2090 aa, synthetic construct
MPAAKRVKLDGGDKKYSIGLDIGTNSVGWAVITDEYKVPSKKFKVLGNTDRHSIKKNLIGALLFDSGETAEATRLKRTARRRYTRRKNRICYLQEIFSNEMAKVDDSFFHRLEESFLVEEDKKHERHPIFGNIVDEVAYHEKYPTIYHLRKKLVDSTDKADLRLIYLALAHMIKFRGHFLIEGDLNPDNSDVDKLFIQLVQTYNQLFEENPINASGVDAKAILSARLSKSRRLENLIAQLPGEKKNGLFGNLIALSLGLTPNFKSNFDLAEDAKLQLSKDTYDDDLDNLLAQIGDQYADLFLAAKNLSDAILLSDILRVNTEITKAPLSASMIKRYDEHHQDLTLLKALVRQQLPEKYKEIFFDQSKNGYAGYIDGGASQEEFYKFIKPILEKMDGTEELLVKLNREDLLRKQRTFDNGSIPHQIHLGELHAILRRQEDFYPFLKDNREKIEKILTFRIPYYVGPLARGNSRFAWMTRKSEETITPWNFEEVVDKGASAQSFIERMTNFDKNLPNEKVLPKHSLLYEYFTVYNELTKVKYVTEGMRKPAFLSGEQKKAIVDLLFKTNRKVTVKQLKEDYFKKIECFDSVEISGVEDRFNASLGTYHDLLKIIKDKDFLDNEENEDILEDIVLTLTLFEDREMIEERLKTYAHLFDDKVMKQLKRRRYTGWGRLSRKLINGIRDKQSGKTILDFLKSDGFANRNFMQLIHDDSLTFKEDIQKAQVSGQGDSLHEHIANLAGSPAIKKGILQTVKVVDELVKVMGRHKPENIVIEMARENQTTQKGQKNSRERMKRIEEGIKELGSQILKEHPVENTQLQNEKLYLYYLQNGRDMYVDQELDINRLSDYDVDHIVPQSFLKDDSIDNKVLTRSDKARGKSDNVPSEEVVKKMKNYWRQLLNAKLITQRKFDNLTKAERGGLSELDKAGFIKRQLVETRQITKHVAQILDSRMNTKYDENDKLIREVKVITLKSKLVSDFRKDFQFYKVREINNYHHAHDAYLNAVVGTALIKKYPKLESEFVYGDYKVYDVRKMIAKSEQEIGKATAKYFFYSNIMNFFKTEITLANGEIRKRPLIETNGETGEIVWDKGRDFATVRKVLSMPQVNIVKKTEVQTGGFSKESILPKRNSDKLIARKKDWDPKKYGGFDSPTVAYSVLVVAKVEKGKSKKLKSVKELLGITIMERSSFEKNPIDFLEAKGYKEVKKDLIIKLPKYSLFELENGRKRMLASAGELQKGNELALPSKYVNFLYLASHYEKLKGSPEDNEQKQLFVEQHKHYLDEIIEQISEFSKRVILADANLDKVLSAYNKHRDKPIREQAENIIHLFTLTNLGAPAAFKYFDTTIDRKRYTSTKEVLDATLIHQSITGLYETRIDLSQLGGDGGEAAAKGGTLNIEDEHRLHETSKEPDVSLGSTWLSDFPQAWAETGGMGLAVRQAPLIIPLKATSTPVSIKQYPMSQEARLGIKPHIQRLLDQGILVPCQSPWNTPLLPVKKPGTNDYRPVQDLREVNKRVEDIHPTVPNPYNLLSGLPPSHQWYTVLDLKDAFFCLRLHPTSQPLFAFEWRDPEMGISGQLTWTRLPQGFKNSPTLFNEALHRDLADFRIQHPDLILLQYVDDLLLAATSELDCQQGTRALLQTLGNLGYRASAKKAQICQKQVKYLGYLLKEGQRWLTEARKETVMGQPTPKTPRQLREFLGKAGFCRLFIPGFAEMAAPLYPLTKPGTLFNWGPDQQKAYQEIKQALLTAPALGLPDLTKPFELFVDEKQGYAKGVLTQKLGPWRRPVAYLSKKLDPVAAGWPPCLRMVAAIAVLTKDAGKLTMGQPLVILAPHAVEALVKQPPDRWLSNARMTHYQALLLDTDRVQFGPVVALNPATLLPLPEEGLQHNCLDILAEAHGTRPDLTDQPLPDADHTWYTDGSSLLQEGQRKAGAAVTTETEVIWAKALPAGTSAQRAELIALTQALKMAEGKKLNVYTDSRYAFATAHIHGEIYRRRGWLTSEGKEIKNKDEILALLKALFLPKRLSIIHCPGHQKGHSAEARGNRMADQAARKAAITETPDTSTLLAGKRTADGSEFEKRTADGSEFESPKKKAKVE

SEQ ID NO: 2824 - protein, 2088 aa, synthetic construct
MPAAKRVKLDGGDKKYSIGLDIGTNSVGWAVITDEYKVPSKKFKVLGNTDRHSIKKNLIGALLFDSGETAEATRLKRTARRRYTRRKNRICYLQEIFSNEMAKVDDSFFHRLEESFLVEEDKKHERHPIFGNIVDEVAYHEKYPTIYHLRKKLVDSTDKADLRLIYLALAHMIKFRGHFLIEGDLNPDNSDVDKLFIQLVQTYNQLFEENPINASGVDAKAILSARLSKSRRLENLIAQLPGEKKNGLFGNLIALSLGLTPNFKSNFDLAEDAKLQLSKDTYDDDLDNLLAQIGDQYADLFLAAKNLSDAILLSDILRVNTEITKAPLSASMIKRYDEHHQDLTLLKALVRQQLPEKYKEIFFDQSKNGYAGYIDGGASQEEFYKFIKPILEKMDGTEELLVKLNREDLLRKQRTFDNGSIPHQIHLGELHAILRRQEDFYPFLKDNREKIEKILTFRIPYYVGPLARGNSRFAWMTRKSEETITPWNFEEVVDKGASAQSFIERMTNFDKNLPNEKVLPKHSLLYEYFTVYNELTKVKYVTEGMRKPAFLSGEQKKAIVDLLFKTNRKVTVKQLKEDYFKKIECFDSVEISGVEDRFNASLGTYHDLLKIIKDKDFLDNEENEDILEDIVLTLTLFEDREMIEERLKTYAHLFDDKVMKQLKRRRYTGWGRLSRKLINGIRDKQSGKTILDFLKSDGFANRNFMQLIHDDSLTFKEDIQKAQVSGQGDSLHEHIANLAGSPAIKKGILQTVKVVDELVKVMGRHKPENIVIEMARENQTTQKGQKNSRERMKRIEEGIKELGSQILKEHPVENTQLQNEKLYLYYLQNGRDMYVDQELDINRLSDYDVDHIVPQSFLKDDSIDNKVLTRSDKARGKSDNVPSEEVVKKMKNYWRQLLNAKLITQRKFDNLTKAERGGLSELDKAGFIKRQLVETRQITKHVAQILDSRMNTKYDENDKLIREVKVITLKSKLVSDFRKDFQFYKVREINNYHHAHDAYLNAVVGTALIKKYPKLESEFVYGDYKVYDVRKMIAKSEQEIGKATAKYFFYSNIMNFFKTEITLANGEIRKRPLIETNGETGEIVWDKGRDFATVRKVLSMPQVNIVKKTEVQTGGFSKESILPKRNSDKLIARKKDWDPKKYGGFDSPTVAYSVLVVAKVEKGKSKKLKSVKELLGITIMERSSFEKNPIDFLEAKGYKEVKKDLIIKLPKYSLFELENGRKRMLASAGELQKGNELALPSKYVNFLYLASHYEKLKGSPEDNEQKQLFVEQHKHYLDEIIEQISEFSKRVILADANLDKVLSAYNKHRDKPIREQAENIIHLFTLTNLGAPAAFKYFDTTIDRKRYTSTKEVLDATLIHQSITGLYETRIDLSQLGGDGGGGGGGTLNIEDEHRLHETSKEPDVSLGSTWLSDFPQAWAETGGMGLAVRQAPLIIPLKATSTPVSIKQYPMSQEARLGIKPHIQRLLDQGILVPCQSPWNTPLLPVKKPGTNDYRPVQDLREVNKRVEDIHPTVPNPYNLLSGLPPSHQWYTVLDLKDAFFCLRLHPTSQPLFAFEWRDPEMGISGQLTWTRLPQGFKNSPTLFNEALHRDLADFRIQHPDLILLQYVDDLLLAATSELDCQQGTRALLQTLGNLGYRASAKKAQICQKQVKYLGYLLKEGQRWLTEARKETVMGQPTPKTPRQLREFLGKAGFCRLFIPGFAEMAAPLYPLTKPGTLFNWGPDQQKAYQEIKQALLTAPALGLPDLTKPFELFVDEKQGYAKGVLTQKLGPWRRPVAYLSKKLDPVAAGWPPCLRMVAAIAVLTKDAGKLTMGQPLVILAPHAVEALVKQPPDRWLSNARMTHYQALLLDTDRVQFGPVVALNPATLLPLPEEGLQHNCLDILAEAHGTRPDLTDQPLPDADHTWYTDGSSLLQEGQRKAGAAVTTETEVIWAKALPAGTSAQRAELIALTQALKMAEGKKLNVYTDSRYAFATAHIHGEIYRRRGWLTSEGKEIKNKDEILALLKALFLPKRLSIIHCPGHQKGHSAEARGNRMADQAARKAAITETPDTSTLLAGKRTADGSEFEKRTADGSEFESPKKKAKVE

SEQ ID NO: 2825 - protein, 2090 aa, synthetic construct
MPAAKRVKLDGGDKKYSIGLDIGTNSVGWAVITDEYKVPSKKFKVLGNTDRHSIKKNLIGALLFDSGETAEATRLKRTARRRYTRRKNRICYLQEIFSNEMAKVDDSFFHRLEESFLVEEDKKHERHPIFGNIVDEVAYHEKYPTIYHLRKKLVDSTDKADLRLIYLALAHMIKFRGHFLIEGDLNPDNSDVDKLFIQLVQTYNQLFEENPINASGVDAKAILSARLSKSRRLENLIAQLPGEKKNGLFGNLIALSLGLTPNFKSNFDLAEDAKLQLSKDTYDDDLDNLLAQIGDQYADLFLAAKNLSDAILLSDILRVNTEITKAPLSASMIKRYDEHHQDLTLLKALVRQQLPEKYKEIFFDQSKNGYAGYIDGGASQEEFYKFIKPILEKMDGTEELLVKLNREDLLRKQRTFDNGSIPHQIHLGELHAILRRQEDFYPFLKDNREKIEKILTFRIPYYVGPLARGNSRFAWMTRKSEETITPWNFEEVVDKGASAQSFIERMTNFDKNLPNEKVLPKHSLLYEYFTVYNELTKVKYVTEGMRKPAFLSGEQKKAIVDLLFKTNRKVTVKQLKEDYFKKIECFDSVEISGVEDRFNASLGTYHDLLKIIKDKDFLDNEENEDILEDIVLTLTLFEDREMIEERLKTYAHLFDDKVMKQLKRRRYTGWGRLSRKLINGIRDKQSGKTILDFLKSDGFANRNFMQLIHDDSLTFKEDIQKAQVSGQGDSLHEHIANLAGSPAIKKGILQTVKVVDELVKVMGRHKPENIVIEMARENQTTQKGQKNSRERMKRIEEGIKELGSQILKEHPVENTQLQNEKLYLYYLQNGRDMYVDQELDINRLSDYDVDHIVPQSFLKDDSIDNKVLTRSDKARGKSDNVPSEEVVKKMKNYWRQLLNAKLITQRKFDNLTKAERGGLSELDKAGFIKRQLVETRQITKHVAQILDSRMNTKYDENDKLIREVKVITLKSKLVSDFRKDFQFYKVREINNYHHAHDAYLNAVVGTALIKKYPKLESEFVYGDYKVYDVRKMIAKSEQEIGKATAKYFFYSNIMNFFKTEITLANGEIRKRPLIETNGETGEIVWDKGRDFATVRKVLSMPQVNIVKKTEVQTGGFSKESILPKRNSDKLIARKKDWDPKKYGGFDSPTVAYSVLVVAKVEKGKSKKLKSVKELLGITIMERSSFEKNPIDFLEAKGYKEVKKDLIIKLPKYSLFELENGRKRMLASAGELQKGNELALPSKYVNFLYLASHYEKLKGSPEDNEQKQLFVEQHKHYLDEIIEQISEFSKRVILADANLDKVLSAYNKHRDKPIREQAENIIHLFTLTNLGAPAAFKYFDTTIDRKRYTSTKEVLDATLIHQSITGLYETRIDLSQLGGDGGGGGGSGGTLNIEDEHRLHETSKEPDVSLGSTWLSDFPQAWAETGGMGLAVRQAPLIIPLKATSTPVSIKQYPMSQEARLGIKPHIQRLLDQGILVPCQSPWNTPLLPVKKPGTNDYRPVQDLREVNKRVEDIHPTVPNPYNLLSGLPPSHQWYTVLDLKDAFFCLRLHPTSQPLFAFEWRDPEMGISGQLTWTRLPQGFKNSPTLFNEALHRDLADFRIQHPDLILLQYVDDLLLAATSELDCQQGTRALLQTLGNLGYRASAKKAQICQKQVKYLGYLLKEGQRWLTEARKETVMGQPTPKTPRQLREFLGKAGFCRLFIPGFAEMAAPLYPLTKPGTLFNWGPDQQKAYQEIKQALLTAPALGLPDLTKPFELFVDEKQGYAKGVLTQKLGPWRRPVAYLSKKLDPVAAGWPPCLRMVAAIAVLTKDAGKLTMGQPLVILAPHAVEALVKQPPDRWLSNARMTHYQALLLDTDRVQFGPVVALNPATLLPLPEEGLQHNCLDILAEAHGTRPDLTDQPLPDADHTWYTDGSSLLQEGQRKAGAAVTTETEVIWAKALPAGTSAQRAELIALTQALKMAEGKKLNVYTDSRYAFATAHIHGEIYRRRGWLTSEGKEIKNKDEILALLKALFLPKRLSIIHCPGHQKGHSAEARGNRMADQAARKAAITETPDTSTLLAGKRTADGSEFEKRTADGSEFESPKKKAKVE

SEQ ID NO: 2826 - protein, 2096 aa, synthetic construct
MPAAKRVKLDGGDKKYSIGLDIGTNSVGWAVITDEYKVPSKKFKVLGNTDRHSIKKNLIGALLFDSGETAEATRLKRTARRRYTRRKNRICYLQEIFSNEMAKVDDSFFHRLEESFLVEEDKKHERHPIFGNIVDEVAYHEKYPTIYHLRKKLVDSTDKADLRLIYLALAHMIKFRGHFLIEGDLNPDNSDVDKLFIQLVQTYNQLFEENPINASGVDAKAILSARLSKSRRLENLIAQLPGEKKNGLFGNLIALSLGLTPNFKSNFDLAEDAKLQLSKDTYDDDLDNLLAQIGDQYADLFLAAKNLSDAILLSDILRVNTEITKAPLSASMIKRYDEHHQDLTLLKALVRQQLPEKYKEIFFDQSKNGYAGYIDGGASQEEFYKFIKPILEKMDGTEELLVKLNREDLLRKQRTFDNGSIPHQIHLGELHAILRRQEDFYPFLKDNREKIEKILTFRIPYYVGPLARGNSRFAWMTRKSEETITPWNFEEVVDKGASAQSFIERMTNFDKNLPNEKVLPKHSLLYEYFTVYNELTKVKYVTEGMRKPAFLSGEQKKAIVDLLFKTNRKVTVKQLKEDYFKKIECFDSVEISGVEDRFNASLGTYHDLLKIIKDKDFLDNEENEDILEDIVLTLTLFEDREMIEERLKTYAHLFDDKVMKQLKRRRYTGWGRLSRKLINGIRDKQSGKTILDFLKSDGFANRNFMQLIHDDSLTFKEDIQKAQVSGQGDSLHEHIANLAGSPAIKKGILQTVKVVDELVKVMGRHKPENIVIEMARENQTTQKGQKNSRERMKRIEEGIKELGSQILKEHPVENTQLQNEKLYLYYLQNGRDMYVDQELDINRLSDYDVDHIVPQSFLKDDSIDNKVLTRSDKARGKSDNVPSEEVVKKMKNYWRQLLNAKLITQRKFDNLTKAERGGLSELDKAGFIKRQLVETRQITKHVAQILDSRMNTKYDENDKLIREVKVITLKSKLVSDFRKDFQFYKVREINNYHHAHDAYLNAVVGTALIKKYPKLESEFVYGDYKVYDVRKMIAKSEQEIGKATAKYFFYSNIMNFFKTEITLANGEIRKRPLIETNGETGEIVWDKGRDFATVRKVLSMPQVNIVKKTEVQTGGFSKESILPKRNSDKLIARKKDWDPKKYGGFDSPTVAYSVLVVAKVEKGKSKKLKSVKELLGITIMERSSFEKNPIDFLEAKGYKEVKKDLIIKLPKYSLFELENGRKRMLASAGELQKGNELALPSKYVNFLYLASHYEKLKGSPEDNEQKQLFVEQHKHYLDEIIEQISEFSKRVILADANLDKVLSAYNKHRDKPIREQAENIIHLFTLTNLGAPAAFKYFDTTIDRKRYTSTKEVLDATLIHQSITGLYETRIDLSQLGGDGGGGSEAAAKGSSGGTLNIEDEHRLHETSKEPDVSLGSTWLSDFPQAWAETGGMGLAVRQAPLIIPLKATSTPVSIKQYPMSQEARLGIKPHIQRLLDQGILVPCQSPWNTPLLPVKKPGTNDYRPVQDLREVNKRVEDIHPTVPNPYNLLSGLPPSHQWYTVLDLKDAFFCLRLHPTSQPLFAFEWRDPEMGISGQLTWTRLPQGFKNSPTLFNEALHRDLADFRIQHPDLILLQYVDDLLLAATSELDCQQGTRALLQTLGNLGYRASAKKAQICQKQVKYLGYLLKEGQRWLTEARKETVMGQPTPKTPRQLREFLGKAGFCRLFIPGFAEMAAPLYPLTKPGTLFNWGPDQQKAYQEIKQALLTAPALGLPDLTKPFELFVDEKQGYAKGVLTQKLGPWRRPVAYLSKKLDPVAAGWPPCLRMVAAIAVLTKDAGKLTMGQPLVILAPHAVEALVKQPPDRWLSNARMTHYQALLLDTDRVQFGPVVALNPATLLPLPEEGLQHNCLDILAEAHGTRPDLTDQPLPDADHTWYTDGSSLLQEGQRKAGAAVTTETEVIWAKALPAGTSAQRAELIALTQALKMAEGKKLNVYTDSRYAFATAHIHGEIYRRRGWLTSEGKEIKNKDEILALLKALFLPKRLSIIHCPGHQKGHSAEARGNRMADQAARKAAITETPDTSTLLAGKRTADGSEFEKRTADGSEFESPKKKAKVE

SEQ ID NO: 2827 - protein, 2115 aa, synthetic construct
MPAAKRVKLDGGDKKYSIGLDIGTNSVGWAVITDEYKVPSKKFKVLGNTDRHSIKKNLIGALLFDSGETAEATRLKRTARRRYTRRKNRICYLQEIFSNEMAKVDDSFFHRLEESFLVEEDKKHERHPIFGNIVDEVAYHEKYPTIYHLRKKLVDSTDKADLRLIYLALAHMIKFRGHFLIEGDLNPDNSDVDKLFIQLVQTYNQLFEENPINASGVDAKAILSARLSKSRRLENLIAQLPGEKKNGLFGNLIALSLGLTPNFKSNFDLAEDAKLQLSKDTYDDDLDNLLAQIGDQYADLFLAAKNLSDAILLSDILRVNTEITKAPLSASMIKRYDEHHQDLTLLKALVRQQLPEKYKEIFFDQSKNGYAGYIDGGASQEEFYKFIKPILEKMDGTEELLVKLNREDLLRKQRTFDNGSIPHQIHLGELHAILRRQEDFYPFLKDNREKIEKILTFRIPYYVGPLARGNSRFAWMTRKSEETITPWNFEEVVDKGASAQSFIERMTNFDKNLPNEKVLPKHSLLYEYFTVYNELTKVKYVTEGMRKPAFLSGEQKKAIVDLLFKTNRKVTVKQLKEDYFKKIECFDSVEISGVEDRFNASLGTYHDLLKIIKDKDFLDNEENEDILEDIVLTLTLFEDREMIEERLKTYAHLFDDKVMKQLKRRRYTGWGRLSRKLINGIRDKQSGKTILDFLKSDGFANRNFMQLIHDDSLTFKEDIQKAQVSGQGDSLHEHIANLAGSPAIKKGILQTVKVVDELVKVMGRHKPENIVIEMARENQTTQKGQKNSRERMKRIEEGIKELGSQILKEHPVENTQLQNEKLYLYYLQNGRDMYVDQELDINRLSDYDVDHIVPQSFLKDDSIDNKVLTRSDKARGKSDNVPSEEVVKKMKNYWRQLLNAKLITQRKFDNLTKAERGGLSELDKAGFIKRQLVETRQITKHVAQILDSRMNTKYDENDKLIREVKVITLKSKLVSDFRKDFQFYKVREINNYHHAHDAYLNAVVGTALIKKYPKLESEFVYGDYKVYDVRKMIAKSEQEIGKATAKYFFYSNIMNFFKTEITLANGEIRKRPLIETNGETGEIVWDKGRDFATVRKVLSMPQVNIVKKTEVQTGGFSKESILPKRNSDKLIARKKDWDPKKYGGFDSPTVAYSVLVVAKVEKGKSKKLKSVKELLGITIMERSSFEKNPIDFLEAKGYKEVKKDLIIKLPKYSLFELENGRKRMLASAGELQKGNELALPSKYVNFLYLASHYEKLKGSPEDNEQKQLFVEQHKHYLDEIIEQISEFSKRVILADANLDKVLSAYNKHRDKPIREQAENIIHLFTLTNLGAPAAFKYFDTTIDRKRYTSTKEVLDATLIHQSITGLYETRIDLSQLGGDGGGGGGSGGGGSGGGGSGGGGSGGGGSGGGGSGGTLNIEDEHRLHETSKEPDVSLGSTWLSDFPQAWAETGGMGLAVRQAPLIIPLKATSTPVSIKQYPMSQEARLGIKPHIQRLLDQGILVPCQSPWNTPLLPVKKPGTNDYRPVQDLREVNKRVEDIHPTVPNPYNLLSGLPPSHQWYTVLDLKDAFFCLRLHPTSQPLFAFEWRDPEMGISGQLTWTRLPQGFKNSPTLFNEALHRDLADFRIQHPDLILLQYVDDLLLAATSELDCQQGTRALLQTLGNLGYRASAKKAQICQKQVKYLGYLLKEGQRWLTEARKETVMGQPTPKTPRQLREFLGKAGFCRLFIPGFAEMAAPLYPLTKPGTLFNWGPDQQKAYQEIKQALLTAPALGLPDLTKPFELFVDEKQGYAKGVLTQKLGPWRRPVAYLSKKLDPVAAGWPPCLRMVAAIAVLTKDAGKLTMGQPLVILAPHAVEALVKQPPDRWLSNARMTHYQALLLDTDRVQFGPVVALNPATLLPLPEEGLQHNCLDILAEAHGTRPDLTDQPLPDADHTWYTDGSSLLQEGQRKAGAAVTTETEVIWAKALPAGTSAQRAELIALTQALKMAEGKKLNVYTDSRYAFATAHIHGEIYRRRGWLTSEGKEIKNKDEILALLKALFLPKRLSIIHCPGHQKGHSAEARGNRMADQAARKAAITETPDTSTLLAGKRTADGSEFEKRTADGSEFESPKKKAKVE

SEQ ID NO: 2828 - protein, 2093 aa, synthetic construct
MPAAKRVKLDGGDKKYSIGLDIGTNSVGWAVITDEYKVPSKKFKVLGNTDRHSIKKNLIGALLFDSGETAEATRLKRTARRRYTRRKNRICYLQEIFSNEMAKVDDSFFHRLEESFLVEEDKKHERHPIFGNIVDEVAYHEKYPTIYHLRKKLVDSTDKADLRLIYLALAHMIKFRGHFLIEGDLNPDNSDVDKLFIQLVQTYNQLFEENPINASGVDAKAILSARLSKSRRLENLIAQLPGEKKNGLFGNLIALSLGLTPNFKSNFDLAEDAKLQLSKDTYDDDLDNLLAQIGDQYADLFLAAKNLSDAILLSDILRVNTEITKAPLSASMIKRYDEHHQDLTLLKALVRQQLPEKYKEIFFDQSKNGYAGYIDGGASQEEFYKFIKPILEKMDGTEELLVKLNREDLLRKQRTFDNGSIPHQIHLGELHAILRRQEDFYPFLKDNREKIEKILTFRIPYYVGPLARGNSRFAWMTRKSEETITPWNFEEVVDKGASAQSFIERMTNFDKNLPNEKVLPKHSLLYEYFTVYNELTKVKYVTEGMRKPAFLSGEQKKAIVDLLFKTNRKVTVKQLKEDYFKKIECFDSVEISGVEDRFNASLGTYHDLLKIIKDKDFLDNEENEDILEDIVLTLTLFEDREMIEERLKTYAHLFDDKVMKQLKRRRYTGWGRLSRKLINGIRDKQSGKTILDFLKSDGFANRNFMQLIHDDSLTFKEDIQKAQVSGQGDSLHEHIANLAGSPAIKKGILQTVKVVDELVKVMGRHKPENIVIEMARENQTTQKGQKNSRERMKRIEEGIKELGSQILKEHPVENTQLQNEKLYLYYLQNGRDMYVDQELDINRLSDYDVDHIVPQSFLKDDSIDNKVLTRSDKARGKSDNVPSEEVVKKMKNYWRQLLNAKLITQRKFDNLTKAERGGLSELDKAGFIKRQLVETRQITKHVAQILDSRMNTKYDENDKLIREVKVITLKSKLVSDFRKDFQFYKVREINNYHHAHDAYLNAVVGTALIKKYPKLESEFVYGDYKVYDVRKMIAKSEQEIGKATAKYFFYSNIMNFFKTEITLANGEIRKRPLIETNGETGEIVWDKGRDFATVRKVLSMPQVNIVKKTEVQTGGFSKESILPKRNSDKLIARKKDWDPKKYGGFDSPTVAYSVLVVAKVEKGKSKKLKSVKELLGITIMERSSFEKNPIDFLEAKGYKEVKKDLIIKLPKYSLFELENGRKRMLASAGELQKGNELALPSKYVNFLYLASHYEKLKGSPEDNEQKQLFVEQHKHYLDEIIEQISEFSKRVILADANLDKVLSAYNKHRDKPIREQAENIIHLFTLTNLGAPAAFKYFDTTIDRKRYTSTKEVLDATLIHQSITGLYETRIDLSQLGGDGGGSSEAAAKGGTLNIEDEHRLHETSKEPDVSLGSTWLSDFPQAWAETGGMGLAVRQAPLIIPLKATSTPVSIKQYPMSQEARLGIKPHIQRLLDQGILVPCQSPWNTPLLPVKKPGTNDYRPVQDLREVNKRVEDIHPTVPNPYNLLSGLPPSHQWYTVLDLKDAFFCLRLHPTSQPLFAFEWRDPEMGISGQLTWTRLPQGFKNSPTLFNEALHRDLADFRIQHPDLILLQYVDDLLLAATSELDCQQGTRALLQTLGNLGYRASAKKAQICQKQVKYLGYLLKEGQRWLTEARKETVMGQPTPKTPRQLREFLGKAGFCRLFIPGFAEMAAPLYPLTKPGTLFNWGPDQQKAYQEIKQALLTAPALGLPDLTKPFELFVDEKQGYAKGVLTQKLGPWRRPVAYLSKKLDPVAAGWPPCLRMVAAIAVLTKDAGKLTMGQPLVILAPHAVEALVKQPPDRWLSNARMTHYQALLLDTDRVQFGPVVALNPATLLPLPEEGLQHNCLDILAEAHGTRPDLTDQPLPDADHTWYTDGSSLLQEGQRKAGAAVTTETEVIWAKALPAGTSAQRAELIALTQALKMAEGKKLNVYTDSRYAFATAHIHGEIYRRRGWLTSEGKEIKNKDEILALLKALFLPKRLSIIHCPGHQKGHSAEARGNRMADQAARKAAITETPDTSTLLAGKRTADGSEFEKRTADGSEFESPKKKAKVE

SEQ ID NO: 2829 - protein, 2096 aa, synthetic construct
MPAAKRVKLDGGDKKYSIGLDIGTNSVGWAVITDEYKVPSKKFKVLGNTDRHSIKKNLIGALLFDSGETAEATRLKRTARRRYTRRKNRICYLQEIFSNEMAKVDDSFFHRLEESFLVEEDKKHERHPIFGNIVDEVAYHEKYPTIYHLRKKLVDSTDKADLRLIYLALAHMIKFRGHFLIEGDLNPDNSDVDKLFIQLVQTYNQLFEENPINASGVDAKAILSARLSKSRRLENLIAQLPGEKKNGLFGNLIALSLGLTPNFKSNFDLAEDAKLQLSKDTYDDDLDNLLAQIGDQYADLFLAAKNLSDAILLSDILRVNTEITKAPLSASMIKRYDEHHQDLTLLKALVRQQLPEKYKEIFFDQSKNGYAGYIDGGASQEEFYKFIKPILEKMDGTEELLVKLNREDLLRKQRTFDNGSIPHQIHLGELHAILRRQEDFYPFLKDNREKIEKILTFRIPYYVGPLARGNSRFAWMTRKSEETITPWNFEEVVDKGASAQSFIERMTNFDKNLPNEKVLPKHSLLYEYFTVYNELTKVKYVTEGMRKPAFLSGEQKKAIVDLLFKTNRKVTVKQLKEDYFKKIECFDSVEISGVEDRFNASLGTYHDLLKIIKDKDFLDNEENEDILEDIVLTLTLFEDREMIEERLKTYAHLFDDKVMKQLKRRRYTGWGRLSRKLINGIRDKQSGKTILDFLKSDGFANRNFMQLIHDDSLTFKEDIQKAQVSGQGDSLHEHIANLAGSPAIKKGILQTVKVVDELVKVMGRHKPENIVIEMARENQTTQKGQKNSRERMKRIEEGIKELGSQILKEHPVENTQLQNEKLYLYYLQNGRDMYVDQELDINRLSDYDVDHIVPQSFLKDDSIDNKVLTRSDKARGKSDNVPSEEVVKKMKNYWRQLLNAKLITQRKFDNLTKAERGGLSELDKAGFIKRQLVETRQITKHVAQILDSRMNTKYDENDKLIREVKVITLKSKLVSDFRKDFQFYKVREINNYHHAHDAYLNAVVGTALIKKYPKLESEFVYGDYKVYDVRKMIAKSEQEIGKATAKYFFYSNIMNFFKTEITLANGEIRKRPLIETNGETGEIVWDKGRDFATVRKVLSMPQVNIVKKTEVQTGGFSKESILPKRNSDKLIARKKDWDPKKYGGFDSPTVAYSVLVVAKVEKGKSKKLKSVKELLGITIMERSSFEKNPIDFLEAKGYKEVKKDLIIKLPKYSLFELENGRKRMLASAGELQKGNELALPSKYVNFLYLASHYEKLKGSPEDNEQKQLFVEQHKHYLDEIIEQISEFSKRVILADANLDKVLSAYNKHRDKPIREQAENIIHLFTLTNLGAPAAFKYFDTTIDRKRYTSTKEVLDATLIHQSITGLYETRIDLSQLGGDGGPAPEAAAKGGSGGTLNIEDEHRLHETSKEPDVSLGSTWLSDFPQAWAETGGMGLAVRQAPLIIPLKATSTPVSIKQYPMSQEARLGIKPHIQRLLDQGILVPCQSPWNTPLLPVKKPGTNDYRPVQDLREVNKRVEDIHPTVPNPYNLLSGLPPSHQWYTVLDLKDAFFCLRLHPTSQPLFAFEWRDPEMGISGQLTWTRLPQGFKNSPTLFNEALHRDLADFRIQHPDLILLQYVDDLLLAATSELDCQQGTRALLQTLGNLGYRASAKKAQICQKQVKYLGYLLKEGQRWLTEARKETVMGQPTPKTPRQLREFLGKAGFCRLFIPGFAEMAAPLYPLTKPGTLFNWGPDQQKAYQEIKQALLTAPALGLPDLTKPFELFVDEKQGYAKGVLTQKLGPWRRPVAYLSKKLDPVAAGWPPCLRMVAAIAVLTKDAGKLTMGQPLVILAPHAVEALVKQPPDRWLSNARMTHYQALLLDTDRVQFGPVVALNPATLLPLPEEGLQHNCLDILAEAHGTRPDLTDQPLPDADHTWYTDGSSLLQEGQRKAGAAVTTETEVIWAKALPAGTSAQRAELIALTQALKMAEGKKLNVYTDSRYAFATAHIHGEIYRRRGWLTSEGKEIKNKDEILALLKALFLPKRLSIIHCPGHQKGHSAEARGNRMADQAARKAAITETPDTSTLLAGKRTADGSEFEKRTADGSEFESPKKKAKVE

SEQ ID NO: 2830 - protein, 2096 aa, synthetic construct
MPAAKRVKLDGGDKKYSIGLDIGTNSVGWAVITDEYKVPSKKFKVLGNTDRHSIKKNLIGALLFDSGETAEATRLKRTARRRYTRRKNRICYLQEIFSNEMAKVDDSFFHRLEESFLVEEDKKHERHPIFGNIVDEVAYHEKYPTIYHLRKKLVDSTDKADLRLIYLALAHMIKFRGHFLIEGDLNPDNSDVDKLFIQLVQTYNQLFEENPINASGVDAKAILSARLSKSRRLENLIAQLPGEKKNGLFGNLIALSLGLTPNFKSNFDLAEDAKLQLSKDTYDDDLDNLLAQIGDQYADLFLAAKNLSDAILLSDILRVNTEITKAPLSASMIKRYDEHHQDLTLLKALVRQQLPEKYKEIFFDQSKNGYAGYIDGGASQEEFYKFIKPILEKMDGTEELLVKLNREDLLRKQRTFDNGSIPHQIHLGELHAILRRQEDFYPFLKDNREKIEKILTFRIPYYVGPLARGNSRFAWMTRKSEETITPWNFEEVVDKGASAQSFIERMTNFDKNLPNEKVLPKHSLLYEYFTVYNELTKVKYVTEGMRKPAFLSGEQKKAIVDLLFKTNRKVTVKQLKEDYFKKIECFDSVEISGVEDRFNASLGTYHDLLKIIKDKDFLDNEENEDILEDIVLTLTLFEDREMIEERLKTYAHLFDDKVMKQLKRRRYTGWGRLSRKLINGIRDKQSGKTILDFLKSDGFANRNFMQLIHDDSLTFKEDIQKAQVSGQGDSLHEHIANLAGSPAIKKGILQTVKVVDELVKVMGRHKPENIVIEMARENQTTQKGQKNSRERMKRIEEGIKELGSQILKEHPVENTQLQNEKLYLYYLQNGRDMYVDQELDINRLSDYDVDHIVPQSFLKDDSIDNKVLTRSDKARGKSDNVPSEEVVKKMKNYWRQLLNAKLITQRKFDNLTKAERGGLSELDKAGFIKRQLVETRQITKHVAQILDSRMNTKYDENDKLIREVKVITLKSKLVSDFRKDFQFYKVREINNYHHAHDAYLNAVVGTALIKKYPKLESEFVYGDYKVYDVRKMIAKSEQEIGKATAKYFFYSNIMNFFKTEITLANGEIRKRPLIETNGETGEIVWDKGRDFATVRKVLSMPQVNIVKKTEVQTGGFSKESILPKRNSDKLIARKKDWDPKKYGGFDSPTVAYSVLVVAKVEKGKSKKLKSVKELLGITIMERSSFEKNPIDFLEAKGYKEVKKDLIIKLPKYSLFELENGRKRMLASAGELQKGNELALPSKYVNFLYLASHYEKLKGSPEDNEQKQLFVEQHKHYLDEIIEQISEFSKRVILADANLDKVLSAYNKHRDKPIREQAENIIHLFTLTNLGAPAAFKYFDTTIDRKRYTSTKEVLDATLIHQSITGLYETRIDLSQLGGDGGGGGEAAAKPAPGGTLNIEDEHRLHETSKEPDVSLGSTWLSDFPQAWAETGGMGLAVRQAPLIIPLKATSTPVSIKQYPMSQEARLGIKPHIQRLLDQGILVPCQSPWNTPLLPVKKPGTNDYRPVQDLREVNKRVEDIHPTVPNPYNLLSGLPPSHQWYTVLDLKDAFFCLRLHPTSQPLFAFEWRDPEMGISGQLTWTRLPQGFKNSPTLFNEALHRDLADFRIQHPDLILLQYVDDLLLAATSELDCQQGTRALLQTLGNLGYRASAKKAQICQKQVKYLGYLLKEGQRWLTEARKETVMGQPTPKTPRQLREFLGKAGFCRLFIPGFAEMAAPLYPLTKPGTLFNWGPDQQKAYQEIKQALLTAPALGLPDLTKPFELFVDEKQGYAKGVLTQKLGPWRRPVAYLSKKLDPVAAGWPPCLRMVAAIAVLTKDAGKLTMGQPLVILAPHAVEALVKQPPDRWLSNARMTHYQALLLDTDRVQFGPVVALNPATLLPLPEEGLQHNCLDILAEAHGTRPDLTDQPLPDADHTWYTDGSSLLQEGQRKAGAAVTTETEVIWAKALPAGTSAQRAELIALTQALKMAEGKKLNVYTDSRYAFATAHIHGEIYRRRGWLTSEGKEIKNKDEILALLKALFLPKRLSIIHCPGHQKGHSAEARGNRMADQAARKAAITETPDTSTLLAGKRTADGSEFEKRTADGSEFESPKKKAKVE

SEQ ID NO: 2831 - protein, 2096 aa, synthetic construct
MPAAKRVKLDGGDKKYSIGLDIGTNSVGWAVITDEYKVPSKKFKVLGNTDRHSIKKNLIGALLFDSGETAEATRLKRTARRRYTRRKNRICYLQEIFSNEMAKVDDSFFHRLEESFLVEEDKKHERHPIFGNIVDEVAYHEKYPTIYHLRKKLVDSTDKADLRLIYLALAHMIKFRGHFLIEGDLNPDNSDVDKLFIQLVQTYNQLFEENPINASGVDAKAILSARLSKSRRLENLIAQLPGEKKNGLFGNLIALSLGLTPNFKSNFDLAEDAKLQLSKDTYDDDLDNLLAQIGDQYADLFLAAKNLSDAILLSDILRVNTEITKAPLSASMIKRYDEHHQDLTLLKALVRQQLPEKYKEIFFDQSKNGYAGYIDGGASQEEFYKFIKPILEKMDGTEELLVKLNREDLLRKQRTFDNGSIPHQIHLGELHAILRRQEDFYPFLKDNREKIEKILTFRIPYYVGPLARGNSRFAWMTRKSEETITPWNFEEVVDKGASAQSFIERMTNFDKNLPNEKVLPKHSLLYEYFTVYNELTKVKYVTEGMRKPAFLSGEQKKAIVDLLFKTNRKVTVKQLKEDYFKKIECFDSVEISGVEDRFNASLGTYHDLLKIIKDKDFLDNEENEDILEDIVLTLTLFEDREMIEERLKTYAHLFDDKVMKQLKRRRYTGWGRLSRKLINGIRDKQSGKTILDFLKSDGFANRNFMQLIHDDSLTFKEDIQKAQVSGQGDSLHEHIANLAGSPAIKKGILQTVKVVDELVKVMGRHKPENIVIEMARENQTTQKGQKNSRERMKRIEEGIKELGSQILKEHPVENTQLQNEKLYLYYLQNGRDMYVDQELDINRLSDYDVDHIVPQSFLKDDSIDNKVLTRSDKARGKSDNVPSEEVVKKMKNYWRQLLNAKLITQRKFDNLTKAERGGLSELDKAGFIKRQLVETRQITKHVAQILDSRMNTKYDENDKLIREVKVITLKSKLVSDFRKDFQFYKVREINNYHHAHDAYLNAVVGTALIKKYPKLESEFVYGDYKVYDVRKMIAKSEQEIGKATAKYFFYSNIMNFFKTEITLANGEIRKRPLIETNGETGEIVWDKGRDFATVRKVLSMPQVNIVKKTEVQTGGFSKESILPKRNSDKLIARKKDWDPKKYGGFDSPTVAYSVLVVAKVEKGKSKKLKSVKELLGITIMERSSFEKNPIDFLEAKGYKEVKKDLIIKLPKYSLFELENGRKRMLASAGELQKGNELALPSKYVNFLYLASHYEKLKGSPEDNEQKQLFVEQHKHYLDEIIEQISEFSKRVILADANLDKVLSAYNKHRDKPIREQAENIIHLFTLTNLGAPAAFKYFDTTIDRKRYTSTKEVLDATLIHQSITGLYETRIDLSQLGGDGGGGGGSSEAAAKGGTLNIEDEHRLHETSKEPDVSLGSTWLSDFPQAWAETGGMGLAVRQAPLIIPLKATSTPVSIKQYPMSQEARLGIKPHIQRLLDQGILVPCQSPWNTPLLPVKKPGTNDYRPVQDLREVNKRVEDIHPTVPNPYNLLSGLPPSHQWYTVLDLKDAFFCLRLHPTSQPLFAFEWRDPEMGISGQLTWTRLPQGFKNSPTLFNEALHRDLADFRIQHPDLILLQYVDDLLLAATSELDCQQGTRALLQTLGNLGYRASAKKAQICQKQVKYLGYLLKEGQRWLTEARKETVMGQPTPKTPRQLREFLGKAGFCRLFIPGFAEMAAPLYPLTKPGTLFNWGPDQQKAYQEIKQALLTAPALGLPDLTKPFELFVDEKQGYAKGVLTQKLGPWRRPVAYLSKKLDPVAAGWPPCLRMVAAIAVLTKDAGKLTMGQPLVILAPHAVEALVKQPPDRWLSNARMTHYQALLLDTDRVQFGPVVALNPATLLPLPEEGLQHNCLDILAEAHGTRPDLTDQPLPDADHTWYTDGSSLLQEGQRKAGAAVTTETEVIWAKALPAGTSAQRAELIALTQALKMAEGKKLNVYTDSRYAFATAHIHGEIYRRRGWLTSEGKEIKNKDEILALLKALFLPKRLSIIHCPGHQKGHSAEARGNRMADQAARKAAITETPDTSTLLAGKRTADGSEFEKRTADGSEFESPKKKAKVE

SEQ ID NO: 2832 - protein, 2091 aa, synthetic construct
MPAAKRVKLDGGDKKYSIGLDIGTNSVGWAVITDEYKVPSKKFKVLGNTDRHSIKKNLIGALLFDSGETAEATRLKRTARRRYTRRKNRICYLQEIFSNEMAKVDDSFFHRLEESFLVEEDKKHERHPIFGNIVDEVAYHEKYPTIYHLRKKLVDSTDKADLRLIYLALAHMIKFRGHFLIEGDLNPDNSDVDKLFIQLVQTYNQLFEENPINASGVDAKAILSARLSKSRRLENLIAQLPGEKKNGLFGNLIALSLGLTPNFKSNFDLAEDAKLQLSKDTYDDDLDNLLAQIGDQYADLFLAAKNLSDAILLSDILRVNTEITKAPLSASMIKRYDEHHQDLTLLKALVRQQLPEKYKEIFFDQSKNGYAGYIDGGASQEEFYKFIKPILEKMDGTEELLVKLNREDLLRKQRTFDNGSIPHQIHLGELHAILRRQEDFYPFLKDNREKIEKILTFRIPYYVGPLARGNSRFAWMTRKSEETITPWNFEEVVDKGASAQSFIERMTNFDKNLPNEKVLPKHSLLYEYFTVYNELTKVKYVTEGMRKPAFLSGEQKKAIVDLLFKTNRKVTVKQLKEDYFKKIECFDSVEISGVEDRFNASLGTYHDLLKIIKDKDFLDNEENEDILEDIVLTLTLFEDREMIEERLKTYAHLFDDKVMKQLKRRRYTGWGRLSRKLINGIRDKQSGKTILDFLKSDGFANRNFMQLIHDDSLTFKEDIQKAQVSGQGDSLHEHIANLAGSPAIKKGILQTVKVVDELVKVMGRHKPENIVIEMARENQTTQKGQKNSRERMKRIEEGIKELGSQILKEHPVENTQLQNEKLYLYYLQNGRDMYVDQELDINRLSDYDVDHIVPQSFLKDDSIDNKVLTRSDKARGKSDNVPSEEVVKKMKNYWRQLLNAKLITQRKFDNLTKAERGGLSELDKAGFIKRQLVETRQITKHVAQILDSRMNTKYDENDKLIREVKVITLKSKLVSDFRKDFQFYKVREINNYHHAHDAYLNAVVGTALIKKYPKLESEFVYGDYKVYDVRKMIAKSEQEIGKATAKYFFYSNIMNFFKTEITLANGEIRKRPLIETNGETGEIVWDKGRDFATVRKVLSMPQVNIVKKTEVQTGGFSKESILPKRNSDKLIARKKDWDPKKYGGFDSPTVAYSVLVVAKVEKGKSKKLKSVKELLGITIMERSSFEKNPIDFLEAKGYKEVKKDLIIKLPKYSLFELENGRKRMLASAGELQKGNELALPSKYVNFLYLASHYEKLKGSPEDNEQKQLFVEQHKHYLDEIIEQISEFSKRVILADANLDKVLSAYNKHRDKPIREQAENIIHLFTLTNLGAPAAFKYFDTTIDRKRYTSTKEVLDATLIHQSITGLYETRIDLSQLGGDGGGSSGSSGGTLNIEDEHRLHETSKEPDVSLGSTWLSDFPQAWAETGGMGLAVRQAPLIIPLKATSTPVSIKQYPMSQEARLGIKPHIQRLLDQGILVPCQSPWNTPLLPVKKPGTNDYRPVQDLREVNKRVEDIHPTVPNPYNLLSGLPPSHQWYTVLDLKDAFFCLRLHPTSQPLFAFEWRDPEMGISGQLTWTRLPQGFKNSPTLFNEALHRDLADFRIQHPDLILLQYVDDLLLAATSELDCQQGTRALLQTLGNLGYRASAKKAQICQKQVKYLGYLLKEGQRWLTEARKETVMGQPTPKTPRQLREFLGKAGFCRLFIPGFAEMAAPLYPLTKPGTLFNWGPDQQKAYQEIKQALLTAPALGLPDLTKPFELFVDEKQGYAKGVLTQKLGPWRRPVAYLSKKLDPVAAGWPPCLRMVAAIAVLTKDAGKLTMGQPLVILAPHAVEALVKQPPDRWLSNARMTHYQALLLDTDRVQFGPVVALNPATLLPLPEEGLQHNCLDILAEAHGTRPDLTDQPLPDADHTWYTDGSSLLQEGQRKAGAAVTTETEVIWAKALPAGTSAQRAELIALTQALKMAEGKKLNVYTDSRYAFATAHIHGEIYRRRGWLTSEGKEIKNKDEILALLKALFLPKRLSIIHCPGHQKGHSAEARGNRMADQAARKAAITETPDTSTLLAGKRTADGSEFEKRTADGSEFESPKKKAKVE

SEQ ID NO: 2833 - protein, 2094 aa, synthetic construct
MPAAKRVKLDGGDKKYSIGLDIGTNSVGWAVITDEYKVPSKKFKVLGNTDRHSIKKNLIGALLFDSGETAEATRLKRTARRRYTRRKNRICYLQEIFSNEMAKVDDSFFHRLEESFLVEEDKKHERHPIFGNIVDEVAYHEKYPTIYHLRKKLVDSTDKADLRLIYLALAHMIKFRGHFLIEGDLNPDNSDVDKLFIQLVQTYNQLFEENPINASGVDAKAILSARLSKSRRLENLIAQLPGEKKNGLFGNLIALSLGLTPNFKSNFDLAEDAKLQLSKDTYDDDLDNLLAQIGDQYADLFLAAKNLSDAILLSDILRVNTEITKAPLSASMIKRYDEHHQDLTLLKALVRQQLPEKYKEIFFDQSKNGYAGYIDGGASQEEFYKFIKPILEKMDGTEELLVKLNREDLLRKQRTFDNGSIPHQIHLGELHAILRRQEDFYPFLKDNREKIEKILTFRIPYYVGPLARGNSRFAWMTRKSEETITPWNFEEVVDKGASAQSFIERMTNFDKNLPNEKVLPKHSLLYEYFTVYNELTKVKYVTEGMRKPAFLSGEQKKAIVDLLFKTNRKVTVKQLKEDYFKKIECFDSVEISGVEDRFNASLGTYHDLLKIIKDKDFLDNEENEDILEDIVLTLTLFEDREMIEERLKTYAHLFDDKVMKQLKRRRYTGWGRLSRKLINGIRDKQSGKTILDFLKSDGFANRNFMQLIHDDSLTFKEDIQKAQVSGQGDSLHEHIANLAGSPAIKKGILQTVKVVDELVKVMGRHKPENIVIEMARENQTTQKGQKNSRERMKRIEEGIKELGSQILKEHPVENTQLQNEKLYLYYLQNGRDMYVDQELDINRLSDYDVDHIVPQSFLKDDSIDNKVLTRSDKARGKSDNVPSEEVVKKMKNYWRQLLNAKLITQRKFDNLTKAERGGLSELDKAGFIKRQLVETRQITKHVAQILDSRMNTKYDENDKLIREVKVITLKSKLVSDFRKDFQFYKVREINNYHHAHDAYLNAVVGTALIKKYPKLESEFVYGDYKVYDVRKMIAKSEQEIGKATAKYFFYSNIMNFFKTEITLANGEIRKRPLIETNGETGEIVWDKGRDFATVRKVLSMPQVNIVKKTEVQTGGFSKESILPKRNSDKLIARKKDWDPKKYGGFDSPTVAYSVLVVAKVEKGKSKKLKSVKELLGITIMERSSFEKNPIDFLEAKGYKEVKKDLIIKLPKYSLFELENGRKRMLASAGELQKGNELALPSKYVNFLYLASHYEKLKGSPEDNEQKQLFVEQHKHYLDEIIEQISEFSKRVILADANLDKVLSAYNKHRDKPIREQAENIIHLFTLTNLGAPAAFKYFDTTIDRKRYTSTKEVLDATLIHQSITGLYETRIDLSQLGGDGGPAPGGSGGGGGTLNIEDEHRLHETSKEPDVSLGSTWLSDFPQAWAETGGMGLAVRQAPLIIPLKATSTPVSIKQYPMSQEARLGIKPHIQRLLDQGILVPCQSPWNTPLLPVKKPGTNDYRPVQDLREVNKRVEDIHPTVPNPYNLLSGLPPSHQWYTVLDLKDAFFCLRLHPTSQPLFAFEWRDPEMGISGQLTWTRLPQGFKNSPTLFNEALHRDLADFRIQHPDLILLQYVDDLLLAATSELDCQQGTRALLQTLGNLGYRASAKKAQICQKQVKYLGYLLKEGQRWLTEARKETVMGQPTPKTPRQLREFLGKAGFCRLFIPGFAEMAAPLYPLTKPGTLFNWGPDQQKAYQEIKQALLTAPALGLPDLTKPFELFVDEKQGYAKGVLTQKLGPWRRPVAYLSKKLDPVAAGWPPCLRMVAAIAVLTKDAGKLTMGQPLVILAPHAVEALVKQPPDRWLSNARMTHYQALLLDTDRVQFGPVVALNPATLLPLPEEGLQHNCLDILAEAHGTRPDLTDQPLPDADHTWYTDGSSLLQEGQRKAGAAVTTETEVIWAKALPAGTSAQRAELIALTQALKMAEGKKLNVYTDSRYAFATAHIHGEIYRRRGWLTSEGKEIKNKDEILALLKALFLPKRLSIIHCPGHQKGHSAEARGNRMADQAARKAAITETPDTSTLLAGKRTADGSEFEKRTADGSEFESPKKKAKVE

SEQ ID NO: 2834 - protein, 2090 aa, synthetic construct
MPAAKRVKLDGGDKKYSIGLDIGTNSVGWAVITDEYKVPSKKFKVLGNTDRHSIKKNLIGALLFDSGETAEATRLKRTARRRYTRRKNRICYLQEIFSNEMAKVDDSFFHRLEESFLVEEDKKHERHPIFGNIVDEVAYHEKYPTIYHLRKKLVDSTDKADLRLIYLALAHMIKFRGHFLIEGDLNPDNSDVDKLFIQLVQTYNQLFEENPINASGVDAKAILSARLSKSRRLENLIAQLPGEKKNGLFGNLIALSLGLTPNFKSNFDLAEDAKLQLSKDTYDDDLDNLLAQIGDQYADLFLAAKNLSDAILLSDILRVNTEITKAPLSASMIKRYDEHHQDLTLLKALVRQQLPEKYKEIFFDQSKNGYAGYIDGGASQEEFYKFIKPILEKMDGTEELLVKLNREDLLRKQRTFDNGSIPHQIHLGELHAILRRQEDFYPFLKDNREKIEKILTFRIPYYVGPLARGNSRFAWMTRKSEETITPWNFEEVVDKGASAQSFIERMTNFDKNLPNEKVLPKHSLLYEYFTVYNELTKVKYVTEGMRKPAFLSGEQKKAIVDLLFKTNRKVTVKQLKEDYFKKIECFDSVEISGVEDRFNASLGTYHDLLKIIKDKDFLDNEENEDILEDIVLTLTLFEDREMIEERLKTYAHLFDDKVMKQLKRRRYTGWGRLSRKLINGIRDKQSGKTILDFLKSDGFANRNFMQLIHDDSLTFKEDIQKAQVSGQGDSLHEHIANLAGSPAIKKGILQTVKVVDELVKVMGRHKPENIVIEMARENQTTQKGQKNSRERMKRIEEGIKELGSQILKEHPVENTQLQNEKLYLYYLQNGRDMYVDQELDINRLSDYDVDHIVPQSFLKDDSIDNKVLTRSDKARGKSDNVPSEEVVKKMKNYWRQLLNAKLITQRKFDNLTKAERGGLSELDKAGFIKRQLVETRQITKHVAQILDSRMNTKYDENDKLIREVKVITLKSKLVSDFRKDFQFYKVREINNYHHAHDAYLNAVVGTALIKKYPKLESEFVYGDYKVYDVRKMIAKSEQEIGKATAKYFFYSNIMNFFKTEITLANGEIRKRPLIETNGETGEIVWDKGRDFATVRKVLSMPQVNIVKKTEVQTGGFSKESILPKRNSDKLIARKKDWDPKKYGGFDSPTVAYSVLVVAKVEKGKSKKLKSVKELLGITIMERSSFEKNPIDFLEAKGYKEVKKDLIIKLPKYSLFELENGRKRMLASAGELQKGNELALPSKYVNFLYLASHYEKLKGSPEDNEQKQLFVEQHKHYLDEIIEQISEFSKRVILADANLDKVLSAYNKHRDKPIREQAENIIHLFTLTNLGAPAAFKYFDTTIDRKRYTSTKEVLDATLIHQSITGLYETRIDLSQLGGDGGGGGGGGGTLNIEDEHRLHETSKEPDVSLGSTWLSDFPQAWAETGGMGLAVRQAPLIIPLKATSTPVSIKQYPMSQEARLGIKPHIQRLLDQGILVPCQSPWNTPLLPVKKPGTNDYRPVQDLREVNKRVEDIHPTVPNPYNLLSGLPPSHQWYTVLDLKDAFFCLRLHPTSQPLFAFEWRDPEMGISGQLTWTRLPQGFKNSPTLFNEALHRDLADFRIQHPDLILLQYVDDLLLAATSELDCQQGTRALLQTLGNLGYRASAKKAQICQKQVKYLGYLLKEGQRWLTEARKETVMGQPTPKTPRQLREFLGKAGFCRLFIPGFAEMAAPLYPLTKPGTLFNWGPDQQKAYQEIKQALLTAPALGLPDLTKPFELFVDEKQGYAKGVLTQKLGPWRRPVAYLSKKLDPVAAGWPPCLRMVAAIAVLTKDAGKLTMGQPLVILAPHAVEALVKQPPDRWLSNARMTHYQALLLDTDRVQFGPVVALNPATLLPLPEEGLQHNCLDILAEAHGTRPDLTDQPLPDADHTWYTDGSSLLQEGQRKAGAAVTTETEVIWAKALPAGTSAQRAELIALTQALKMAEGKKLNVYTDSRYAFATAHIHGEIYRRRGWLTSEGKEIKNKDEILALLKALFLPKRLSIIHCPGHQKGHSAEARGNRMADQAARKAAITETPDTSTLLAGKRTADGSEFEKRTADGSEFESPKKKAKVE

SEQ ID NO: 2835 - protein, 2094 aa, synthetic construct
MPAAKRVKLDGGDKKYSIGLDIGTNSVGWAVITDEYKVPSKKFKVLGNTDRHSIKKNLIGALLFDSGETAEATRLKRTARRRYTRRKNRICYLQEIFSNEMAKVDDSFFHRLEESFLVEEDKKHERHPIFGNIVDEVAYHEKYPTIYHLRKKLVDSTDKADLRLIYLALAHMIKFRGHFLIEGDLNPDNSDVDKLFIQLVQTYNQLFEENPINASGVDAKAILSARLSKSRRLENLIAQLPGEKKNGLFGNLIALSLGLTPNFKSNFDLAEDAKLQLSKDTYDDDLDNLLAQIGDQYADLFLAAKNLSDAILLSDILRVNTEITKAPLSASMIKRYDEHHQDLTLLKALVRQQLPEKYKEIFFDQSKNGYAGYIDGGASQEEFYKFIKPILEKMDGTEELLVKLNREDLLRKQRTFDNGSIPHQIHLGELHAILRRQEDFYPFLKDNREKIEKILTFRIPYYVGPLARGNSRFAWMTRKSEETITPWNFEEVVDKGASAQSFIERMTNFDKNLPNEKVLPKHSLLYEYFTVYNELTKVKYVTEGMRKPAFLSGEQKKAIVDLLFKTNRKVTVKQLKEDYFKKIECFDSVEISGVEDRFNASLGTYHDLLKIIKDKDFLDNEENEDILEDIVLTLTLFEDREMIEERLKTYAHLFDDKVMKQLKRRRYTGWGRLSRKLINGIRDKQSGKTILDFLKSDGFANRNFMQLIHDDSLTFKEDIQKAQVSGQGDSLHEHIANLAGSPAIKKGILQTVKVVDELVKVMGRHKPENIVIEMARENQTTQKGQKNSRERMKRIEEGIKELGSQILKEHPVENTQLQNEKLYLYYLQNGRDMYVDQELDINRLSDYDVDHIVPQSFLKDDSIDNKVLTRSDKARGKSDNVPSEEVVKKMKNYWRQLLNAKLITQRKFDNLTKAERGGLSELDKAGFIKRQLVETRQITKHVAQILDSRMNTKYDENDKLIREVKVITLKSKLVSDFRKDFQFYKVREINNYHHAHDAYLNAVVGTALIKKYPKLESEFVYGDYKVYDVRKMIAKSEQEIGKATAKYFFYSNIMNFFKTEITLANGEIRKRPLIETNGETGEIVWDKGRDFATVRKVLSMPQVNIVKKTEVQTGGFSKESILPKRNSDKLIARKKDWDPKKYGGFDSPTVAYSVLVVAKVEKGKSKKLKSVKELLGITIMERSSFEKNPIDFLEAKGYKEVKKDLIIKLPKYSLFELENGRKRMLASAGELQKGNELALPSKYVNFLYLASHYEKLKGSPEDNEQKQLFVEQHKHYLDEIIEQISEFSKRVILADANLDKVLSAYNKHRDKPIREQAENIIHLFTLTNLGAPAAFKYFDTTIDRKRYTSTKEVLDATLIHQSITGLYETRIDLSQLGGDGGGSSPAPGGGGGTLNIEDEHRLHETSKEPDVSLGSTWLSDFPQAWAETGGMGLAVRQAPLIIPLKATSTPVSIKQYPMSQEARLGIKPHIQRLLDQGILVPCQSPWNTPLLPVKKPGTNDYRPVQDLREVNKRVEDIHPTVPNPYNLLSGLPPSHQWYTVLDLKDAFFCLRLHPTSQPLFAFEWRDPEMGISGQLTWTRLPQGFKNSPTLFNEALHRDLADFRIQHPDLILLQYVDDLLLAATSELDCQQGTRALLQTLGNLGYRASAKKAQICQKQVKYLGYLLKEGQRWLTEARKETVMGQPTPKTPRQLREFLGKAGFCRLFIPGFAEMAAPLYPLTKPGTLFNWGPDQQKAYQEIKQALLTAPALGLPDLTKPFELFVDEKQGYAKGVLTQKLGPWRRPVAYLSKKLDPVAAGWPPCLRMVAAIAVLTKDAGKLTMGQPLVILAPHAVEALVKQPPDRWLSNARMTHYQALLLDTDRVQFGPVVALNPATLLPLPEEGLQHNCLDILAEAHGTRPDLTDQPLPDADHTWYTDGSSLLQEGQRKAGAAVTTETEVIWAKALPAGTSAQRAELIALTQALKMAEGKKLNVYTDSRYAFATAHIHGEIYRRRGWLTSEGKEIKNKDEILALLKALFLPKRLSIIHCPGHQKGHSAEARGNRMADQAARKAAITETPDTSTLLAGKRTADGSEFEKRTADGSEFESPKKKAKVE

SEQ ID NO: 2836 - protein, 2100 aa, synthetic construct
MPAAKRVKLDGGDKKYSIGLDIGTNSVGWAVITDEYKVPSKKFKVLGNTDRHSIKKNLIGALLFDSGETAEATRLKRTARRRYTRRKNRICYLQEIFSNEMAKVDDSFFHRLEESFLVEEDKKHERHPIFGNIVDEVAYHEKYPTIYHLRKKLVDSTDKADLRLIYLALAHMIKFRGHFLIEGDLNPDNSDVDKLFIQLVQTYNQLFEENPINASGVDAKAILSARLSKSRRLENLIAQLPGEKKNGLFGNLIALSLGLTPNFKSNFDLAEDAKLQLSKDTYDDDLDNLLAQIGDQYADLFLAAKNLSDAILLSDILRVNTEITKAPLSASMIKRYDEHHQDLTLLKALVRQQLPEKYKEIFFDQSKNGYAGYIDGGASQEEFYKFIKPILEKMDGTEELLVKLNREDLLRKQRTFDNGSIPHQIHLGELHAILRRQEDFYPFLKDNREKIEKILTFRIPYYVGPLARGNSRFAWMTRKSEETITPWNFEEVVDKGASAQSFIERMTNFDKNLPNEKVLPKHSLLYEYFTVYNELTKVKYVTEGMRKPAFLSGEQKKAIVDLLFKTNRKVTVKQLKEDYFKKIECFDSVEISGVEDRFNASLGTYHDLLKIIKDKDFLDNEENEDILEDIVLTLTLFEDREMIEERLKTYAHLFDDKVMKQLKRRRYTGWGRLSRKLINGIRDKQSGKTILDFLKSDGFANRNFMQLIHDDSLTFKEDIQKAQVSGQGDSLHEHIANLAGSPAIKKGILQTVKVVDELVKVMGRHKPENIVIEMARENQTTQKGQKNSRERMKRIEEGIKELGSQILKEHPVENTQLQNEKLYLYYLQNGRDMYVDQELDINRLSDYDVDHIVPQSFLKDDSIDNKVLTRSDKARGKSDNVPSEEVVKKMKNYWRQLLNAKLITQRKFDNLTKAERGGLSELDKAGFIKRQLVETRQITKHVAQILDSRMNTKYDENDKLIREVKVITLKSKLVSDFRKDFQFYKVREINNYHHAHDAYLNAVVGTALIKKYPKLESEFVYGDYKVYDVRKMIAKSEQEIGKATAKYFFYSNIMNFFKTEITLANGEIRKRPLIETNGETGEIVWDKGRDFATVRKVLSMPQVNIVKKTEVQTGGFSKESILPKRNSDKLIARKKDWDPKKYGGFDSPTVAYSVLVVAKVEKGKSKKLKSVKELLGITIMERSSFEKNPIDFLEAKGYKEVKKDLIIKLPKYSLFELENGRKRMLASAGELQKGNELALPSKYVNFLYLASHYEKLKGSPEDNEQKQLFVEQHKHYLDEIIEQISEFSKRVILADANLDKVLSAYNKHRDKPIREQAENIIHLFTLTNLGAPAAFKYFDTTIDRKRYTSTKEVLDATLIHQSITGLYETRIDLSQLGGDGGGGGGSEAAAKGGGGSGGTLNIEDEHRLHETSKEPDVSLGSTWLSDFPQAWAETGGMGLAVRQAPLIIPLKATSTPVSIKQYPMSQEARLGIKPHIQRLLDQGILVPCQSPWNTPLLPVKKPGTNDYRPVQDLREVNKRVEDIHPTVPNPYNLLSGLPPSHQWYTVLDLKDAFFCLRLHPTSQPLFAFEWRDPEMGISGQLTWTRLPQGFKNSPTLFNEALHRDLADFRIQHPDLILLQYVDDLLLAATSELDCQQGTRALLQTLGNLGYRASAKKAQICQKQVKYLGYLLKEGQRWLTEARKETVMGQPTPKTPRQLREFLGKAGFCRLFIPGFAEMAAPLYPLTKPGTLFNWGPDQQKAYQEIKQALLTAPALGLPDLTKPFELFVDEKQGYAKGVLTQKLGPWRRPVAYLSKKLDPVAAGWPPCLRMVAAIAVLTKDAGKLTMGQPLVILAPHAVEALVKQPPDRWLSNARMTHYQALLLDTDRVQFGPVVALNPATLLPLPEEGLQHNCLDILAEAHGTRPDLTDQPLPDADHTWYTDGSSLLQEGQRKAGAAVTTETEVIWAKALPAGTSAQRAELIALTQALKMAEGKKLNVYTDSRYAFATAHIHGEIYRRRGWLTSEGKEIKNKDEILALLKALFLPKRLSIIHCPGHQKGHSAEARGNRMADQAARKAAITETPDTSTLLAGKRTADGSEFEKRTADGSEFESPKKKAKVE

SEQ ID NO: 2837 - protein, 2091 aa, synthetic construct
MPAAKRVKLDGGDKKYSIGLDIGTNSVGWAVITDEYKVPSKKFKVLGNTDRHSIKKNLIGALLFDSGETAEATRLKRTARRRYTRRKNRICYLQEIFSNEMAKVDDSFFHRLEESFLVEEDKKHERHPIFGNIVDEVAYHEKYPTIYHLRKKLVDSTDKADLRLIYLALAHMIKFRGHFLIEGDLNPDNSDVDKLFIQLVQTYNQLFEENPINASGVDAKAILSARLSKSRRLENLIAQLPGEKKNGLFGNLIALSLGLTPNFKSNFDLAEDAKLQLSKDTYDDDLDNLLAQIGDQYADLFLAAKNLSDAILLSDILRVNTEITKAPLSASMIKRYDEHHQDLTLLKALVRQQLPEKYKEIFFDQSKNGYAGYIDGGASQEEFYKFIKPILEKMDGTEELLVKLNREDLLRKQRTFDNGSIPHQIHLGELHAILRRQEDFYPFLKDNREKIEKILTFRIPYYVGPLARGNSRFAWMTRKSEETITPWNFEEVVDKGASAQSFIERMTNFDKNLPNEKVLPKHSLLYEYFTVYNELTKVKYVTEGMRKPAFLSGEQKKAIVDLLFKTNRKVTVKQLKEDYFKKIECFDSVEISGVEDRFNASLGTYHDLLKIIKDKDFLDNEENEDILEDIVLTLTLFEDREMIEERLKTYAHLFDDKVMKQLKRRRYTGWGRLSRKLINGIRDKQSGKTILDFLKSDGFANRNFMQLIHDDSLTFKEDIQKAQVSGQGDSLHEHIANLAGSPAIKKGILQTVKVVDELVKVMGRHKPENIVIEMARENQTTQKGQKNSRERMKRIEEGIKELGSQILKEHPVENTQLQNEKLYLYYLQNGRDMYVDQELDINRLSDYDVDHIVPQSFLKDDSIDNKVLTRSDKARGKSDNVPSEEVVKKMKNYWRQLLNAKLITQRKFDNLTKAERGGLSELDKAGFIKRQLVETRQITKHVAQILDSRMNTKYDENDKLIREVKVITLKSKLVSDFRKDFQFYKVREINNYHHAHDAYLNAVVGTALIKKYPKLESEFVYGDYKVYDVRKMIAKSEQEIGKATAKYFFYSNIMNFFKTEITLANGEIRKRPLIETNGETGEIVWDKGRDFATVRKVLSMPQVNIVKKTEVQTGGFSKESILPKRNSDKLIARKKDWDPKKYGGFDSPTVAYSVLVVAKVEKGKSKKLKSVKELLGITIMERSSFEKNPIDFLEAKGYKEVKKDLIIKLPKYSLFELENGRKRMLASAGELQKGNELALPSKYVNFLYLASHYEKLKGSPEDNEQKQLFVEQHKHYLDEIIEQISEFSKRVILADANLDKVLSAYNKHRDKPIREQAENIIHLFTLTNLGAPAAFKYFDTTIDRKRYTSTKEVLDATLIHQSITGLYETRIDLSQLGGDGGPAPGGGGGTLNIEDEHRLHETSKEPDVSLGSTWLSDFPQAWAETGGMGLAVRQAPLIIPLKATSTPVSIKQYPMSQEARLGIKPHIQRLLDQGILVPCQSPWNTPLLPVKKPGTNDYRPVQDLREVNKRVEDIHPTVPNPYNLLSGLPPSHQWYTVLDLKDAFFCLRLHPTSQPLFAFEWRDPEMGISGQLTWTRLPQGFKNSPTLFNEALHRDLADFRIQHPDLILLQYVDDLLLAATSELDCQQGTRALLQTLGNLGYRASAKKAQICQKQVKYLGYLLKEGQRWLTEARKETVMGQPTPKTPRQLREFLGKAGFCRLFIPGFAEMAAPLYPLTKPGTLFNWGPDQQKAYQEIKQALLTAPALGLPDLTKPFELFVDEKQGYAKGVLTQKLGPWRRPVAYLSKKLDPVAAGWPPCLRMVAAIAVLTKDAGKLTMGQPLVILAPHAVEALVKQPPDRWLSNARMTHYQALLLDTDRVQFGPVVALNPATLLPLPEEGLQHNCLDILAEAHGTRPDLTDQPLPDADHTWYTDGSSLLQEGQRKAGAAVTTETEVIWAKALPAGTSAQRAELIALTQALKMAEGKKLNVYTDSRYAFATAHIHGEIYRRRGWLTSEGKEIKNKDEILALLKALFLPKRLSIIHCPGHQKGHSAEARGNRMADQAARKAAITETPDTSTLLAGKRTADGSEFEKRTADGSEFESPKKKAKVE

SEQ ID NO: 2838 - protein, 2096 aa, synthetic construct
MPAAKRVKLDGGDKKYSIGLDIGTNSVGWAVITDEYKVPSKKFKVLGNTDRHSIKKNLIGALLFDSGETAEATRLKRTARRRYTRRKNRICYLQEIFSNEMAKVDDSFFHRLEESFLVEEDKKHERHPIFGNIVDEVAYHEKYPTIYHLRKKLVDSTDKADLRLIYLALAHMIKFRGHFLIEGDLNPDNSDVDKLFIQLVQTYNQLFEENPINASGVDAKAILSARLSKSRRLENLIAQLPGEKKNGLFGNLIALSLGLTPNFKSNFDLAEDAKLQLSKDTYDDDLDNLLAQIGDQYADLFLAAKNLSDAILLSDILRVNTEITKAPLSASMIKRYDEHHQDLTLLKALVRQQLPEKYKEIFFDQSKNGYAGYIDGGASQEEFYKFIKPILEKMDGTEELLVKLNREDLLRKQRTFDNGSIPHQIHLGELHAILRRQEDFYPFLKDNREKIEKILTFRIPYYVGPLARGNSRFAWMTRKSEETITPWNFEEVVDKGASAQSFIERMTNFDKNLPNEKVLPKHSLLYEYFTVYNELTKVKYVTEGMRKPAFLSGEQKKAIVDLLFKTNRKVTVKQLKEDYFKKIECFDSVEISGVEDRFNASLGTYHDLLKIIKDKDFLDNEENEDILEDIVLTLTLFEDREMIEERLKTYAHLFDDKVMKQLKRRRYTGWGRLSRKLINGIRDKQSGKTILDFLKSDGFANRNFMQLIHDDSLTFKEDIQKAQVSGQGDSLHEHIANLAGSPAIKKGILQTVKVVDELVKVMGRHKPENIVIEMARENQTTQKGQKNSRERMKRIEEGIKELGSQILKEHPVENTQLQNEKLYLYYLQNGRDMYVDQELDINRLSDYDVDHIVPQSFLKDDSIDNKVLTRSDKARGKSDNVPSEEVVKKMKNYWRQLLNAKLITQRKFDNLTKAERGGLSELDKAGFIKRQLVETRQITKHVAQILDSRMNTKYDENDKLIREVKVITLKSKLVSDFRKDFQFYKVREINNYHHAHDAYLNAVVGTALIKKYPKLESEFVYGDYKVYDVRKMIAKSEQEIGKATAKYFFYSNIMNFFKTEITLANGEIRKRPLIETNGETGEIVWDKGRDFATVRKVLSMPQVNIVKKTEVQTGGFSKESILPKRNSDKLIARKKDWDPKKYGGFDSPTVAYSVLVVAKVEKGKSKKLKSVKELLGITIMERSSFEKNPIDFLEAKGYKEVKKDLIIKLPKYSLFELENGRKRMLASAGELQKGNELALPSKYVNFLYLASHYEKLKGSPEDNEQKQLFVEQHKHYLDEIIEQISEFSKRVILADANLDKVLSAYNKHRDKPIREQAENIIHLFTLTNLGAPAAFKYFDTTIDRKRYTSTKEVLDATLIHQSITGLYETRIDLSQLGGDGGEAAAKPAPGGGGGTLNIEDEHRLHETSKEPDVSLGSTWLSDFPQAWAETGGMGLAVRQAPLIIPLKATSTPVSIKQYPMSQEARLGIKPHIQRLLDQGILVPCQSPWNTPLLPVKKPGTNDYRPVQDLREVNKRVEDIHPTVPNPYNLLSGLPPSHQWYTVLDLKDAFFCLRLHPTSQPLFAFEWRDPEMGISGQLTWTRLPQGFKNSPTLFNEALHRDLADFRIQHPDLILLQYVDDLLLAATSELDCQQGTRALLQTLGNLGYRASAKKAQICQKQVKYLGYLLKEGQRWLTEARKETVMGQPTPKTPRQLREFLGKAGFCRLFIPGFAEMAAPLYPLTKPGTLFNWGPDQQKAYQEIKQALLTAPALGLPDLTKPFELFVDEKQGYAKGVLTQKLGPWRRPVAYLSKKLDPVAAGWPPCLRMVAAIAVLTKDAGKLTMGQPLVILAPHAVEALVKQPPDRWLSNARMTHYQALLLDTDRVQFGPVVALNPATLLPLPEEGLQHNCLDILAEAHGTRPDLTDQPLPDADHTWYTDGSSLLQEGQRKAGAAVTTETEVIWAKALPAGTSAQRAELIALTQALKMAEGKKLNVYTDSRYAFATAHIHGEIYRRRGWLTSEGKEIKNKDEILALLKALFLPKRLSIIHCPGHQKGHSAEARGNRMADQAARKAAITETPDTSTLLAGKRTADGSEFEKRTADGSEFESPKKKAKVE

SEQ ID NO: 2839 - protein, 2096 aa, synthetic construct
MPAAKRVKLDGGDKKYSIGLDIGTNSVGWAVITDEYKVPSKKFKVLGNTDRHSIKKNLIGALLFDSGETAEATRLKRTARRRYTRRKNRICYLQEIFSNEMAKVDDSFFHRLEESFLVEEDKKHERHPIFGNIVDEVAYHEKYPTIYHLRKKLVDSTDKADLRLIYLALAHMIKFRGHFLIEGDLNPDNSDVDKLFIQLVQTYNQLFEENPINASGVDAKAILSARLSKSRRLENLIAQLPGEKKNGLFGNLIALSLGLTPNFKSNFDLAEDAKLQLSKDTYDDDLDNLLAQIGDQYADLFLAAKNLSDAILLSDILRVNTEITKAPLSASMIKRYDEHHQDLTLLKALVRQQLPEKYKEIFFDQSKNGYAGYIDGGASQEEFYKFIKPILEKMDGTEELLVKLNREDLLRKQRTFDNGSIPHQIHLGELHAILRRQEDFYPFLKDNREKIEKILTFRIPYYVGPLARGNSRFAWMTRKSEETITPWNFEEVVDKGASAQSFIERMTNFDKNLPNEKVLPKHSLLYEYFTVYNELTKVKYVTEGMRKPAFLSGEQKKAIVDLLFKTNRKVTVKQLKEDYFKKIECFDSVEISGVEDRFNASLGTYHDLLKIIKDKDFLDNEENEDILEDIVLTLTLFEDREMIEERLKTYAHLFDDKVMKQLKRRRYTGWGRLSRKLINGIRDKQSGKTILDFLKSDGFANRNFMQLIHDDSLTFKEDIQKAQVSGQGDSLHEHIANLAGSPAIKKGILQTVKVVDELVKVMGRHKPENIVIEMARENQTTQKGQKNSRERMKRIEEGIKELGSQILKEHPVENTQLQNEKLYLYYLQNGRDMYVDQELDINRLSDYDVDHIVPQSFLKDDSIDNKVLTRSDKARGKSDNVPSEEVVKKMKNYWRQLLNAKLITQRKFDNLTKAERGGLSELDKAGFIKRQLVETRQITKHVAQILDSRMNTKYDENDKLIREVKVITLKSKLVSDFRKDFQFYKVREINNYHHAHDAYLNAVVGTALIKKYPKLESEFVYGDYKVYDVRKMIAKSEQEIGKATAKYFFYSNIMNFFKTEITLANGEIRKRPLIETNGETGEIVWDKGRDFATVRKVLSMPQVNIVKKTEVQTGGFSKESILPKRNSDKLIARKKDWDPKKYGGFDSPTVAYSVLVVAKVEKGKSKKLKSVKELLGITIMERSSFEKNPIDFLEAKGYKEVKKDLIIKLPKYSLFELENGRKRMLASAGELQKGNELALPSKYVNFLYLASHYEKLKGSPEDNEQKQLFVEQHKHYLDEIIEQISEFSKRVILADANLDKVLSAYNKHRDKPIREQAENIIHLFTLTNLGAPAAFKYFDTTIDRKRYTSTKEVLDATLIHQSITGLYETRIDLSQLGGDGGGSSPAPEAAAKGGTLNIEDEHRLHETSKEPDVSLGSTWLSDFPQAWAETGGMGLAVRQAPLIIPLKATSTPVSIKQYPMSQEARLGIKPHIQRLLDQGILVPCQSPWNTPLLPVKKPGTNDYRPVQDLREVNKRVEDIHPTVPNPYNLLSGLPPSHQWYTVLDLKDAFFCLRLHPTSQPLFAFEWRDPEMGISGQLTWTRLPQGFKNSPTLFNEALHRDLADFRIQHPDLILLQYVDDLLLAATSELDCQQGTRALLQTLGNLGYRASAKKAQICQKQVKYLGYLLKEGQRWLTEARKETVMGQPTPKTPRQLREFLGKAGFCRLFIPGFAEMAAPLYPLTKPGTLFNWGPDQQKAYQEIKQALLTAPALGLPDLTKPFELFVDEKQGYAKGVLTQKLGPWRRPVAYLSKKLDPVAAGWPPCLRMVAAIAVLTKDAGKLTMGQPLVILAPHAVEALVKQPPDRWLSNARMTHYQALLLDTDRVQFGPVVALNPATLLPLPEEGLQHNCLDILAEAHGTRPDLTDQPLPDADHTWYTDGSSLLQEGQRKAGAAVTTETEVIWAKALPAGTSAQRAELIALTQALKMAEGKKLNVYTDSRYAFATAHIHGEIYRRRGWLTSEGKEIKNKDEILALLKALFLPKRLSIIHCPGHQKGHSAEARGNRMADQAARKAAITETPDTSTLLAGKRTADGSEFEKRTADGSEFESPKKKAKVE

SEQ ID NO: 2840 - protein, 2094 aa, synthetic construct
MPAAKRVKLDGGDKKYSIGLDIGTNSVGWAVITDEYKVPSKKFKVLGNTDRHSIKKNLIGALLFDSGETAEATRLKRTARRRYTRRKNRICYLQEIFSNEMAKVDDSFFHRLEESFLVEEDKKHERHPIFGNIVDEVAYHEKYPTIYHLRKKLVDSTDKADLRLIYLALAHMIKFRGHFLIEGDLNPDNSDVDKLFIQLVQTYNQLFEENPINASGVDAKAILSARLSKSRRLENLIAQLPGEKKNGLFGNLIALSLGLTPNFKSNFDLAEDAKLQLSKDTYDDDLDNLLAQIGDQYADLFLAAKNLSDAILLSDILRVNTEITKAPLSASMIKRYDEHHQDLTLLKALVRQQLPEKYKEIFFDQSKNGYAGYIDGGASQEEFYKFIKPILEKMDGTEELLVKLNREDLLRKQRTFDNGSIPHQIHLGELHAILRRQEDFYPFLKDNREKIEKILTFRIPYYVGPLARGNSRFAWMTRKSEETITPWNFEEVVDKGASAQSFIERMTNFDKNLPNEKVLPKHSLLYEYFTVYNELTKVKYVTEGMRKPAFLSGEQKKAIVDLLFKTNRKVTVKQLKEDYFKKIECFDSVEISGVEDRFNASLGTYHDLLKIIKDKDFLDNEENEDILEDIVLTLTLFEDREMIEERLKTYAHLFDDKVMKQLKRRRYTGWGRLSRKLINGIRDKQSGKTILDFLKSDGFANRNFMQLIHDDSLTFKEDIQKAQVSGQGDSLHEHIANLAGSPAIKKGILQTVKVVDELVKVMGRHKPENIVIEMARENQTTQKGQKNSRERMKRIEEGIKELGSQILKEHPVENTQLQNEKLYLYYLQNGRDMYVDQELDINRLSDYDVDHIVPQSFLKDDSIDNKVLTRSDKARGKSDNVPSEEVVKKMKNYWRQLLNAKLITQRKFDNLTKAERGGLSELDKAGFIKRQLVETRQITKHVAQILDSRMNTKYDENDKLIREVKVITLKSKLVSDFRKDFQFYKVREINNYHHAHDAYLNAVVGTALIKKYPKLESEFVYGDYKVYDVRKMIAKSEQEIGKATAKYFFYSNIMNFFKTEITLANGEIRKRPLIETNGETGEIVWDKGRDFATVRKVLSMPQVNIVKKTEVQTGGFSKESILPKRNSDKLIARKKDWDPKKYGGFDSPTVAYSVLVVAKVEKGKSKKLKSVKELLGITIMERSSFEKNPIDFLEAKGYKEVKKDLIIKLPKYSLFELENGRKRMLASAGELQKGNELALPSKYVNFLYLASHYEKLKGSPEDNEQKQLFVEQHKHYLDEIIEQISEFSKRVILADANLDKVLSAYNKHRDKPIREQAENIIHLFTLTNLGAPAAFKYFDTTIDRKRYTSTKEVLDATLIHQSITGLYETRIDLSQLGGDGGGGGGGSPAPGGTLNIEDEHRLHETSKEPDVSLGSTWLSDFPQAWAETGGMGLAVRQAPLIIPLKATSTPVSIKQYPMSQEARLGIKPHIQRLLDQGILVPCQSPWNTPLLPVKKPGTNDYRPVQDLREVNKRVEDIHPTVPNPYNLLSGLPPSHQWYTVLDLKDAFFCLRLHPTSQPLFAFEWRDPEMGISGQLTWTRLPQGFKNSPTLFNEALHRDLADFRIQHPDLILLQYVDDLLLAATSELDCQQGTRALLQTLGNLGYRASAKKAQICQKQVKYLGYLLKEGQRWLTEARKETVMGQPTPKTPRQLREFLGKAGFCRLFIPGFAEMAAPLYPLTKPGTLFNWGPDQQKAYQEIKQALLTAPALGLPDLTKPFELFVDEKQGYAKGVLTQKLGPWRRPVAYLSKKLDPVAAGWPPCLRMVAAIAVLTKDAGKLTMGQPLVILAPHAVEALVKQPPDRWLSNARMTHYQALLLDTDRVQFGPVVALNPATLLPLPEEGLQHNCLDILAEAHGTRPDLTDQPLPDADHTWYTDGSSLLQEGQRKAGAAVTTETEVIWAKALPAGTSAQRAELIALTQALKMAEGKKLNVYTDSRYAFATAHIHGEIYRRRGWLTSEGKEIKNKDEILALLKALFLPKRLSIIHCPGHQKGHSAEARGNRMADQAARKAAITETPDTSTLLAGKRTADGSEFEKRTADGSEFESPKKKAKVE

SEQ ID NO: 2841 - protein, 2094 aa, synthetic construct
MPAAKRVKLDGGDKKYSIGLDIGTNSVGWAVITDEYKVPSKKFKVLGNTDRHSIKKNLIGALLFDSGETAEATRLKRTARRRYTRRKNRICYLQEIFSNEMAKVDDSFFHRLEESFLVEEDKKHERHPIFGNIVDEVAYHEKYPTIYHLRKKLVDSTDKADLRLIYLALAHMIKFRGHFLIEGDLNPDNSDVDKLFIQLVQTYNQLFEENPINASGVDAKAILSARLSKSRRLENLIAQLPGEKKNGLFGNLIALSLGLTPNFKSNFDLAEDAKLQLSKDTYDDDLDNLLAQIGDQYADLFLAAKNLSDAILLSDILRVNTEITKAPLSASMIKRYDEHHQDLTLLKALVRQQLPEKYKEIFFDQSKNGYAGYIDGGASQEEFYKFIKPILEKMDGTEELLVKLNREDLLRKQRTFDNGSIPHQIHLGELHAILRRQEDFYPFLKDNREKIEKILTFRIPYYVGPLARGNSRFAWMTRKSEETITPWNFEEVVDKGASAQSFIERMTNFDKNLPNEKVLPKHSLLYEYFTVYNELTKVKYVTEGMRKPAFLSGEQKKAIVDLLFKTNRKVTVKQLKEDYFKKIECFDSVEISGVEDRFNASLGTYHDLLKIIKDKDFLDNEENEDILEDIVLTLTLFEDREMIEERLKTYAHLFDDKVMKQLKRRRYTGWGRLSRKLINGIRDKQSGKTILDFLKSDGFANRNFMQLIHDDSLTFKEDIQKAQVSGQGDSLHEHIANLAGSPAIKKGILQTVKVVDELVKVMGRHKPENIVIEMARENQTTQKGQKNSRERMKRIEEGIKELGSQILKEHPVENTQLQNEKLYLYYLQNGRDMYVDQELDINRLSDYDVDHIVPQSFLKDDSIDNKVLTRSDKARGKSDNVPSEEVVKKMKNYWRQLLNAKLITQRKFDNLTKAERGGLSELDKAGFIKRQLVETRQITKHVAQILDSRMNTKYDENDKLIREVKVITLKSKLVSDFRKDFQFYKVREINNYHHAHDAYLNAVVGTALIKKYPKLESEFVYGDYKVYDVRKMIAKSEQEIGKATAKYFFYSNIMNFFKTEITLANGEIRKRPLIETNGETGEIVWDKGRDFATVRKVLSMPQVNIVKKTEVQTGGFSKESILPKRNSDKLIARKKDWDPKKYGGFDSPTVAYSVLVVAKVEKGKSKKLKSVKELLGITIMERSSFEKNPIDFLEAKGYKEVKKDLIIKLPKYSLFELENGRKRMLASAGELQKGNELALPSKYVNFLYLASHYEKLKGSPEDNEQKQLFVEQHKHYLDEIIEQISEFSKRVILADANLDKVLSAYNKHRDKPIREQAENIIHLFTLTNLGAPAAFKYFDTTIDRKRYTSTKEVLDATLIHQSITGLYETRIDLSQLGGDGGGGGPAPGSSGGTLNIEDEHRLHETSKEPDVSLGSTWLSDFPQAWAETGGMGLAVRQAPLIIPLKATSTPVSIKQYPMSQEARLGIKPHIQRLLDQGILVPCQSPWNTPLLPVKKPGTNDYRPVQDLREVNKRVEDIHPTVPNPYNLLSGLPPSHQWYTVLDLKDAFFCLRLHPTSQPLFAFEWRDPEMGISGQLTWTRLPQGFKNSPTLFNEALHRDLADFRIQHPDLILLQYVDDLLLAATSELDCQQGTRALLQTLGNLGYRASAKKAQICQKQVKYLGYLLKEGQRWLTEARKETVMGQPTPKTPRQLREFLGKAGFCRLFIPGFAEMAAPLYPLTKPGTLFNWGPDQQKAYQEIKQALLTAPALGLPDLTKPFELFVDEKQGYAKGVLTQKLGPWRRPVAYLSKKLDPVAAGWPPCLRMVAAIAVLTKDAGKLTMGQPLVILAPHAVEALVKQPPDRWLSNARMTHYQALLLDTDRVQFGPVVALNPATLLPLPEEGLQHNCLDILAEAHGTRPDLTDQPLPDADHTWYTDGSSLLQEGQRKAGAAVTTETEVIWAKALPAGTSAQRAELIALTQALKMAEGKKLNVYTDSRYAFATAHIHGEIYRRRGWLTSEGKEIKNKDEILALLKALFLPKRLSIIHCPGHQKGHSAEARGNRMADQAARKAAITETPDTSTLLAGKRTADGSEFEKRTADGSEFESPKKKAKVE

SEQ ID NO: 2842 - protein, 2096 aa, synthetic construct
MPAAKRVKLDGGDKKYSIGLDIGTNSVGWAVITDEYKVPSKKFKVLGNTDRHSIKKNLIGALLFDSGETAEATRLKRTARRRYTRRKNRICYLQEIFSNEMAKVDDSFFHRLEESFLVEEDKKHERHPIFGNIVDEVAYHEKYPTIYHLRKKLVDSTDKADLRLIYLALAHMIKFRGHFLIEGDLNPDNSDVDKLFIQLVQTYNQLFEENPINASGVDAKAILSARLSKSRRLENLIAQLPGEKKNGLFGNLIALSLGLTPNFKSNFDLAEDAKLQLSKDTYDDDLDNLLAQIGDQYADLFLAAKNLSDAILLSDILRVNTEITKAPLSASMIKRYDEHHQDLTLLKALVRQQLPEKYKEIFFDQSKNGYAGYIDGGASQEEFYKFIKPILEKMDGTEELLVKLNREDLLRKQRTFDNGSIPHQIHLGELHAILRRQEDFYPFLKDNREKIEKILTFRIPYYVGPLARGNSRFAWMTRKSEETITPWNFEEVVDKGASAQSFIERMTNFDKNLPNEKVLPKHSLLYEYFTVYNELTKVKYVTEGMRKPAFLSGEQKKAIVDLLFKTNRKVTVKQLKEDYFKKIECFDSVEISGVEDRFNASLGTYHDLLKIIKDKDFLDNEENEDILEDIVLTLTLFEDREMIEERLKTYAHLFDDKVMKQLKRRRYTGWGRLSRKLINGIRDKQSGKTILDFLKSDGFANRNFMQLIHDDSLTFKEDIQKAQVSGQGDSLHEHIANLAGSPAIKKGILQTVKVVDELVKVMGRHKPENIVIEMARENQTTQKGQKNSRERMKRIEEGIKELGSQILKEHPVENTQLQNEKLYLYYLQNGRDMYVDQELDINRLSDYDVDHIVPQSFLKDDSIDNKVLTRSDKARGKSDNVPSEEVVKKMKNYWRQLLNAKLITQRKFDNLTKAERGGLSELDKAGFIKRQLVETRQITKHVAQILDSRMNTKYDENDKLIREVKVITLKSKLVSDFRKDFQFYKVREINNYHHAHDAYLNAVVGTALIKKYPKLESEFVYGDYKVYDVRKMIAKSEQEIGKATAKYFFYSNIMNFFKTEITLANGEIRKRPLIETNGETGEIVWDKGRDFATVRKVLSMPQVNIVKKTEVQTGGFSKESILPKRNSDKLIARKKDWDPKKYGGFDSPTVAYSVLVVAKVEKGKSKKLKSVKELLGITIMERSSFEKNPIDFLEAKGYKEVKKDLIIKLPKYSLFELENGRKRMLASAGELQKGNELALPSKYVNFLYLASHYEKLKGSPEDNEQKQLFVEQHKHYLDEIIEQISEFSKRVILADANLDKVLSAYNKHRDKPIREQAENIIHLFTLTNLGAPAAFKYFDTTIDRKRYTSTKEVLDATLIHQSITGLYETRIDLSQLGGDGGGGSGSSEAAAKGGTLNIEDEHRLHETSKEPDVSLGSTWLSDFPQAWAETGGMGLAVRQAPLIIPLKATSTPVSIKQYPMSQEARLGIKPHIQRLLDQGILVPCQSPWNTPLLPVKKPGTNDYRPVQDLREVNKRVEDIHPTVPNPYNLLSGLPPSHQWYTVLDLKDAFFCLRLHPTSQPLFAFEWRDPEMGISGQLTWTRLPQGFKNSPTLFNEALHRDLADFRIQHPDLILLQYVDDLLLAATSELDCQQGTRALLQTLGNLGYRASAKKAQICQKQVKYLGYLLKEGQRWLTEARKETVMGQPTPKTPRQLREFLGKAGFCRLFIPGFAEMAAPLYPLTKPGTLFNWGPDQQKAYQEIKQALLTAPALGLPDLTKPFELFVDEKQGYAKGVLTQKLGPWRRPVAYLSKKLDPVAAGWPPCLRMVAAIAVLTKDAGKLTMGQPLVILAPHAVEALVKQPPDRWLSNARMTHYQALLLDTDRVQFGPVVALNPATLLPLPEEGLQHNCLDILAEAHGTRPDLTDQPLPDADHTWYTDGSSLLQEGQRKAGAAVTTETEVIWAKALPAGTSAQRAELIALTQALKMAEGKKLNVYTDSRYAFATAHIHGEIYRRRGWLTSEGKEIKNKDEILALLKALFLPKRLSIIHCPGHQKGHSAEARGNRMADQAARKAAITETPDTSTLLAGKRTADGSEFEKRTADGSEFESPKKKAKVE

SEQ ID NO: 2843 - protein, 2096 aa, synthetic construct
MPAAKRVKLDGGDKKYSIGLDIGTNSVGWAVITDEYKVPSKKFKVLGNTDRHSIKKNLIGALLFDSGETAEATRLKRTARRRYTRRKNRICYLQEIFSNEMAKVDDSFFHRLEESFLVEEDKKHERHPIFGNIVDEVAYHEKYPTIYHLRKKLVDSTDKADLRLIYLALAHMIKFRGHFLIEGDLNPDNSDVDKLFIQLVQTYNQLFEENPINASGVDAKAILSARLSKSRRLENLIAQLPGEKKNGLFGNLIALSLGLTPNFKSNFDLAEDAKLQLSKDTYDDDLDNLLAQIGDQYADLFLAAKNLSDAILLSDILRVNTEITKAPLSASMIKRYDEHHQDLTLLKALVRQQLPEKYKEIFFDQSKNGYAGYIDGGASQEEFYKFIKPILEKMDGTEELLVKLNREDLLRKQRTFDNGSIPHQIHLGELHAILRRQEDFYPFLKDNREKIEKILTFRIPYYVGPLARGNSRFAWMTRKSEETITPWNFEEVVDKGASAQSFIERMTNFDKNLPNEKVLPKHSLLYEYFTVYNELTKVKYVTEGMRKPAFLSGEQKKAIVDLLFKTNRKVTVKQLKEDYFKKIECFDSVEISGVEDRFNASLGTYHDLLKIIKDKDFLDNEENEDILEDIVLTLTLFEDREMIEERLKTYAHLFDDKVMKQLKRRRYTGWGRLSRKLINGIRDKQSGKTILDFLKSDGFANRNFMQLIHDDSLTFKEDIQKAQVSGQGDSLHEHIANLAGSPAIKKGILQTVKVVDELVKVMGRHKPENIVIEMARENQTTQKGQKNSRERMKRIEEGIKELGSQILKEHPVENTQLQNEKLYLYYLQNGRDMYVDQELDINRLSDYDVDHIVPQSFLKDDSIDNKVLTRSDKARGKSDNVPSEEVVKKMKNYWRQLLNAKLITQRKFDNLTKAERGGLSELDKAGFIKRQLVETRQITKHVAQILDSRMNTKYDENDKLIREVKVITLKSKLVSDFRKDFQFYKVREINNYHHAHDAYLNAVVGTALIKKYPKLESEFVYGDYKVYDVRKMIAKSEQEIGKATAKYFFYSNIMNFFKTEITLANGEIRKRPLIETNGETGEIVWDKGRDFATVRKVLSMPQVNIVKKTEVQTGGFSKESILPKRNSDKLIARKKDWDPKKYGGFDSPTVAYSVLVVAKVEKGKSKKLKSVKELLGITIMERSSFEKNPIDFLEAKGYKEVKKDLIIKLPKYSLFELENGRKRMLASAGELQKGNELALPSKYVNFLYLASHYEKLKGSPEDNEQKQLFVEQHKHYLDEIIEQISEFSKRVILADANLDKVLSAYNKHRDKPIREQAENIIHLFTLTNLGAPAAFKYFDTTIDRKRYTSTKEVLDATLIHQSITGLYETRIDLSQLGGDGGEAAAKGGGPAPGGTLNIEDEHRLHETSKEPDVSLGSTWLSDFPQAWAETGGMGLAVRQAPLIIPLKATSTPVSIKQYPMSQEARLGIKPHIQRLLDQGILVPCQSPWNTPLLPVKKPGTNDYRPVQDLREVNKRVEDIHPTVPNPYNLLSGLPPSHQWYTVLDLKDAFFCLRLHPTSQPLFAFEWRDPEMGISGQLTWTRLPQGFKNSPTLFNEALHRDLADFRIQHPDLILLQYVDDLLLAATSELDCQQGTRALLQTLGNLGYRASAKKAQICQKQVKYLGYLLKEGQRWLTEARKETVMGQPTPKTPRQLREFLGKAGFCRLFIPGFAEMAAPLYPLTKPGTLFNWGPDQQKAYQEIKQALLTAPALGLPDLTKPFELFVDEKQGYAKGVLTQKLGPWRRPVAYLSKKLDPVAAGWPPCLRMVAAIAVLTKDAGKLTMGQPLVILAPHAVEALVKQPPDRWLSNARMTHYQALLLDTDRVQFGPVVALNPATLLPLPEEGLQHNCLDILAEAHGTRPDLTDQPLPDADHTWYTDGSSLLQEGQRKAGAAVTTETEVIWAKALPAGTSAQRAELIALTQALKMAEGKKLNVYTDSRYAFATAHIHGEIYRRRGWLTSEGKEIKNKDEILALLKALFLPKRLSIIHCPGHQKGHSAEARGNRMADQAARKAAITETPDTSTLLAGKRTADGSEFEKRTADGSEFESPKKKAKVE

SEQ ID NO: 2844 - protein, 2105 aa, synthetic construct
MPAAKRVKLDGGDKKYSIGLDIGTNSVGWAVITDEYKVPSKKFKVLGNTDRHSIKKNLIGALLFDSGETAEATRLKRTARRRYTRRKNRICYLQEIFSNEMAKVDDSFFHRLEESFLVEEDKKHERHPIFGNIVDEVAYHEKYPTIYHLRKKLVDSTDKADLRLIYLALAHMIKFRGHFLIEGDLNPDNSDVDKLFIQLVQTYNQLFEENPINASGVDAKAILSARLSKSRRLENLIAQLPGEKKNGLFGNLIALSLGLTPNFKSNFDLAEDAKLQLSKDTYDDDLDNLLAQIGDQYADLFLAAKNLSDAILLSDILRVNTEITKAPLSASMIKRYDEHHQDLTLLKALVRQQLPEKYKEIFFDQSKNGYAGYIDGGASQEEFYKFIKPILEKMDGTEELLVKLNREDLLRKQRTFDNGSIPHQIHLGELHAILRRQEDFYPFLKDNREKIEKILTFRIPYYVGPLARGNSRFAWMTRKSEETITPWNFEEVVDKGASAQSFIERMTNFDKNLPNEKVLPKHSLLYEYFTVYNELTKVKYVTEGMRKPAFLSGEQKKAIVDLLFKTNRKVTVKQLKEDYFKKIECFDSVEISGVEDRFNASLGTYHDLLKIIKDKDFLDNEENEDILEDIVLTLTLFEDREMIEERLKTYAHLFDDKVMKQLKRRRYTGWGRLSRKLINGIRDKQSGKTILDFLKSDGFANRNFMQLIHDDSLTFKEDIQKAQVSGQGDSLHEHIANLAGSPAIKKGILQTVKVVDELVKVMGRHKPENIVIEMARENQTTQKGQKNSRERMKRIEEGIKELGSQILKEHPVENTQLQNEKLYLYYLQNGRDMYVDQELDINRLSDYDVDHIVPQSFLKDDSIDNKVLTRSDKARGKSDNVPSEEVVKKMKNYWRQLLNAKLITQRKFDNLTKAERGGLSELDKAGFIKRQLVETRQITKHVAQILDSRMNTKYDENDKLIREVKVITLKSKLVSDFRKDFQFYKVREINNYHHAHDAYLNAVVGTALIKKYPKLESEFVYGDYKVYDVRKMIAKSEQEIGKATAKYFFYSNIMNFFKTEITLANGEIRKRPLIETNGETGEIVWDKGRDFATVRKVLSMPQVNIVKKTEVQTGGFSKESILPKRNSDKLIARKKDWDPKKYGGFDSPTVAYSVLVVAKVEKGKSKKLKSVKELLGITIMERSSFEKNPIDFLEAKGYKEVKKDLIIKLPKYSLFELENGRKRMLASAGELQKGNELALPSKYVNFLYLASHYEKLKGSPEDNEQKQLFVEQHKHYLDEIIEQISEFSKRVILADANLDKVLSAYNKHRDKPIREQAENIIHLFTLTNLGAPAAFKYFDTTIDRKRYTSTKEVLDATLIHQSITGLYETRIDLSQLGGDGGEAAAKEAAAKEAAAKEAAAKGGTLNIEDEHRLHETSKEPDVSLGSTWLSDFPQAWAETGGMGLAVRQAPLIIPLKATSTPVSIKQYPMSQEARLGIKPHIQRLLDQGILVPCQSPWNTPLLPVKKPGTNDYRPVQDLREVNKRVEDIHPTVPNPYNLLSGLPPSHQWYTVLDLKDAFFCLRLHPTSQPLFAFEWRDPEMGISGQLTWTRLPQGFKNSPTLFNEALHRDLADFRIQHPDLILLQYVDDLLLAATSELDCQQGTRALLQTLGNLGYRASAKKAQICQKQVKYLGYLLKEGQRWLTEARKETVMGQPTPKTPRQLREFLGKAGFCRLFIPGFAEMAAPLYPLTKPGTLFNWGPDQQKAYQEIKQALLTAPALGLPDLTKPFELFVDEKQGYAKGVLTQKLGPWRRPVAYLSKKLDPVAAGWPPCLRMVAAIAVLTKDAGKLTMGQPLVILAPHAVEALVKQPPDRWLSNARMTHYQALLLDTDRVQFGPVVALNPATLLPLPEEGLQHNCLDILAEAHGTRPDLTDQPLPDADHTWYTDGSSLLQEGQRKAGAAVTTETEVIWAKALPAGTSAQRAELIALTQALKMAEGKKLNVYTDSRYAFATAHIHGEIYRRRGWLTSEGKEIKNKDEILALLKALFLPKRLSIIHCPGHQKGHSAEARGNRMADQAARKAAITETPDTSTLLAGKRTADGSEFEKRTADGSEFESPKKKAKVE

SEQ ID NO: 2845 - protein, 2095 aa, synthetic construct
MPAAKRVKLDGGDKKYSIGLDIGTNSVGWAVITDEYKVPSKKFKVLGNTDRHSIKKNLIGALLFDSGETAEATRLKRTARRRYTRRKNRICYLQEIFSNEMAKVDDSFFHRLEESFLVEEDKKHERHPIFGNIVDEVAYHEKYPTIYHLRKKLVDSTDKADLRLIYLALAHMIKFRGHFLIEGDLNPDNSDVDKLFIQLVQTYNQLFEENPINASGVDAKAILSARLSKSRRLENLIAQLPGEKKNGLFGNLIALSLGLTPNFKSNFDLAEDAKLQLSKDTYDDDLDNLLAQIGDQYADLFLAAKNLSDAILLSDILRVNTEITKAPLSASMIKRYDEHHQDLTLLKALVRQQLPEKYKEIFFDQSKNGYAGYIDGGASQEEFYKFIKPILEKMDGTEELLVKLNREDLLRKQRTFDNGSIPHQIHLGELHAILRRQEDFYPFLKDNREKIEKILTFRIPYYVGPLARGNSRFAWMTRKSEETITPWNFEEVVDKGASAQSFIERMTNFDKNLPNEKVLPKHSLLYEYFTVYNELTKVKYVTEGMRKPAFLSGEQKKAIVDLLFKTNRKVTVKQLKEDYFKKIECFDSVEISGVEDRFNASLGTYHDLLKIIKDKDFLDNEENEDILEDIVLTLTLFEDREMIEERLKTYAHLFDDKVMKQLKRRRYTGWGRLSRKLINGIRDKQSGKTILDFLKSDGFANRNFMQLIHDDSLTFKEDIQKAQVSGQGDSLHEHIANLAGSPAIKKGILQTVKVVDELVKVMGRHKPENIVIEMARENQTTQKGQKNSRERMKRIEEGIKELGSQILKEHPVENTQLQNEKLYLYYLQNGRDMYVDQELDINRLSDYDVDHIVPQSFLKDDSIDNKVLTRSDKARGKSDNVPSEEVVKKMKNYWRQLLNAKLITQRKFDNLTKAERGGLSELDKAGFIKRQLVETRQITKHVAQILDSRMNTKYDENDKLIREVKVITLKSKLVSDFRKDFQFYKVREINNYHHAHDAYLNAVVGTALIKKYPKLESEFVYGDYKVYDVRKMIAKSEQEIGKATAKYFFYSNIMNFFKTEITLANGEIRKRPLIETNGETGEIVWDKGRDFATVRKVLSMPQVNIVKKTEVQTGGFSKESILPKRNSDKLIARKKDWDPKKYGGFDSPTVAYSVLVVAKVEKGKSKKLKSVKELLGITIMERSSFEKNPIDFLEAKGYKEVKKDLIIKLPKYSLFELENGRKRMLASAGELQKGNELALPSKYVNFLYLASHYEKLKGSPEDNEQKQLFVEQHKHYLDEIIEQISEFSKRVILADANLDKVLSAYNKHRDKPIREQAENIIHLFTLTNLGAPAAFKYFDTTIDRKRYTSTKEVLDATLIHQSITGLYETRIDLSQLGGDGGEAAAKEAAAKGGTLNIEDEHRLHETSKEPDVSLGSTWLSDFPQAWAETGGMGLAVRQAPLIIPLKATSTPVSIKQYPMSQEARLGIKPHIQRLLDQGILVPCQSPWNTPLLPVKKPGTNDYRPVQDLREVNKRVEDIHPTVPNPYNLLSGLPPSHQWYTVLDLKDAFFCLRLHPTSQPLFAFEWRDPEMGISGQLTWTRLPQGFKNSPTLFNEALHRDLADFRIQHPDLILLQYVDDLLLAATSELDCQQGTRALLQTLGNLGYRASAKKAQICQKQVKYLGYLLKEGQRWLTEARKETVMGQPTPKTPRQLREFLGKAGFCRLFIPGFAEMAAPLYPLTKPGTLFNWGPDQQKAYQEIKQALLTAPALGLPDLTKPFELFVDEKQGYAKGVLTQKLGPWRRPVAYLSKKLDPVAAGWPPCLRMVAAIAVLTKDAGKLTMGQPLVILAPHAVEALVKQPPDRWLSNARMTHYQALLLDTDRVQFGPVVALNPATLLPLPEEGLQHNCLDILAEAHGTRPDLTDQPLPDADHTWYTDGSSLLQEGQRKAGAAVTTETEVIWAKALPAGTSAQRAELIALTQALKMAEGKKLNVYTDSRYAFATAHIHGEIYRRRGWLTSEGKEIKNKDEILALLKALFLPKRLSIIHCPGHQKGHSAEARGNRMADQAARKAAITETPDTSTLLAGKRTADGSEFEKRTADGSEFESPKKKAKVE

SEQ ID NO: 2846 - protein, 2094 aa, synthetic construct
MPAAKRVKLDGGDKKYSIGLDIGTNSVGWAVITDEYKVPSKKFKVLGNTDRHSIKKNLIGALLFDSGETAEATRLKRTARRRYTRRKNRICYLQEIFSNEMAKVDDSFFHRLEESFLVEEDKKHERHPIFGNIVDEVAYHEKYPTIYHLRKKLVDSTDKADLRLIYLALAHMIKFRGHFLIEGDLNPDNSDVDKLFIQLVQTYNQLFEENPINASGVDAKAILSARLSKSRRLENLIAQLPGEKKNGLFGNLIALSLGLTPNFKSNFDLAEDAKLQLSKDTYDDDLDNLLAQIGDQYADLFLAAKNLSDAILLSDILRVNTEITKAPLSASMIKRYDEHHQDLTLLKALVRQQLPEKYKEIFFDQSKNGYAGYIDGGASQEEFYKFIKPILEKMDGTEELLVKLNREDLLRKQRTFDNGSIPHQIHLGELHAILRRQEDFYPFLKDNREKIEKILTFRIPYYVGPLARGNSRFAWMTRKSEETITPWNFEEVVDKGASAQSFIERMTNFDKNLPNEKVLPKHSLLYEYFTVYNELTKVKYVTEGMRKPAFLSGEQKKAIVDLLFKTNRKVTVKQLKEDYFKKIECFDSVEISGVEDRFNASLGTYHDLLKIIKDKDFLDNEENEDILEDIVLTLTLFEDREMIEERLKTYAHLFDDKVMKQLKRRRYTGWGRLSRKLINGIRDKQSGKTILDFLKSDGFANRNFMQLIHDDSLTFKEDIQKAQVSGQGDSLHEHIANLAGSPAIKKGILQTVKVVDELVKVMGRHKPENIVIEMARENQTTQKGQKNSRERMKRIEEGIKELGSQILKEHPVENTQLQNEKLYLYYLQNGRDMYVDQELDINRLSDYDVDHIVPQSFLKDDSIDNKVLTRSDKARGKSDNVPSEEVVKKMKNYWRQLLNAKLITQRKFDNLTKAERGGLSELDKAGFIKRQLVETRQITKHVAQILDSRMNTKYDENDKLIREVKVITLKSKLVSDFRKDFQFYKVREINNYHHAHDAYLNAVVGTALIKKYPKLESEFVYGDYKVYDVRKMIAKSEQEIGKATAKYFFYSNIMNFFKTEITLANGEIRKRPLIETNGETGEIVWDKGRDFATVRKVLSMPQVNIVKKTEVQTGGFSKESILPKRNSDKLIARKKDWDPKKYGGFDSPTVAYSVLVVAKVEKGKSKKLKSVKELLGITIMERSSFEKNPIDFLEAKGYKEVKKDLIIKLPKYSLFELENGRKRMLASAGELQKGNELALPSKYVNFLYLASHYEKLKGSPEDNEQKQLFVEQHKHYLDEIIEQISEFSKRVILADANLDKVLSAYNKHRDKPIREQAENIIHLFTLTNLGAPAAFKYFDTTIDRKRYTSTKEVLDATLIHQSITGLYETRIDLSQLGGDGGGGGGGSGSSGGTLNIEDEHRLHETSKEPDVSLGSTWLSDFPQAWAETGGMGLAVRQAPLIIPLKATSTPVSIKQYPMSQEARLGIKPHIQRLLDQGILVPCQSPWNTPLLPVKKPGTNDYRPVQDLREVNKRVEDIHPTVPNPYNLLSGLPPSHQWYTVLDLKDAFFCLRLHPTSQPLFAFEWRDPEMGISGQLTWTRLPQGFKNSPTLFNEALHRDLADFRIQHPDLILLQYVDDLLLAATSELDCQQGTRALLQTLGNLGYRASAKKAQICQKQVKYLGYLLKEGQRWLTEARKETVMGQPTPKTPRQLREFLGKAGFCRLFIPGFAEMAAPLYPLTKPGTLFNWGPDQQKAYQEIKQALLTAPALGLPDLTKPFELFVDEKQGYAKGVLTQKLGPWRRPVAYLSKKLDPVAAGWPPCLRMVAAIAVLTKDAGKLTMGQPLVILAPHAVEALVKQPPDRWLSNARMTHYQALLLDTDRVQFGPVVALNPATLLPLPEEGLQHNCLDILAEAHGTRPDLTDQPLPDADHTWYTDGSSLLQEGQRKAGAAVTTETEVIWAKALPAGTSAQRAELIALTQALKMAEGKKLNVYTDSRYAFATAHIHGEIYRRRGWLTSEGKEIKNKDEILALLKALFLPKRLSIIHCPGHQKGHSAEARGNRMADQAARKAAITETPDTSTLLAGKRTADGSEFEKRTADGSEFESPKKKAKVE

SEQ ID NO: 2847 - protein, 2094 aa, synthetic construct
MPAAKRVKLDGGDKKYSIGLDIGTNSVGWAVITDEYKVPSKKFKVLGNTDRHSIKKNLIGALLFDSGETAEATRLKRTARRRYTRRKNRICYLQEIFSNEMAKVDDSFFHRLEESFLVEEDKKHERHPIFGNIVDEVAYHEKYPTIYHLRKKLVDSTDKADLRLIYLALAHMIKFRGHFLIEGDLNPDNSDVDKLFIQLVQTYNQLFEENPINASGVDAKAILSARLSKSRRLENLIAQLPGEKKNGLFGNLIALSLGLTPNFKSNFDLAEDAKLQLSKDTYDDDLDNLLAQIGDQYADLFLAAKNLSDAILLSDILRVNTEITKAPLSASMIKRYDEHHQDLTLLKALVRQQLPEKYKEIFFDQSKNGYAGYIDGGASQEEFYKFIKPILEKMDGTEELLVKLNREDLLRKQRTFDNGSIPHQIHLGELHAILRRQEDFYPFLKDNREKIEKILTFRIPYYVGPLARGNSRFAWMTRKSEETITPWNFEEVVDKGASAQSFIERMTNFDKNLPNEKVLPKHSLLYEYFTVYNELTKVKYVTEGMRKPAFLSGEQKKAIVDLLFKTNRKVTVKQLKEDYFKKIECFDSVEISGVEDRFNASLGTYHDLLKIIKDKDFLDNEENEDILEDIVLTLTLFEDREMIEERLKTYAHLFDDKVMKQLKRRRYTGWGRLSRKLINGIRDKQSGKTILDFLKSDGFANRNFMQLIHDDSLTFKEDIQKAQVSGQGDSLHEHIANLAGSPAIKKGILQTVKVVDELVKVMGRHKPENIVIEMARENQTTQKGQKNSRERMKRIEEGIKELGSQILKEHPVENTQLQNEKLYLYYLQNGRDMYVDQELDINRLSDYDVDHIVPQSFLKDDSIDNKVLTRSDKARGKSDNVPSEEVVKKMKNYWRQLLNAKLITQRKFDNLTKAERGGLSELDKAGFIKRQLVETRQITKHVAQILDSRMNTKYDENDKLIREVKVITLKSKLVSDFRKDFQFYKVREINNYHHAHDAYLNAVVGTALIKKYPKLESEFVYGDYKVYDVRKMIAKSEQEIGKATAKYFFYSNIMNFFKTEITLANGEIRKRPLIETNGETGEIVWDKGRDFATVRKVLSMPQVNIVKKTEVQTGGFSKESILPKRNSDKLIARKKDWDPKKYGGFDSPTVAYSVLVVAKVEKGKSKKLKSVKELLGITIMERSSFEKNPIDFLEAKGYKEVKKDLIIKLPKYSLFELENGRKRMLASAGELQKGNELALPSKYVNFLYLASHYEKLKGSPEDNEQKQLFVEQHKHYLDEIIEQISEFSKRVILADANLDKVLSAYNKHRDKPIREQAENIIHLFTLTNLGAPAAFKYFDTTIDRKRYTSTKEVLDATLIHQSITGLYETRIDLSQLGGDGGPAPGSSGGGGGTLNIEDEHRLHETSKEPDVSLGSTWLSDFPQAWAETGGMGLAVRQAPLIIPLKATSTPVSIKQYPMSQEARLGIKPHIQRLLDQGILVPCQSPWNTPLLPVKKPGTNDYRPVQDLREVNKRVEDIHPTVPNPYNLLSGLPPSHQWYTVLDLKDAFFCLRLHPTSQPLFAFEWRDPEMGISGQLTWTRLPQGFKNSPTLFNEALHRDLADFRIQHPDLILLQYVDDLLLAATSELDCQQGTRALLQTLGNLGYRASAKKAQICQKQVKYLGYLLKEGQRWLTEARKETVMGQPTPKTPRQLREFLGKAGFCRLFIPGFAEMAAPLYPLTKPGTLFNWGPDQQKAYQEIKQALLTAPALGLPDLTKPFELFVDEKQGYAKGVLTQKLGPWRRPVAYLSKKLDPVAAGWPPCLRMVAAIAVLTKDAGKLTMGQPLVILAPHAVEALVKQPPDRWLSNARMTHYQALLLDTDRVQFGPVVALNPATLLPLPEEGLQHNCLDILAEAHGTRPDLTDQPLPDADHTWYTDGSSLLQEGQRKAGAAVTTETEVIWAKALPAGTSAQRAELIALTQALKMAEGKKLNVYTDSRYAFATAHIHGEIYRRRGWLTSEGKEIKNKDEILALLKALFLPKRLSIIHCPGHQKGHSAEARGNRMADQAARKAAITETPDTSTLLAGKRTADGSEFEKRTADGSEFESPKKKAKVE

SEQ ID NO: 2848 - protein, 2094 aa, synthetic construct
MPAAKRVKLDGGDKKYSIGLDIGTNSVGWAVITDEYKVPSKKFKVLGNTDRHSIKKNLIGALLFDSGETAEATRLKRTARRRYTRRKNRICYLQEIFSNEMAKVDDSFFHRLEESFLVEEDKKHERHPIFGNIVDEVAYHEKYPTIYHLRKKLVDSTDKADLRLIYLALAHMIKFRGHFLIEGDLNPDNSDVDKLFIQLVQTYNQLFEENPINASGVDAKAILSARLSKSRRLENLIAQLPGEKKNGLFGNLIALSLGLTPNFKSNFDLAEDAKLQLSKDTYDDDLDNLLAQIGDQYADLFLAAKNLSDAILLSDILRVNTEITKAPLSASMIKRYDEHHQDLTLLKALVRQQLPEKYKEIFFDQSKNGYAGYIDGGASQEEFYKFIKPILEKMDGTEELLVKLNREDLLRKQRTFDNGSIPHQIHLGELHAILRRQEDFYPFLKDNREKIEKILTFRIPYYVGPLARGNSRFAWMTRKSEETITPWNFEEVVDKGASAQSFIERMTNFDKNLPNEKVLPKHSLLYEYFTVYNELTKVKYVTEGMRKPAFLSGEQKKAIVDLLFKTNRKVTVKQLKEDYFKKIECFDSVEISGVEDRFNASLGTYHDLLKIIKDKDFLDNEENEDILEDIVLTLTLFEDREMIEERLKTYAHLFDDKVMKQLKRRRYTGWGRLSRKLINGIRDKQSGKTILDFLKSDGFANRNFMQLIHDDSLTFKEDIQKAQVSGQGDSLHEHIANLAGSPAIKKGILQTVKVVDELVKVMGRHKPENIVIEMARENQTTQKGQKNSRERMKRIEEGIKELGSQILKEHPVENTQLQNEKLYLYYLQNGRDMYVDQELDINRLSDYDVDHIVPQSFLKDDSIDNKVLTRSDKARGKSDNVPSEEVVKKMKNYWRQLLNAKLITQRKFDNLTKAERGGLSELDKAGFIKRQLVETRQITKHVAQILDSRMNTKYDENDKLIREVKVITLKSKLVSDFRKDFQFYKVREINNYHHAHDAYLNAVVGTALIKKYPKLESEFVYGDYKVYDVRKMIAKSEQEIGKATAKYFFYSNIMNFFKTEITLANGEIRKRPLIETNGETGEIVWDKGRDFATVRKVLSMPQVNIVKKTEVQTGGFSKESILPKRNSDKLIARKKDWDPKKYGGFDSPTVAYSVLVVAKVEKGKSKKLKSVKELLGITIMERSSFEKNPIDFLEAKGYKEVKKDLIIKLPKYSLFELENGRKRMLASAGELQKGNELALPSKYVNFLYLASHYEKLKGSPEDNEQKQLFVEQHKHYLDEIIEQISEFSKRVILADANLDKVLSAYNKHRDKPIREQAENIIHLFTLTNLGAPAAFKYFDTTIDRKRYTSTKEVLDATLIHQSITGLYETRIDLSQLGGDGGGGGGSSPAPGGTLNIEDEHRLHETSKEPDVSLGSTWLSDFPQAWAETGGMGLAVRQAPLIIPLKATSTPVSIKQYPMSQEARLGIKPHIQRLLDQGILVPCQSPWNTPLLPVKKPGTNDYRPVQDLREVNKRVEDIHPTVPNPYNLLSGLPPSHQWYTVLDLKDAFFCLRLHPTSQPLFAFEWRDPEMGISGQLTWTRLPQGFKNSPTLFNEALHRDLADFRIQHPDLILLQYVDDLLLAATSELDCQQGTRALLQTLGNLGYRASAKKAQICQKQVKYLGYLLKEGQRWLTEARKETVMGQPTPKTPRQLREFLGKAGFCRLFIPGFAEMAAPLYPLTKPGTLFNWGPDQQKAYQEIKQALLTAPALGLPDLTKPFELFVDEKQGYAKGVLTQKLGPWRRPVAYLSKKLDPVAAGWPPCLRMVAAIAVLTKDAGKLTMGQPLVILAPHAVEALVKQPPDRWLSNARMTHYQALLLDTDRVQFGPVVALNPATLLPLPEEGLQHNCLDILAEAHGTRPDLTDQPLPDADHTWYTDGSSLLQEGQRKAGAAVTTETEVIWAKALPAGTSAQRAELIALTQALKMAEGKKLNVYTDSRYAFATAHIHGEIYRRRGWLTSEGKEIKNKDEILALLKALFLPKRLSIIHCPGHQKGHSAEARGNRMADQAARKAAITETPDTSTLLAGKRTADGSEFEKRTADGSEFESPKKKAKVE

SEQ ID NO: 2849 - protein, 2093 aa, synthetic construct
MPAAKRVKLDGGDKKYSIGLDIGTNSVGWAVITDEYKVPSKKFKVLGNTDRHSIKKNLIGALLFDSGETAEATRLKRTARRRYTRRKNRICYLQEIFSNEMAKVDDSFFHRLEESFLVEEDKKHERHPIFGNIVDEVAYHEKYPTIYHLRKKLVDSTDKADLRLIYLALAHMIKFRGHFLIEGDLNPDNSDVDKLFIQLVQTYNQLFEENPINASGVDAKAILSARLSKSRRLENLIAQLPGEKKNGLFGNLIALSLGLTPNFKSNFDLAEDAKLQLSKDTYDDDLDNLLAQIGDQYADLFLAAKNLSDAILLSDILRVNTEITKAPLSASMIKRYDEHHQDLTLLKALVRQQLPEKYKEIFFDQSKNGYAGYIDGGASQEEFYKFIKPILEKMDGTEELLVKLNREDLLRKQRTFDNGSIPHQIHLGELHAILRRQEDFYPFLKDNREKIEKILTFRIPYYVGPLARGNSRFAWMTRKSEETITPWNFEEVVDKGASAQSFIERMTNFDKNLPNEKVLPKHSLLYEYFTVYNELTKVKYVTEGMRKPAFLSGEQKKAIVDLLFKTNRKVTVKQLKEDYFKKIECFDSVEISGVEDRFNASLGTYHDLLKIIKDKDFLDNEENEDILEDIVLTLTLFEDREMIEERLKTYAHLFDDKVMKQLKRRRYTGWGRLSRKLINGIRDKQSGKTILDFLKSDGFANRNFMQLIHDDSLTFKEDIQKAQVSGQGDSLHEHIANLAGSPAIKKGILQTVKVVDELVKVMGRHKPENIVIEMARENQTTQKGQKNSRERMKRIEEGIKELGSQILKEHPVENTQLQNEKLYLYYLQNGRDMYVDQELDINRLSDYDVDHIVPQSFLKDDSIDNKVLTRSDKARGKSDNVPSEEVVKKMKNYWRQLLNAKLITQRKFDNLTKAERGGLSELDKAGFIKRQLVETRQITKHVAQILDSRMNTKYDENDKLIREVKVITLKSKLVSDFRKDFQFYKVREINNYHHAHDAYLNAVVGTALIKKYPKLESEFVYGDYKVYDVRKMIAKSEQEIGKATAKYFFYSNIMNFFKTEITLANGEIRKRPLIETNGETGEIVWDKGRDFATVRKVLSMPQVNIVKKTEVQTGGFSKESILPKRNSDKLIARKKDWDPKKYGGFDSPTVAYSVLVVAKVEKGKSKKLKSVKELLGITIMERSSFEKNPIDFLEAKGYKEVKKDLIIKLPKYSLFELENGRKRMLASAGELQKGNELALPSKYVNFLYLASHYEKLKGSPEDNEQKQLFVEQHKHYLDEIIEQISEFSKRVILADANLDKVLSAYNKHRDKPIREQAENIIHLFTLTNLGAPAAFKYFDTTIDRKRYTSTKEVLDATLIHQSITGLYETRIDLSQLGGDGGGGSEAAAKGGTLNIEDEHRLHETSKEPDVSLGSTWLSDFPQAWAETGGMGLAVRQAPLIIPLKATSTPVSIKQYPMSQEARLGIKPHIQRLLDQGILVPCQSPWNTPLLPVKKPGTNDYRPVQDLREVNKRVEDIHPTVPNPYNLLSGLPPSHQWYTVLDLKDAFFCLRLHPTSQPLFAFEWRDPEMGISGQLTWTRLPQGFKNSPTLFNEALHRDLADFRIQHPDLILLQYVDDLLLAATSELDCQQGTRALLQTLGNLGYRASAKKAQICQKQVKYLGYLLKEGQRWLTEARKETVMGQPTPKTPRQLREFLGKAGFCRLFIPGFAEMAAPLYPLTKPGTLFNWGPDQQKAYQEIKQALLTAPALGLPDLTKPFELFVDEKQGYAKGVLTQKLGPWRRPVAYLSKKLDPVAAGWPPCLRMVAAIAVLTKDAGKLTMGQPLVILAPHAVEALVKQPPDRWLSNARMTHYQALLLDTDRVQFGPVVALNPATLLPLPEEGLQHNCLDILAEAHGTRPDLTDQPLPDADHTWYTDGSSLLQEGQRKAGAAVTTETEVIWAKALPAGTSAQRAELIALTQALKMAEGKKLNVYTDSRYAFATAHIHGEIYRRRGWLTSEGKEIKNKDEILALLKALFLPKRLSIIHCPGHQKGHSAEARGNRMADQAARKAAITETPDTSTLLAGKRTADGSEFEKRTADGSEFESPKKKAKVE

SEQ ID NO: 2850 - protein, 2093 aa, synthetic construct
MPAAKRVKLDGGDKKYSIGLDIGTNSVGWAVITDEYKVPSKKFKVLGNTDRHSIKKNLIGALLFDSGETAEATRLKRTARRRYTRRKNRICYLQEIFSNEMAKVDDSFFHRLEESFLVEEDKKHERHPIFGNIVDEVAYHEKYPTIYHLRKKLVDSTDKADLRLIYLALAHMIKFRGHFLIEGDLNPDNSDVDKLFIQLVQTYNQLFEENPINASGVDAKAILSARLSKSRRLENLIAQLPGEKKNGLFGNLIALSLGLTPNFKSNFDLAEDAKLQLSKDTYDDDLDNLLAQIGDQYADLFLAAKNLSDAILLSDILRVNTEITKAPLSASMIKRYDEHHQDLTLLKALVRQQLPEKYKEIFFDQSKNGYAGYIDGGASQEEFYKFIKPILEKMDGTEELLVKLNREDLLRKQRTFDNGSIPHQIHLGELHAILRRQEDFYPFLKDNREKIEKILTFRIPYYVGPLARGNSRFAWMTRKSEETITPWNFEEVVDKGASAQSFIERMTNFDKNLPNEKVLPKHSLLYEYFTVYNELTKVKYVTEGMRKPAFLSGEQKKAIVDLLFKTNRKVTVKQLKEDYFKKIECFDSVEISGVEDRFNASLGTYHDLLKIIKDKDFLDNEENEDILEDIVLTLTLFEDREMIEERLKTYAHLFDDKVMKQLKRRRYTGWGRLSRKLINGIRDKQSGKTILDFLKSDGFANRNFMQLIHDDSLTFKEDIQKAQVSGQGDSLHEHIANLAGSPAIKKGILQTVKVVDELVKVMGRHKPENIVIEMARENQTTQKGQKNSRERMKRIEEGIKELGSQILKEHPVENTQLQNEKLYLYYLQNGRDMYVDQELDINRLSDYDVDHIVPQSFLKDDSIDNKVLTRSDKARGKSDNVPSEEVVKKMKNYWRQLLNAKLITQRKFDNLTKAERGGLSELDKAGFIKRQLVETRQITKHVAQILDSRMNTKYDENDKLIREVKVITLKSKLVSDFRKDFQFYKVREINNYHHAHDAYLNAVVGTALIKKYPKLESEFVYGDYKVYDVRKMIAKSEQEIGKATAKYFFYSNIMNFFKTEITLANGEIRKRPLIETNGETGEIVWDKGRDFATVRKVLSMPQVNIVKKTEVQTGGFSKESILPKRNSDKLIARKKDWDPKKYGGFDSPTVAYSVLVVAKVEKGKSKKLKSVKELLGITIMERSSFEKNPIDFLEAKGYKEVKKDLIIKLPKYSLFELENGRKRMLASAGELQKGNELALPSKYVNFLYLASHYEKLKGSPEDNEQKQLFVEQHKHYLDEIIEQISEFSKRVILADANLDKVLSAYNKHRDKPIREQAENIIHLFTLTNLGAPAAFKYFDTTIDRKRYTSTKEVLDATLIHQSITGLYETRIDLSQLGGDGGEAAAKPAPGGTLNIEDEHRLHETSKEPDVSLGSTWLSDFPQAWAETGGMGLAVRQAPLIIPLKATSTPVSIKQYPMSQEARLGIKPHIQRLLDQGILVPCQSPWNTPLLPVKKPGTNDYRPVQDLREVNKRVEDIHPTVPNPYNLLSGLPPSHQWYTVLDLKDAFFCLRLHPTSQPLFAFEWRDPEMGISGQLTWTRLPQGFKNSPTLFNEALHRDLADFRIQHPDLILLQYVDDLLLAATSELDCQQGTRALLQTLGNLGYRASAKKAQICQKQVKYLGYLLKEGQRWLTEARKETVMGQPTPKTPRQLREFLGKAGFCRLFIPGFAEMAAPLYPLTKPGTLFNWGPDQQKAYQEIKQALLTAPALGLPDLTKPFELFVDEKQGYAKGVLTQKLGPWRRPVAYLSKKLDPVAAGWPPCLRMVAAIAVLTKDAGKLTMGQPLVILAPHAVEALVKQPPDRWLSNARMTHYQALLLDTDRVQFGPVVALNPATLLPLPEEGLQHNCLDILAEAHGTRPDLTDQPLPDADHTWYTDGSSLLQEGQRKAGAAVTTETEVIWAKALPAGTSAQRAELIALTQALKMAEGKKLNVYTDSRYAFATAHIHGEIYRRRGWLTSEGKEIKNKDEILALLKALFLPKRLSIIHCPGHQKGHSAEARGNRMADQAARKAAITETPDTSTLLAGKRTADGSEFEKRTADGSEFESPKKKAKVE

SEQ ID NO: 2851 - protein, 2096 aa, synthetic construct
MPAAKRVKLDGGDKKYSIGLDIGTNSVGWAVITDEYKVPSKKFKVLGNTDRHSIKKNLIGALLFDSGETAEATRLKRTARRRYTRRKNRICYLQEIFSNEMAKVDDSFFHRLEESFLVEEDKKHERHPIFGNIVDEVAYHEKYPTIYHLRKKLVDSTDKADLRLIYLALAHMIKFRGHFLIEGDLNPDNSDVDKLFIQLVQTYNQLFEENPINASGVDAKAILSARLSKSRRLENLIAQLPGEKKNGLFGNLIALSLGLTPNFKSNFDLAEDAKLQLSKDTYDDDLDNLLAQIGDQYADLFLAAKNLSDAILLSDILRVNTEITKAPLSASMIKRYDEHHQDLTLLKALVRQQLPEKYKEIFFDQSKNGYAGYIDGGASQEEFYKFIKPILEKMDGTEELLVKLNREDLLRKQRTFDNGSIPHQIHLGELHAILRRQEDFYPFLKDNREKIEKILTFRIPYYVGPLARGNSRFAWMTRKSEETITPWNFEEVVDKGASAQSFIERMTNFDKNLPNEKVLPKHSLLYEYFTVYNELTKVKYVTEGMRKPAFLSGEQKKAIVDLLFKTNRKVTVKQLKEDYFKKIECFDSVEISGVEDRFNASLGTYHDLLKIIKDKDFLDNEENEDILEDIVLTLTLFEDREMIEERLKTYAHLFDDKVMKQLKRRRYTGWGRLSRKLINGIRDKQSGKTILDFLKSDGFANRNFMQLIHDDSLTFKEDIQKAQVSGQGDSLHEHIANLAGSPAIKKGILQTVKVVDELVKVMGRHKPENIVIEMARENQTTQKGQKNSRERMKRIEEGIKELGSQILKEHPVENTQLQNEKLYLYYLQNGRDMYVDQELDINRLSDYDVDHIVPQSFLKDDSIDNKVLTRSDKARGKSDNVPSEEVVKKMKNYWRQLLNAKLITQRKFDNLTKAERGGLSELDKAGFIKRQLVETRQITKHVAQILDSRMNTKYDENDKLIREVKVITLKSKLVSDFRKDFQFYKVREINNYHHAHDAYLNAVVGTALIKKYPKLESEFVYGDYKVYDVRKMIAKSEQEIGKATAKYFFYSNIMNFFKTEITLANGEIRKRPLIETNGETGEIVWDKGRDFATVRKVLSMPQVNIVKKTEVQTGGFSKESILPKRNSDKLIARKKDWDPKKYGGFDSPTVAYSVLVVAKVEKGKSKKLKSVKELLGITIMERSSFEKNPIDFLEAKGYKEVKKDLIIKLPKYSLFELENGRKRMLASAGELQKGNELALPSKYVNFLYLASHYEKLKGSPEDNEQKQLFVEQHKHYLDEIIEQISEFSKRVILADANLDKVLSAYNKHRDKPIREQAENIIHLFTLTNLGAPAAFKYFDTTIDRKRYTSTKEVLDATLIHQSITGLYETRIDLSQLGGDGGPAPAPAPAPAPGGTLNIEDEHRLHETSKEPDVSLGSTWLSDFPQAWAETGGMGLAVRQAPLIIPLKATSTPVSIKQYPMSQEARLGIKPHIQRLLDQGILVPCQSPWNTPLLPVKKPGTNDYRPVQDLREVNKRVEDIHPTVPNPYNLLSGLPPSHQWYTVLDLKDAFFCLRLHPTSQPLFAFEWRDPEMGISGQLTWTRLPQGFKNSPTLFNEALHRDLADFRIQHPDLILLQYVDDLLLAATSELDCQQGTRALLQTLGNLGYRASAKKAQICQKQVKYLGYLLKEGQRWLTEARKETVMGQPTPKTPRQLREFLGKAGFCRLFIPGFAEMAAPLYPLTKPGTLFNWGPDQQKAYQEIKQALLTAPALGLPDLTKPFELFVDEKQGYAKGVLTQKLGPWRRPVAYLSKKLDPVAAGWPPCLRMVAAIAVLTKDAGKLTMGQPLVILAPHAVEALVKQPPDRWLSNARMTHYQALLLDTDRVQFGPVVALNPATLLPLPEEGLQHNCLDILAEAHGTRPDLTDQPLPDADHTWYTDGSSLLQEGQRKAGAAVTTETEVIWAKALPAGTSAQRAELIALTQALKMAEGKKLNVYTDSRYAFATAHIHGEIYRRRGWLTSEGKEIKNKDEILALLKALFLPKRLSIIHCPGHQKGHSAEARGNRMADQAARKAAITETPDTSTLLAGKRTADGSEFEKRTADGSEFESPKKKAKVE

SEQ ID NO: 2852 - protein, 2094 aa, synthetic construct
MPAAKRVKLDGGDKKYSIGLDIGTNSVGWAVITDEYKVPSKKFKVLGNTDRHSIKKNLIGALLFDSGETAEATRLKRTARRRYTRRKNRICYLQEIFSNEMAKVDDSFFHRLEESFLVEEDKKHERHPIFGNIVDEVAYHEKYPTIYHLRKKLVDSTDKADLRLIYLALAHMIKFRGHFLIEGDLNPDNSDVDKLFIQLVQTYNQLFEENPINASGVDAKAILSARLSKSRRLENLIAQLPGEKKNGLFGNLIALSLGLTPNFKSNFDLAEDAKLQLSKDTYDDDLDNLLAQIGDQYADLFLAAKNLSDAILLSDILRVNTEITKAPLSASMIKRYDEHHQDLTLLKALVRQQLPEKYKEIFFDQSKNGYAGYIDGGASQEEFYKFIKPILEKMDGTEELLVKLNREDLLRKQRTFDNGSIPHQIHLGELHAILRRQEDFYPFLKDNREKIEKILTFRIPYYVGPLARGNSRFAWMTRKSEETITPWNFEEVVDKGASAQSFIERMTNFDKNLPNEKVLPKHSLLYEYFTVYNELTKVKYVTEGMRKPAFLSGEQKKAIVDLLFKTNRKVTVKQLKEDYFKKIECFDSVEISGVEDRFNASLGTYHDLLKIIKDKDFLDNEENEDILEDIVLTLTLFEDREMIEERLKTYAHLFDDKVMKQLKRRRYTGWGRLSRKLINGIRDKQSGKTILDFLKSDGFANRNFMQLIHDDSLTFKEDIQKAQVSGQGDSLHEHIANLAGSPAIKKGILQTVKVVDELVKVMGRHKPENIVIEMARENQTTQKGQKNSRERMKRIEEGIKELGSQILKEHPVENTQLQNEKLYLYYLQNGRDMYVDQELDINRLSDYDVDHIVPQSFLKDDSIDNKVLTRSDKARGKSDNVPSEEVVKKMKNYWRQLLNAKLITQRKFDNLTKAERGGLSELDKAGFIKRQLVETRQITKHVAQILDSRMNTKYDENDKLIREVKVITLKSKLVSDFRKDFQFYKVREINNYHHAHDAYLNAVVGTALIKKYPKLESEFVYGDYKVYDVRKMIAKSEQEIGKATAKYFFYSNIMNFFKTEITLANGEIRKRPLIETNGETGEIVWDKGRDFATVRKVLSMPQVNIVKKTEVQTGGFSKESILPKRNSDKLIARKKDWDPKKYGGFDSPTVAYSVLVVAKVEKGKSKKLKSVKELLGITIMERSSFEKNPIDFLEAKGYKEVKKDLIIKLPKYSLFELENGRKRMLASAGELQKGNELALPSKYVNFLYLASHYEKLKGSPEDNEQKQLFVEQHKHYLDEIIEQISEFSKRVILADANLDKVLSAYNKHRDKPIREQAENIIHLFTLTNLGAPAAFKYFDTTIDRKRYTSTKEVLDATLIHQSITGLYETRIDLSQLGGDGGGGSPAPGSSGGTLNIEDEHRLHETSKEPDVSLGSTWLSDFPQAWAETGGMGLAVRQAPLIIPLKATSTPVSIKQYPMSQEARLGIKPHIQRLLDQGILVPCQSPWNTPLLPVKKPGTNDYRPVQDLREVNKRVEDIHPTVPNPYNLLSGLPPSHQWYTVLDLKDAFFCLRLHPTSQPLFAFEWRDPEMGISGQLTWTRLPQGFKNSPTLFNEALHRDLADFRIQHPDLILLQYVDDLLLAATSELDCQQGTRALLQTLGNLGYRASAKKAQICQKQVKYLGYLLKEGQRWLTEARKETVMGQPTPKTPRQLREFLGKAGFCRLFIPGFAEMAAPLYPLTKPGTLFNWGPDQQKAYQEIKQALLTAPALGLPDLTKPFELFVDEKQGYAKGVLTQKLGPWRRPVAYLSKKLDPVAAGWPPCLRMVAAIAVLTKDAGKLTMGQPLVILAPHAVEALVKQPPDRWLSNARMTHYQALLLDTDRVQFGPVVALNPATLLPLPEEGLQHNCLDILAEAHGTRPDLTDQPLPDADHTWYTDGSSLLQEGQRKAGAAVTTETEVIWAKALPAGTSAQRAELIALTQALKMAEGKKLNVYTDSRYAFATAHIHGEIYRRRGWLTSEGKEIKNKDEILALLKALFLPKRLSIIHCPGHQKGHSAEARGNRMADQAARKAAITETPDTSTLLAGKRTADGSEFEKRTADGSEFESPKKKAKVE

SEQ ID NO: 2853 - protein, 2091 aa, synthetic construct
MPAAKRVKLDGGDKKYSIGLDIGTNSVGWAVITDEYKVPSKKFKVLGNTDRHSIKKNLIGALLFDSGETAEATRLKRTARRRYTRRKNRICYLQEIFSNEMAKVDDSFFHRLEESFLVEEDKKHERHPIFGNIVDEVAYHEKYPTIYHLRKKLVDSTDKADLRLIYLALAHMIKFRGHFLIEGDLNPDNSDVDKLFIQLVQTYNQLFEENPINASGVDAKAILSARLSKSRRLENLIAQLPGEKKNGLFGNLIALSLGLTPNFKSNFDLAEDAKLQLSKDTYDDDLDNLLAQIGDQYADLFLAAKNLSDAILLSDILRVNTEITKAPLSASMIKRYDEHHQDLTLLKALVRQQLPEKYKEIFFDQSKNGYAGYIDGGASQEEFYKFIKPILEKMDGTEELLVKLNREDLLRKQRTFDNGSIPHQIHLGELHAILRRQEDFYPFLKDNREKIEKILTFRIPYYVGPLARGNSRFAWMTRKSEETITPWNFEEVVDKGASAQSFIERMTNFDKNLPNEKVLPKHSLLYEYFTVYNELTKVKYVTEGMRKPAFLSGEQKKAIVDLLFKTNRKVTVKQLKEDYFKKIECFDSVEISGVEDRFNASLGTYHDLLKIIKDKDFLDNEENEDILEDIVLTLTLFEDREMIEERLKTYAHLFDDKVMKQLKRRRYTGWGRLSRKLINGIRDKQSGKTILDFLKSDGFANRNFMQLIHDDSLTFKEDIQKAQVSGQGDSLHEHIANLAGSPAIKKGILQTVKVVDELVKVMGRHKPENIVIEMARENQTTQKGQKNSRERMKRIEEGIKELGSQILKEHPVENTQLQNEKLYLYYLQNGRDMYVDQELDINRLSDYDVDHIVPQSFLKDDSIDNKVLTRSDKARGKSDNVPSEEVVKKMKNYWRQLLNAKLITQRKFDNLTKAERGGLSELDKAGFIKRQLVETRQITKHVAQILDSRMNTKYDENDKLIREVKVITLKSKLVSDFRKDFQFYKVREINNYHHAHDAYLNAVVGTALIKKYPKLESEFVYGDYKVYDVRKMIAKSEQEIGKATAKYFFYSNIMNFFKTEITLANGEIRKRPLIETNGETGEIVWDKGRDFATVRKVLSMPQVNIVKKTEVQTGGFSKESILPKRNSDKLIARKKDWDPKKYGGFDSPTVAYSVLVVAKVEKGKSKKLKSVKELLGITIMERSSFEKNPIDFLEAKGYKEVKKDLIIKLPKYSLFELENGRKRMLASAGELQKGNELALPSKYVNFLYLASHYEKLKGSPEDNEQKQLFVEQHKHYLDEIIEQISEFSKRVILADANLDKVLSAYNKHRDKPIREQAENIIHLFTLTNLGAPAAFKYFDTTIDRKRYTSTKEVLDATLIHQSITGLYETRIDLSQLGGDGGGGSGGSGGTLNIEDEHRLHETSKEPDVSLGSTWLSDFPQAWAETGGMGLAVRQAPLIIPLKATSTPVSIKQYPMSQEARLGIKPHIQRLLDQGILVPCQSPWNTPLLPVKKPGTNDYRPVQDLREVNKRVEDIHPTVPNPYNLLSGLPPSHQWYTVLDLKDAFFCLRLHPTSQPLFAFEWRDPEMGISGQLTWTRLPQGFKNSPTLFNEALHRDLADFRIQHPDLILLQYVDDLLLAATSELDCQQGTRALLQTLGNLGYRASAKKAQICQKQVKYLGYLLKEGQRWLTEARKETVMGQPTPKTPRQLREFLGKAGFCRLFIPGFAEMAAPLYPLTKPGTLFNWGPDQQKAYQEIKQALLTAPALGLPDLTKPFELFVDEKQGYAKGVLTQKLGPWRRPVAYLSKKLDPVAAGWPPCLRMVAAIAVLTKDAGKLTMGQPLVILAPHAVEALVKQPPDRWLSNARMTHYQALLLDTDRVQFGPVVALNPATLLPLPEEGLQHNCLDILAEAHGTRPDLTDQPLPDADHTWYTDGSSLLQEGQRKAGAAVTTETEVIWAKALPAGTSAQRAELIALTQALKMAEGKKLNVYTDSRYAFATAHIHGEIYRRRGWLTSEGKEIKNKDEILALLKALFLPKRLSIIHCPGHQKGHSAEARGNRMADQAARKAAITETPDTSTLLAGKRTADGSEFEKRTADGSEFESPKKKAKVE

SEQ ID NO: 2854 - protein, 2094 aa, synthetic construct
MPAAKRVKLDGGDKKYSIGLDIGTNSVGWAVITDEYKVPSKKFKVLGNTDRHSIKKNLIGALLFDSGETAEATRLKRTARRRYTRRKNRICYLQEIFSNEMAKVDDSFFHRLEESFLVEEDKKHERHPIFGNIVDEVAYHEKYPTIYHLRKKLVDSTDKADLRLIYLALAHMIKFRGHFLIEGDLNPDNSDVDKLFIQLVQTYNQLFEENPINASGVDAKAILSARLSKSRRLENLIAQLPGEKKNGLFGNLIALSLGLTPNFKSNFDLAEDAKLQLSKDTYDDDLDNLLAQIGDQYADLFLAAKNLSDAILLSDILRVNTEITKAPLSASMIKRYDEHHQDLTLLKALVRQQLPEKYKEIFFDQSKNGYAGYIDGGASQEEFYKFIKPILEKMDGTEELLVKLNREDLLRKQRTFDNGSIPHQIHLGELHAILRRQEDFYPFLKDNREKIEKILTFRIPYYVGPLARGNSRFAWMTRKSEETITPWNFEEVVDKGASAQSFIERMTNFDKNLPNEKVLPKHSLLYEYFTVYNELTKVKYVTEGMRKPAFLSGEQKKAIVDLLFKTNRKVTVKQLKEDYFKKIECFDSVEISGVEDRFNASLGTYHDLLKIIKDKDFLDNEENEDILEDIVLTLTLFEDREMIEERLKTYAHLFDDKVMKQLKRRRYTGWGRLSRKLINGIRDKQSGKTILDFLKSDGFANRNFMQLIHDDSLTFKEDIQKAQVSGQGDSLHEHIANLAGSPAIKKGILQTVKVVDELVKVMGRHKPENIVIEMARENQTTQKGQKNSRERMKRIEEGIKELGSQILKEHPVENTQLQNEKLYLYYLQNGRDMYVDQELDINRLSDYDVDHIVPQSFLKDDSIDNKVLTRSDKARGKSDNVPSEEVVKKMKNYWRQLLNAKLITQRKFDNLTKAERGGLSELDKAGFIKRQLVETRQITKHVAQILDSRMNTKYDENDKLIREVKVITLKSKLVSDFRKDFQFYKVREINNYHHAHDAYLNAVVGTALIKKYPKLESEFVYGDYKVYDVRKMIAKSEQEIGKATAKYFFYSNIMNFFKTEITLANGEIRKRPLIETNGETGEIVWDKGRDFATVRKVLSMPQVNIVKKTEVQTGGFSKESILPKRNSDKLIARKKDWDPKKYGGFDSPTVAYSVLVVAKVEKGKSKKLKSVKELLGITIMERSSFEKNPIDFLEAKGYKEVKKDLIIKLPKYSLFELENGRKRMLASAGELQKGNELALPSKYVNFLYLASHYEKLKGSPEDNEQKQLFVEQHKHYLDEIIEQISEFSKRVILADANLDKVLSAYNKHRDKPIREQAENIIHLFTLTNLGAPAAFKYFDTTIDRKRYTSTKEVLDATLIHQSITGLYETRIDLSQLGGDGGGGGGSSGGSGGTLNIEDEHRLHETSKEPDVSLGSTWLSDFPQAWAETGGMGLAVRQAPLIIPLKATSTPVSIKQYPMSQEARLGIKPHIQRLLDQGILVPCQSPWNTPLLPVKKPGTNDYRPVQDLREVNKRVEDIHPTVPNPYNLLSGLPPSHQWYTVLDLKDAFFCLRLHPTSQPLFAFEWRDPEMGISGQLTWTRLPQGFKNSPTLFNEALHRDLADFRIQHPDLILLQYVDDLLLAATSELDCQQGTRALLQTLGNLGYRASAKKAQICQKQVKYLGYLLKEGQRWLTEARKETVMGQPTPKTPRQLREFLGKAGFCRLFIPGFAEMAAPLYPLTKPGTLFNWGPDQQKAYQEIKQALLTAPALGLPDLTKPFELFVDEKQGYAKGVLTQKLGPWRRPVAYLSKKLDPVAAGWPPCLRMVAAIAVLTKDAGKLTMGQPLVILAPHAVEALVKQPPDRWLSNARMTHYQALLLDTDRVQFGPVVALNPATLLPLPEEGLQHNCLDILAEAHGTRPDLTDQPLPDADHTWYTDGSSLLQEGQRKAGAAVTTETEVIWAKALPAGTSAQRAELIALTQALKMAEGKKLNVYTDSRYAFATAHIHGEIYRRRGWLTSEGKEIKNKDEILALLKALFLPKRLSIIHCPGHQKGHSAEARGNRMADQAARKAAITETPDTSTLLAGKRTADGSEFEKRTADGSEFESPKKKAKVE

SEQ ID NO: 2855 - protein, 2091 aa, synthetic construct
MPAAKRVKLDGGDKKYSIGLDIGTNSVGWAVITDEYKVPSKKFKVLGNTDRHSIKKNLIGALLFDSGETAEATRLKRTARRRYTRRKNRICYLQEIFSNEMAKVDDSFFHRLEESFLVEEDKKHERHPIFGNIVDEVAYHEKYPTIYHLRKKLVDSTDKADLRLIYLALAHMIKFRGHFLIEGDLNPDNSDVDKLFIQLVQTYNQLFEENPINASGVDAKAILSARLSKSRRLENLIAQLPGEKKNGLFGNLIALSLGLTPNFKSNFDLAEDAKLQLSKDTYDDDLDNLLAQIGDQYADLFLAAKNLSDAILLSDILRVNTEITKAPLSASMIKRYDEHHQDLTLLKALVRQQLPEKYKEIFFDQSKNGYAGYIDGGASQEEFYKFIKPILEKMDGTEELLVKLNREDLLRKQRTFDNGSIPHQIHLGELHAILRRQEDFYPFLKDNREKIEKILTFRIPYYVGPLARGNSRFAWMTRKSEETITPWNFEEVVDKGASAQSFIERMTNFDKNLPNEKVLPKHSLLYEYFTVYNELTKVKYVTEGMRKPAFLSGEQKKAIVDLLFKTNRKVTVKQLKEDYFKKIECFDSVEISGVEDRFNASLGTYHDLLKIIKDKDFLDNEENEDILEDIVLTLTLFEDREMIEERLKTYAHLFDDKVMKQLKRRRYTGWGRLSRKLINGIRDKQSGKTILDFLKSDGFANRNFMQLIHDDSLTFKEDIQKAQVSGQGDSLHEHIANLAGSPAIKKGILQTVKVVDELVKVMGRHKPENIVIEMARENQTTQKGQKNSRERMKRIEEGIKELGSQILKEHPVENTQLQNEKLYLYYLQNGRDMYVDQELDINRLSDYDVDHIVPQSFLKDDSIDNKVLTRSDKARGKSDNVPSEEVVKKMKNYWRQLLNAKLITQRKFDNLTKAERGGLSELDKAGFIKRQLVETRQITKHVAQILDSRMNTKYDENDKLIREVKVITLKSKLVSDFRKDFQFYKVREINNYHHAHDAYLNAVVGTALIKKYPKLESEFVYGDYKVYDVRKMIAKSEQEIGKATAKYFFYSNIMNFFKTEITLANGEIRKRPLIETNGETGEIVWDKGRDFATVRKVLSMPQVNIVKKTEVQTGGFSKESILPKRNSDKLIARKKDWDPKKYGGFDSPTVAYSVLVVAKVEKGKSKKLKSVKELLGITIMERSSFEKNPIDFLEAKGYKEVKKDLIIKLPKYSLFELENGRKRMLASAGELQKGNELALPSKYVNFLYLASHYEKLKGSPEDNEQKQLFVEQHKHYLDEIIEQISEFSKRVILADANLDKVLSAYNKHRDKPIREQAENIIHLFTLTNLGAPAAFKYFDTTIDRKRYTSTKEVLDATLIHQSITGLYETRIDLSQLGGDGGGSSGGSGGTLNIEDEHRLHETSKEPDVSLGSTWLSDFPQAWAETGGMGLAVRQAPLIIPLKATSTPVSIKQYPMSQEARLGIKPHIQRLLDQGILVPCQSPWNTPLLPVKKPGTNDYRPVQDLREVNKRVEDIHPTVPNPYNLLSGLPPSHQWYTVLDLKDAFFCLRLHPTSQPLFAFEWRDPEMGISGQLTWTRLPQGFKNSPTLFNEALHRDLADFRIQHPDLILLQYVDDLLLAATSELDCQQGTRALLQTLGNLGYRASAKKAQICQKQVKYLGYLLKEGQRWLTEARKETVMGQPTPKTPRQLREFLGKAGFCRLFIPGFAEMAAPLYPLTKPGTLFNWGPDQQKAYQEIKQALLTAPALGLPDLTKPFELFVDEKQGYAKGVLTQKLGPWRRPVAYLSKKLDPVAAGWPPCLRMVAAIAVLTKDAGKLTMGQPLVILAPHAVEALVKQPPDRWLSNARMTHYQALLLDTDRVQFGPVVALNPATLLPLPEEGLQHNCLDILAEAHGTRPDLTDQPLPDADHTWYTDGSSLLQEGQRKAGAAVTTETEVIWAKALPAGTSAQRAELIALTQALKMAEGKKLNVYTDSRYAFATAHIHGEIYRRRGWLTSEGKEIKNKDEILALLKALFLPKRLSIIHCPGHQKGHSAEARGNRMADQAARKAAITETPDTSTLLAGKRTADGSEFEKRTADGSEFESPKKKAKVE

SEQ ID NO: 2856 - protein, 2093 aa, synthetic construct
MPAAKRVKLDGGDKKYSIGLDIGTNSVGWAVITDEYKVPSKKFKVLGNTDRHSIKKNLIGALLFDSGETAEATRLKRTARRRYTRRKNRICYLQEIFSNEMAKVDDSFFHRLEESFLVEEDKKHERHPIFGNIVDEVAYHEKYPTIYHLRKKLVDSTDKADLRLIYLALAHMIKFRGHFLIEGDLNPDNSDVDKLFIQLVQTYNQLFEENPINASGVDAKAILSARLSKSRRLENLIAQLPGEKKNGLFGNLIALSLGLTPNFKSNFDLAEDAKLQLSKDTYDDDLDNLLAQIGDQYADLFLAAKNLSDAILLSDILRVNTEITKAPLSASMIKRYDEHHQDLTLLKALVRQQLPEKYKEIFFDQSKNGYAGYIDGGASQEEFYKFIKPILEKMDGTEELLVKLNREDLLRKQRTFDNGSIPHQIHLGELHAILRRQEDFYPFLKDNREKIEKILTFRIPYYVGPLARGNSRFAWMTRKSEETITPWNFEEVVDKGASAQSFIERMTNFDKNLPNEKVLPKHSLLYEYFTVYNELTKVKYVTEGMRKPAFLSGEQKKAIVDLLFKTNRKVTVKQLKEDYFKKIECFDSVEISGVEDRFNASLGTYHDLLKIIKDKDFLDNEENEDILEDIVLTLTLFEDREMIEERLKTYAHLFDDKVMKQLKRRRYTGWGRLSRKLINGIRDKQSGKTILDFLKSDGFANRNFMQLIHDDSLTFKEDIQKAQVSGQGDSLHEHIANLAGSPAIKKGILQTVKVVDELVKVMGRHKPENIVIEMARENQTTQKGQKNSRERMKRIEEGIKELGSQILKEHPVENTQLQNEKLYLYYLQNGRDMYVDQELDINRLSDYDVDHIVPQSFLKDDSIDNKVLTRSDKARGKSDNVPSEEVVKKMKNYWRQLLNAKLITQRKFDNLTKAERGGLSELDKAGFIKRQLVETRQITKHVAQILDSRMNTKYDENDKLIREVKVITLKSKLVSDFRKDFQFYKVREINNYHHAHDAYLNAVVGTALIKKYPKLESEFVYGDYKVYDVRKMIAKSEQEIGKATAKYFFYSNIMNFFKTEITLANGEIRKRPLIETNGETGEIVWDKGRDFATVRKVLSMPQVNIVKKTEVQTGGFSKESILPKRNSDKLIARKKDWDPKKYGGFDSPTVAYSVLVVAKVEKGKSKKLKSVKELLGITIMERSSFEKNPIDFLEAKGYKEVKKDLIIKLPKYSLFELENGRKRMLASAGELQKGNELALPSKYVNFLYLASHYEKLKGSPEDNEQKQLFVEQHKHYLDEIIEQISEFSKRVILADANLDKVLSAYNKHRDKPIREQAENIIHLFTLTNLGAPAAFKYFDTTIDRKRYTSTKEVLDATLIHQSITGLYETRIDLSQLGGDGGGGGEAAAKGGTLNIEDEHRLHETSKEPDVSLGSTWLSDFPQAWAETGGMGLAVRQAPLIIPLKATSTPVSIKQYPMSQEARLGIKPHIQRLLDQGILVPCQSPWNTPLLPVKKPGTNDYRPVQDLREVNKRVEDIHPTVPNPYNLLSGLPPSHQWYTVLDLKDAFFCLRLHPTSQPLFAFEWRDPEMGISGQLTWTRLPQGFKNSPTLFNEALHRDLADFRIQHPDLILLQYVDDLLLAATSELDCQQGTRALLQTLGNLGYRASAKKAQICQKQVKYLGYLLKEGQRWLTEARKETVMGQPTPKTPRQLREFLGKAGFCRLFIPGFAEMAAPLYPLTKPGTLFNWGPDQQKAYQEIKQALLTAPALGLPDLTKPFELFVDEKQGYAKGVLTQKLGPWRRPVAYLSKKLDPVAAGWPPCLRMVAAIAVLTKDAGKLTMGQPLVILAPHAVEALVKQPPDRWLSNARMTHYQALLLDTDRVQFGPVVALNPATLLPLPEEGLQHNCLDILAEAHGTRPDLTDQPLPDADHTWYTDGSSLLQEGQRKAGAAVTTETEVIWAKALPAGTSAQRAELIALTQALKMAEGKKLNVYTDSRYAFATAHIHGEIYRRRGWLTSEGKEIKNKDEILALLKALFLPKRLSIIHCPGHQKGHSAEARGNRMADQAARKAAITETPDTSTLLAGKRTADGSEFEKRTADGSEFESPKKKAKVE

SEQ ID NO: 2857 - protein, 2096 aa, synthetic construct
MPAAKRVKLDGGDKKYSIGLDIGTNSVGWAVITDEYKVPSKKFKVLGNTDRHSIKKNLIGALLFDSGETAEATRLKRTARRRYTRRKNRICYLQEIFSNEMAKVDDSFFHRLEESFLVEEDKKHERHPIFGNIVDEVAYHEKYPTIYHLRKKLVDSTDKADLRLIYLALAHMIKFRGHFLIEGDLNPDNSDVDKLFIQLVQTYNQLFEENPINASGVDAKAILSARLSKSRRLENLIAQLPGEKKNGLFGNLIALSLGLTPNFKSNFDLAEDAKLQLSKDTYDDDLDNLLAQIGDQYADLFLAAKNLSDAILLSDILRVNTEITKAPLSASMIKRYDEHHQDLTLLKALVRQQLPEKYKEIFFDQSKNGYAGYIDGGASQEEFYKFIKPILEKMDGTEELLVKLNREDLLRKQRTFDNGSIPHQIHLGELHAILRRQEDFYPFLKDNREKIEKILTFRIPYYVGPLARGNSRFAWMTRKSEETITPWNFEEVVDKGASAQSFIERMTNFDKNLPNEKVLPKHSLLYEYFTVYNELTKVKYVTEGMRKPAFLSGEQKKAIVDLLFKTNRKVTVKQLKEDYFKKIECFDSVEISGVEDRFNASLGTYHDLLKIIKDKDFLDNEENEDILEDIVLTLTLFEDREMIEERLKTYAHLFDDKVMKQLKRRRYTGWGRLSRKLINGIRDKQSGKTILDFLKSDGFANRNFMQLIHDDSLTFKEDIQKAQVSGQGDSLHEHIANLAGSPAIKKGILQTVKVVDELVKVMGRHKPENIVIEMARENQTTQKGQKNSRERMKRIEEGIKELGSQILKEHPVENTQLQNEKLYLYYLQNGRDMYVDQELDINRLSDYDVDHIVPQSFLKDDSIDNKVLTRSDKARGKSDNVPSEEVVKKMKNYWRQLLNAKLITQRKFDNLTKAERGGLSELDKAGFIKRQLVETRQITKHVAQILDSRMNTKYDENDKLIREVKVITLKSKLVSDFRKDFQFYKVREINNYHHAHDAYLNAVVGTALIKKYPKLESEFVYGDYKVYDVRKMIAKSEQEIGKATAKYFFYSNIMNFFKTEITLANGEIRKRPLIETNGETGEIVWDKGRDFATVRKVLSMPQVNIVKKTEVQTGGFSKESILPKRNSDKLIARKKDWDPKKYGGFDSPTVAYSVLVVAKVEKGKSKKLKSVKELLGITIMERSSFEKNPIDFLEAKGYKEVKKDLIIKLPKYSLFELENGRKRMLASAGELQKGNELALPSKYVNFLYLASHYEKLKGSPEDNEQKQLFVEQHKHYLDEIIEQISEFSKRVILADANLDKVLSAYNKHRDKPIREQAENIIHLFTLTNLGAPAAFKYFDTTIDRKRYTSTKEVLDATLIHQSITGLYETRIDLSQLGGDGGGGSEAAAKPAPGGTLNIEDEHRLHETSKEPDVSLGSTWLSDFPQAWAETGGMGLAVRQAPLIIPLKATSTPVSIKQYPMSQEARLGIKPHIQRLLDQGILVPCQSPWNTPLLPVKKPGTNDYRPVQDLREVNKRVEDIHPTVPNPYNLLSGLPPSHQWYTVLDLKDAFFCLRLHPTSQPLFAFEWRDPEMGISGQLTWTRLPQGFKNSPTLFNEALHRDLADFRIQHPDLILLQYVDDLLLAATSELDCQQGTRALLQTLGNLGYRASAKKAQICQKQVKYLGYLLKEGQRWLTEARKETVMGQPTPKTPRQLREFLGKAGFCRLFIPGFAEMAAPLYPLTKPGTLFNWGPDQQKAYQEIKQALLTAPALGLPDLTKPFELFVDEKQGYAKGVLTQKLGPWRRPVAYLSKKLDPVAAGWPPCLRMVAAIAVLTKDAGKLTMGQPLVILAPHAVEALVKQPPDRWLSNARMTHYQALLLDTDRVQFGPVVALNPATLLPLPEEGLQHNCLDILAEAHGTRPDLTDQPLPDADHTWYTDGSSLLQEGQRKAGAAVTTETEVIWAKALPAGTSAQRAELIALTQALKMAEGKKLNVYTDSRYAFATAHIHGEIYRRRGWLTSEGKEIKNKDEILALLKALFLPKRLSIIHCPGHQKGHSAEARGNRMADQAARKAAITETPDTSTLLAGKRTADGSEFEKRTADGSEFESPKKKAKVE

SEQ ID NO: 2858 - protein, 2101 aa, synthetic construct
MPAAKRVKLDGGDKKYSIGLDIGTNSVGWAVITDEYKVPSKKFKVLGNTDRHSIKKNLIGALLFDSGETAEATRLKRTARRRYTRRKNRICYLQEIFSNEMAKVDDSFFHRLEESFLVEEDKKHERHPIFGNIVDEVAYHEKYPTIYHLRKKLVDSTDKADLRLIYLALAHMIKFRGHFLIEGDLNPDNSDVDKLFIQLVQTYNQLFEENPINASGVDAKAILSARLSKSRRLENLIAQLPGEKKNGLFGNLIALSLGLTPNFKSNFDLAEDAKLQLSKDTYDDDLDNLLAQIGDQYADLFLAAKNLSDAILLSDILRVNTEITKAPLSASMIKRYDEHHQDLTLLKALVRQQLPEKYKEIFFDQSKNGYAGYIDGGASQEEFYKFIKPILEKMDGTEELLVKLNREDLLRKQRTFDNGSIPHQIHLGELHAILRRQEDFYPFLKDNREKIEKILTFRIPYYVGPLARGNSRFAWMTRKSEETITPWNFEEVVDKGASAQSFIERMTNFDKNLPNEKVLPKHSLLYEYFTVYNELTKVKYVTEGMRKPAFLSGEQKKAIVDLLFKTNRKVTVKQLKEDYFKKIECFDSVEISGVEDRFNASLGTYHDLLKIIKDKDFLDNEENEDILEDIVLTLTLFEDREMIEERLKTYAHLFDDKVMKQLKRRRYTGWGRLSRKLINGIRDKQSGKTILDFLKSDGFANRNFMQLIHDDSLTFKEDIQKAQVSGQGDSLHEHIANLAGSPAIKKGILQTVKVVDELVKVMGRHKPENIVIEMARENQTTQKGQKNSRERMKRIEEGIKELGSQILKEHPVENTQLQNEKLYLYYLQNGRDMYVDQELDINRLSDYDVDHIVPQSFLKDDSIDNKVLTRSDKARGKSDNVPSEEVVKKMKNYWRQLLNAKLITQRKFDNLTKAERGGLSELDKAGFIKRQLVETRQITKHVAQILDSRMNTKYDENDKLIREVKVITLKSKLVSDFRKDFQFYKVREINNYHHAHDAYLNAVVGTALIKKYPKLESEFVYGDYKVYDVRKMIAKSEQEIGKATAKYFFYSNIMNFFKTEITLANGEIRKRPLIETNGETGEIVWDKGRDFATVRKVLSMPQVNIVKKTEVQTGGFSKESILPKRNSDKLIARKKDWDPKKYGGFDSPTVAYSVLVVAKVEKGKSKKLKSVKELLGITIMERSSFEKNPIDFLEAKGYKEVKKDLIIKLPKYSLFELENGRKRMLASAGELQKGNELALPSKYVNFLYLASHYEKLKGSPEDNEQKQLFVEQHKHYLDEIIEQISEFSKRVILADANLDKVLSAYNKHRDKPIREQAENIIHLFTLTNLGAPAAFKYFDTTIDRKRYTSTKEVLDATLIHQSITGLYETRIDLSQLGGDGGSGSETPGTSESATPESGGTLNIEDEHRLHETSKEPDVSLGSTWLSDFPQAWAETGGMGLAVRQAPLIIPLKATSTPVSIKQYPMSQEARLGIKPHIQRLLDQGILVPCQSPWNTPLLPVKKPGTNDYRPVQDLREVNKRVEDIHPTVPNPYNLLSGLPPSHQWYTVLDLKDAFFCLRLHPTSQPLFAFEWRDPEMGISGQLTWTRLPQGFKNSPTLFNEALHRDLADFRIQHPDLILLQYVDDLLLAATSELDCQQGTRALLQTLGNLGYRASAKKAQICQKQVKYLGYLLKEGQRWLTEARKETVMGQPTPKTPRQLREFLGKAGFCRLFIPGFAEMAAPLYPLTKPGTLFNWGPDQQKAYQEIKQALLTAPALGLPDLTKPFELFVDEKQGYAKGVLTQKLGPWRRPVAYLSKKLDPVAAGWPPCLRMVAAIAVLTKDAGKLTMGQPLVILAPHAVEALVKQPPDRWLSNARMTHYQALLLDTDRVQFGPVVALNPATLLPLPEEGLQHNCLDILAEAHGTRPDLTDQPLPDADHTWYTDGSSLLQEGQRKAGAAVTTETEVIWAKALPAGTSAQRAELIALTQALKMAEGKKLNVYTDSRYAFATAHIHGEIYRRRGWLTSEGKEIKNKDEILALLKALFLPKRLSIIHCPGHQKGHSAEARGNRMADQAARKAAITETPDTSTLLAGKRTADGSEFEKRTADGSEFESPKKKAKVE

SEQ ID NO: 2859 - protein, 2094 aa, synthetic construct
MPAAKRVKLDGGDKKYSIGLDIGTNSVGWAVITDEYKVPSKKFKVLGNTDRHSIKKNLIGALLFDSGETAEATRLKRTARRRYTRRKNRICYLQEIFSNEMAKVDDSFFHRLEESFLVEEDKKHERHPIFGNIVDEVAYHEKYPTIYHLRKKLVDSTDKADLRLIYLALAHMIKFRGHFLIEGDLNPDNSDVDKLFIQLVQTYNQLFEENPINASGVDAKAILSARLSKSRRLENLIAQLPGEKKNGLFGNLIALSLGLTPNFKSNFDLAEDAKLQLSKDTYDDDLDNLLAQIGDQYADLFLAAKNLSDAILLSDILRVNTEITKAPLSASMIKRYDEHHQDLTLLKALVRQQLPEKYKEIFFDQSKNGYAGYIDGGASQEEFYKFIKPILEKMDGTEELLVKLNREDLLRKQRTFDNGSIPHQIHLGELHAILRRQEDFYPFLKDNREKIEKILTFRIPYYVGPLARGNSRFAWMTRKSEETITPWNFEEVVDKGASAQSFIERMTNFDKNLPNEKVLPKHSLLYEYFTVYNELTKVKYVTEGMRKPAFLSGEQKKAIVDLLFKTNRKVTVKQLKEDYFKKIECFDSVEISGVEDRFNASLGTYHDLLKIIKDKDFLDNEENEDILEDIVLTLTLFEDREMIEERLKTYAHLFDDKVMKQLKRRRYTGWGRLSRKLINGIRDKQSGKTILDFLKSDGFANRNFMQLIHDDSLTFKEDIQKAQVSGQGDSLHEHIANLAGSPAIKKGILQTVKVVDELVKVMGRHKPENIVIEMARENQTTQKGQKNSRERMKRIEEGIKELGSQILKEHPVENTQLQNEKLYLYYLQNGRDMYVDQELDINRLSDYDVDHIVPQSFLKDDSIDNKVLTRSDKARGKSDNVPSEEVVKKMKNYWRQLLNAKLITQRKFDNLTKAERGGLSELDKAGFIKRQLVETRQITKHVAQILDSRMNTKYDENDKLIREVKVITLKSKLVSDFRKDFQFYKVREINNYHHAHDAYLNAVVGTALIKKYPKLESEFVYGDYKVYDVRKMIAKSEQEIGKATAKYFFYSNIMNFFKTEITLANGEIRKRPLIETNGETGEIVWDKGRDFATVRKVLSMPQVNIVKKTEVQTGGFSKESILPKRNSDKLIARKKDWDPKKYGGFDSPTVAYSVLVVAKVEKGKSKKLKSVKELLGITIMERSSFEKNPIDFLEAKGYKEVKKDLIIKLPKYSLFELENGRKRMLASAGELQKGNELALPSKYVNFLYLASHYEKLKGSPEDNEQKQLFVEQHKHYLDEIIEQISEFSKRVILADANLDKVLSAYNKHRDKPIREQAENIIHLFTLTNLGAPAAFKYFDTTIDRKRYTSTKEVLDATLIHQSITGLYETRIDLSQLGGDGGGSSGGSGGGGGTLNIEDEHRLHETSKEPDVSLGSTWLSDFPQAWAETGGMGLAVRQAPLIIPLKATSTPVSIKQYPMSQEARLGIKPHIQRLLDQGILVPCQSPWNTPLLPVKKPGTNDYRPVQDLREVNKRVEDIHPTVPNPYNLLSGLPPSHQWYTVLDLKDAFFCLRLHPTSQPLFAFEWRDPEMGISGQLTWTRLPQGFKNSPTLFNEALHRDLADFRIQHPDLILLQYVDDLLLAATSELDCQQGTRALLQTLGNLGYRASAKKAQICQKQVKYLGYLLKEGQRWLTEARKETVMGQPTPKTPRQLREFLGKAGFCRLFIPGFAEMAAPLYPLTKPGTLFNWGPDQQKAYQEIKQALLTAPALGLPDLTKPFELFVDEKQGYAKGVLTQKLGPWRRPVAYLSKKLDPVAAGWPPCLRMVAAIAVLTKDAGKLTMGQPLVILAPHAVEALVKQPPDRWLSNARMTHYQALLLDTDRVQFGPVVALNPATLLPLPEEGLQHNCLDILAEAHGTRPDLTDQPLPDADHTWYTDGSSLLQEGQRKAGAAVTTETEVIWAKALPAGTSAQRAELIALTQALKMAEGKKLNVYTDSRYAFATAHIHGEIYRRRGWLTSEGKEIKNKDEILALLKALFLPKRLSIIHCPGHQKGHSAEARGNRMADQAARKAAITETPDTSTLLAGKRTADGSEFEKRTADGSEFESPKKKAKVE

SEQ ID NO: 2860 - protein, 2096 aa, synthetic construct
MPAAKRVKLDGGDKKYSIGLDIGTNSVGWAVITDEYKVPSKKFKVLGNTDRHSIKKNLIGALLFDSGETAEATRLKRTARRRYTRRKNRICYLQEIFSNEMAKVDDSFFHRLEESFLVEEDKKHERHPIFGNIVDEVAYHEKYPTIYHLRKKLVDSTDKADLRLIYLALAHMIKFRGHFLIEGDLNPDNSDVDKLFIQLVQTYNQLFEENPINASGVDAKAILSARLSKSRRLENLIAQLPGEKKNGLFGNLIALSLGLTPNFKSNFDLAEDAKLQLSKDTYDDDLDNLLAQIGDQYADLFLAAKNLSDAILLSDILRVNTEITKAPLSASMIKRYDEHHQDLTLLKALVRQQLPEKYKEIFFDQSKNGYAGYIDGGASQEEFYKFIKPILEKMDGTEELLVKLNREDLLRKQRTFDNGSIPHQIHLGELHAILRRQEDFYPFLKDNREKIEKILTFRIPYYVGPLARGNSRFAWMTRKSEETITPWNFEEVVDKGASAQSFIERMTNFDKNLPNEKVLPKHSLLYEYFTVYNELTKVKYVTEGMRKPAFLSGEQKKAIVDLLFKTNRKVTVKQLKEDYFKKIECFDSVEISGVEDRFNASLGTYHDLLKIIKDKDFLDNEENEDILEDIVLTLTLFEDREMIEERLKTYAHLFDDKVMKQLKRRRYTGWGRLSRKLINGIRDKQSGKTILDFLKSDGFANRNFMQLIHDDSLTFKEDIQKAQVSGQGDSLHEHIANLAGSPAIKKGILQTVKVVDELVKVMGRHKPENIVIEMARENQTTQKGQKNSRERMKRIEEGIKELGSQILKEHPVENTQLQNEKLYLYYLQNGRDMYVDQELDINRLSDYDVDHIVPQSFLKDDSIDNKVLTRSDKARGKSDNVPSEEVVKKMKNYWRQLLNAKLITQRKFDNLTKAERGGLSELDKAGFIKRQLVETRQITKHVAQILDSRMNTKYDENDKLIREVKVITLKSKLVSDFRKDFQFYKVREINNYHHAHDAYLNAVVGTALIKKYPKLESEFVYGDYKVYDVRKMIAKSEQEIGKATAKYFFYSNIMNFFKTEITLANGEIRKRPLIETNGETGEIVWDKGRDFATVRKVLSMPQVNIVKKTEVQTGGFSKESILPKRNSDKLIARKKDWDPKKYGGFDSPTVAYSVLVVAKVEKGKSKKLKSVKELLGITIMERSSFEKNPIDFLEAKGYKEVKKDLIIKLPKYSLFELENGRKRMLASAGELQKGNELALPSKYVNFLYLASHYEKLKGSPEDNEQKQLFVEQHKHYLDEIIEQISEFSKRVILADANLDKVLSAYNKHRDKPIREQAENIIHLFTLTNLGAPAAFKYFDTTIDRKRYTSTKEVLDATLIHQSITGLYETRIDLSQLGGDGGGSSGGSEAAAKGGTLNIEDEHRLHETSKEPDVSLGSTWLSDFPQAWAETGGMGLAVRQAPLIIPLKATSTPVSIKQYPMSQEARLGIKPHIQRLLDQGILVPCQSPWNTPLLPVKKPGTNDYRPVQDLREVNKRVEDIHPTVPNPYNLLSGLPPSHQWYTVLDLKDAFFCLRLHPTSQPLFAFEWRDPEMGISGQLTWTRLPQGFKNSPTLFNEALHRDLADFRIQHPDLILLQYVDDLLLAATSELDCQQGTRALLQTLGNLGYRASAKKAQICQKQVKYLGYLLKEGQRWLTEARKETVMGQPTPKTPRQLREFLGKAGFCRLFIPGFAEMAAPLYPLTKPGTLFNWGPDQQKAYQEIKQALLTAPALGLPDLTKPFELFVDEKQGYAKGVLTQKLGPWRRPVAYLSKKLDPVAAGWPPCLRMVAAIAVLTKDAGKLTMGQPLVILAPHAVEALVKQPPDRWLSNARMTHYQALLLDTDRVQFGPVVALNPATLLPLPEEGLQHNCLDILAEAHGTRPDLTDQPLPDADHTWYTDGSSLLQEGQRKAGAAVTTETEVIWAKALPAGTSAQRAELIALTQALKMAEGKKLNVYTDSRYAFATAHIHGEIYRRRGWLTSEGKEIKNKDEILALLKALFLPKRLSIIHCPGHQKGHSAEARGNRMADQAARKAAITETPDTSTLLAGKRTADGSEFEKRTADGSEFESPKKKAKVE

SEQ ID NO: 2861 - protein, 2091 aa, synthetic construct
MPAAKRVKLDGGDKKYSIGLDIGTNSVGWAVITDEYKVPSKKFKVLGNTDRHSIKKNLIGALLFDSGETAEATRLKRTARRRYTRRKNRICYLQEIFSNEMAKVDDSFFHRLEESFLVEEDKKHERHPIFGNIVDEVAYHEKYPTIYHLRKKLVDSTDKADLRLIYLALAHMIKFRGHFLIEGDLNPDNSDVDKLFIQLVQTYNQLFEENPINASGVDAKAILSARLSKSRRLENLIAQLPGEKKNGLFGNLIALSLGLTPNFKSNFDLAEDAKLQLSKDTYDDDLDNLLAQIGDQYADLFLAAKNLSDAILLSDILRVNTEITKAPLSASMIKRYDEHHQDLTLLKALVRQQLPEKYKEIFFDQSKNGYAGYIDGGASQEEFYKFIKPILEKMDGTEELLVKLNREDLLRKQRTFDNGSIPHQIHLGELHAILRRQEDFYPFLKDNREKIEKILTFRIPYYVGPLARGNSRFAWMTRKSEETITPWNFEEVVDKGASAQSFIERMTNFDKNLPNEKVLPKHSLLYEYFTVYNELTKVKYVTEGMRKPAFLSGEQKKAIVDLLFKTNRKVTVKQLKEDYFKKIECFDSVEISGVEDRFNASLGTYHDLLKIIKDKDFLDNEENEDILEDIVLTLTLFEDREMIEERLKTYAHLFDDKVMKQLKRRRYTGWGRLSRKLINGIRDKQSGKTILDFLKSDGFANRNFMQLIHDDSLTFKEDIQKAQVSGQGDSLHEHIANLAGSPAIKKGILQTVKVVDELVKVMGRHKPENIVIEMARENQTTQKGQKNSRERMKRIEEGIKELGSQILKEHPVENTQLQNEKLYLYYLQNGRDMYVDQELDINRLSDYDVDHIVPQSFLKDDSIDNKVLTRSDKARGKSDNVPSEEVVKKMKNYWRQLLNAKLITQRKFDNLTKAERGGLSELDKAGFIKRQLVETRQITKHVAQILDSRMNTKYDENDKLIREVKVITLKSKLVSDFRKDFQFYKVREINNYHHAHDAYLNAVVGTALIKKYPKLESEFVYGDYKVYDVRKMIAKSEQEIGKATAKYFFYSNIMNFFKTEITLANGEIRKRPLIETNGETGEIVWDKGRDFATVRKVLSMPQVNIVKKTEVQTGGFSKESILPKRNSDKLIARKKDWDPKKYGGFDSPTVAYSVLVVAKVEKGKSKKLKSVKELLGITIMERSSFEKNPIDFLEAKGYKEVKKDLIIKLPKYSLFELENGRKRMLASAGELQKGNELALPSKYVNFLYLASHYEKLKGSPEDNEQKQLFVEQHKHYLDEIIEQISEFSKRVILADANLDKVLSAYNKHRDKPIREQAENIIHLFTLTNLGAPAAFKYFDTTIDRKRYTSTKEVLDATLIHQSITGLYETRIDLSQLGGDGGGGSGGGGGTLNIEDEHRLHETSKEPDVSLGSTWLSDFPQAWAETGGMGLAVRQAPLIIPLKATSTPVSIKQYPMSQEARLGIKPHIQRLLDQGILVPCQSPWNTPLLPVKKPGTNDYRPVQDLREVNKRVEDIHPTVPNPYNLLSGLPPSHQWYTVLDLKDAFFCLRLHPTSQPLFAFEWRDPEMGISGQLTWTRLPQGFKNSPTLFNEALHRDLADFRIQHPDLILLQYVDDLLLAATSELDCQQGTRALLQTLGNLGYRASAKKAQICQKQVKYLGYLLKEGQRWLTEARKETVMGQPTPKTPRQLREFLGKAGFCRLFIPGFAEMAAPLYPLTKPGTLFNWGPDQQKAYQEIKQALLTAPALGLPDLTKPFELFVDEKQGYAKGVLTQKLGPWRRPVAYLSKKLDPVAAGWPPCLRMVAAIAVLTKDAGKLTMGQPLVILAPHAVEALVKQPPDRWLSNARMTHYQALLLDTDRVQFGPVVALNPATLLPLPEEGLQHNCLDILAEAHGTRPDLTDQPLPDADHTWYTDGSSLLQEGQRKAGAAVTTETEVIWAKALPAGTSAQRAELIALTQALKMAEGKKLNVYTDSRYAFATAHIHGEIYRRRGWLTSEGKEIKNKDEILALLKALFLPKRLSIIHCPGHQKGHSAEARGNRMADQAARKAAITETPDTSTLLAGKRTADGSEFEKRTADGSEFESPKKKAKVE

SEQ ID NO: 2862 - protein, 2116 aa, synthetic construct; identical to SEQ ID NO: 2637

SEQ ID NO: 2863 - protein, 2116 aa, synthetic construct
MPAAKRVKLDGGDKKYSIGLDIGTNSVGWAVITDEYKVPSKKFKVLGNTDRHSIKKNLIGALLFDSGETAEATRLKRTARRRYTRRKNRICYLQEIFSNEMAKVDDSFFHRLEESFLVEEDKKHERHPIFGNIVDEVAYHEKYPTIYHLRKKLVDSTDKADLRLIYLALAHMIKFRGHFLIEGDLNPDNSDVDKLFIQLVQTYNQLFEENPINASGVDAKAILSARLSKSRRLENLIAQLPGEKKNGLFGNLIALSLGLTPNFKSNFDLAEDAKLQLSKDTYDDDLDNLLAQIGDQYADLFLAAKNLSDAILLSDILRVNTEITKAPLSASMIKRYDEHHQDLTLLKALVRQQLPEKYKEIFFDQSKNGYAGYIDGGASQEEFYKFIKPILEKMDGTEELLVKLNREDLLRKQRTFDNGSIPHQIHLGELHAILRRQEDFYPFLKDNREKIEKILTFRIPYYVGPLARGNSRFAWMTRKSEETITPWNFEEVVDKGASAQSFIERMTNFDKNLPNEKVLPKHSLLYEYFTVYNELTKVKYVTEGMRKPAFLSGEQKKAIVDLLFKTNRKVTVKQLKEDYFKKIECFDSVEISGVEDRFNASLGTYHDLLKIIKDKDFLDNEENEDILEDIVLTLTLFEDREMIEERLKTYAHLFDDKVMKQLKRRRYTGWGRLSRKLINGIRDKQSGKTILDFLKSDGFANRNFMQLIHDDSLTFKEDIQKAQVSGQGDSLHEHIANLAGSPAIKKGILQTVKVVDELVKVMGRHKPENIVIEMARENQTTQKGQKNSRERMKRIEEGIKELGSQILKEHPVENTQLQNEKLYLYYLQNGRDMYVDQELDINRLSDYDVDHIVPQSFLKDDSIDNKVLTRSDKARGKSDNVPSEEVVKKMKNYWRQLLNAKLITQRKFDNLTKAERGGLSELDKAGFIKRQLVETRQITKHVAQILDSRMNTKYDENDKLIREVKVITLKSKLVSDFRKDFQFYKVREINNYHHAHDAYLNAVVGTALIKKYPKLESEFVYGDYKVYDVRKMIAKSEQEIGKATAKYFFYSNIMNFFKTEITLANGEIRKRPLIETNGETGEIVWDKGRDFATVRKVLSMPQVNIVKKTEVQTGGFSKESILPKRNSDKLIARKKDWDPKKYGGFDSPTVAYSVLVVAKVEKGKSKKLKSVKELLGITIMERSSFEKNPIDFLEAKGYKEVKKDLIIKLPKYSLFELENGRKRMLASAGELQKGNELALPSKYVNFLYLASHYEKLKGSPEDNEQKQLFVEQHKHYLDEIIEQISEFSKRVILADANLDKVLSAYNKHRDKPIREQAENIIHLFTLTNLGAPAAFKYFDTTIDRKRYTSTKEVLDATLIHQSITGLYETRIDLSQLGGDGGEAAAKGGGGGSGGTLNIEDEYRLHETSKEPDVSLGSTWLSDFPQAWAETGGMGLAVRQAPLIIPLKATSTPVSIKQYPMSQEARLGIKPHIQRLLDQGILVPCQSPWNTPLLPVKKPGTNDYRPVQDLREVNKRVEDIHPTVPNPYNLLSGLPPSHQWYTVLDLKDAFFCLRLHPTSQPLFAFEWRDPEMGISGQLTWTRLPQGFKNSPTLFNEALHRDLADFRIQHPDLILLQYVDDLLLAATSELDCQQGTRALLQTLGNLGYRASAKKAQICQKQVKYLGYLLKEGQRWLTEARKETVMGQPTPKTPRQLREFLGKAGFCRLFIPGFAEMAAPLYPLTKPGTLFNWGPDQQKAYQEIKQALLTAPALGLPDLTKPFELFVDEKQGYAKGVLTQKLGPWRRPVAYLSKKLDPVAAGWPPCLRMVAAIAVLTKDAGKLTMGQPLVILAPHAVEALVKQPPDRWLSNARMTHYQALLLDTDRVQFGPVVALNPATLLPLPEEGLQHNCLDILAEAHGTRPDLTDQPLPDADHTWYTDGSSLLQEGQRKAGAAVTTETEVIWAKALPAGTSAQRAELIALTQALKMAEGKKLNVYTDSRYAFATAHIHGEIYRRRGWLTSEGKEIKNKDEILALLKALFLPKRLSIIHCPGHQKGHSAEARGNRMADQAARKAAITETPDTSTLLIENSSPSGGSKRTADGSEFEAGKRTADGSEFEKRTADGSEFESPKKKAKVE

SEQ ID NO: 2864 - protein, 2108 aa, synthetic construct; identical to SEQ ID NO: 2655

SEQ ID NO: 2865 - protein, 2108 aa, synthetic construct; identical to SEQ ID NO: 2624

SEQ ID NO: 2866 - protein, 2116 aa, synthetic construct; identical to SEQ ID NO: 2692

SEQ ID NO: 2867 - protein, 2117 aa, synthetic construct; identical to SEQ ID NO: 2665

SEQ ID NO: 2868 - protein, 2118 aa, synthetic construct
MPAAKRVKLDGGDKKYSIGLDIGTNSVGWAVITDEYKVPSKKFKVLGNTDRHSIKKNLIGALLFDSGETAEATRLKRTARRRYTRRKNRICYLQEIFSNEMAKVDDSFFHRLEESFLVEEDKKHERHPIFGNIVDEVAYHEKYPTIYHLRKKLVDSTDKADLRLIYLALAHMIKFRGHFLIEGDLNPDNSDVDKLFIQLVQTYNQLFEENPINASGVDAKAILSARLSKSRRLENLIAQLPGEKKNGLFGNLIALSLGLTPNFKSNFDLAEDAKLQLSKDTYDDDLDNLLAQIGDQYADLFLAAKNLSDAILLSDILRVNTEITKAPLSASMIKRYDEHHQDLTLLKALVRQQLPEKYKEIFFDQSKNGYAGYIDGGASQEEFYKFIKPILEKMDGTEELLVKLNREDLLRKQRTFDNGSIPHQIHLGELHAILRRQEDFYPFLKDNREKIEKILTFRIPYYVGPLARGNSRFAWMTRKSEETITPWNFEEVVDKGASAQSFIERMTNFDKNLPNEKVLPKHSLLYEYFTVYNELTKVKYVTEGMRKPAFLSGEQKKAIVDLLFKTNRKVTVKQLKEDYFKKIECFDSVEISGVEDRFNASLGTYHDLLKIIKDKDFLDNEENEDILEDIVLTLTLFEDREMIEERLKTYAHLFDDKVMKQLKRRRYTGWGRLSRKLINGIRDKQSGKTILDFLKSDGFANRNFMQLIHDDSLTFKEDIQKAQVSGQGDSLHEHIANLAGSPAIKKGILQTVKVVDELVKVMGRHKPENIVIEMARENQTTQKGQKNSRERMKRIEEGIKELGSQILKEHPVENTQLQNEKLYLYYLQNGRDMYVDQELDINRLSDYDVDHIVPQSFLKDDSIDNKVLTRSDKARGKSDNVPSEEVVKKMKNYWRQLLNAKLITQRKFDNLTKAERGGLSELDKAGFIKRQLVETRQITKHVAQILDSRMNTKYDENDKLIREVKVITLKSKLVSDFRKDFQFYKVREINNYHHAHDAYLNAVVGTALIKKYPKLESEFVYGDYKVYDVRKMIAKSEQEIGKATAKYFFYSNIMNFFKTEITLANGEIRKRPLIETNGETGEIVWDKGRDFATVRKVLSMPQVNIVKKTEVQTGGFSKESILPKRNSDKLIARKKDWDPKKYGGFDSPTVAYSVLVVAKVEKGKSKKLKSVKELLGITIMERSSFEKNPIDFLEAKGYKEVKKDLIIKLPKYSLFELENGRKRMLASAGELQKGNELALPSKYVNFLYLASHYEKLKGSPEDNEQKQLFVEQHKHYLDEIIEQISEFSKRVILADANLDKVLSAYNKHRDKPIREQAENIIHLFTLTNLGAPAAFKYFDTTIDRKRYTSTKEVLDATLIHQSITGLYETRIDLSQLGGDGGPAPAPAPAPAPAPGGTLNIEDEYRLHETSKEPDVSLGSTWLSDFPQAWAETGGMGLAVRQAPLIIPLKATSTPVSIKQYPMSQEARLGIKPHIQRLLDQGILVPCQSPWNTPLLPVKKPGTNDYRPVQDLREVNKRVEDIHPTVPNPYNLLSGLPPSHQWYTVLDLKDAFFCLRLHPTSQPLFAFEWRDPEMGISGQLTWTRLPQGFKNSPTLFNEALHRDLADFRIQHPDLILLQYVDDLLLAATSELDCQQGTRALLQTLGNLGYRASAKKAQICQKQVKYLGYLLKEGQRWLTEARKETVMGQPTPKTPRQLREFLGKAGFCRLFIPGFAEMAAPLYPLTKPGTLFNWGPDQQKAYQEIKQALLTAPALGLPDLTKPFELFVDEKQGYAKGVLTQKLGPWRRPVAYLSKKLDPVAAGWPPCLRMVAAIAVLTKDAGKLTMGQPLVILAPHAVEALVKQPPDRWLSNARMTHYQALLLDTDRVQFGPVVALNPATLLPLPEEGLQHNCLDILAEAHGTRPDLTDQPLPDADHTWYTDGSSLLQEGQRKAGAAVTTETEVIWAKALPAGTSAQRAELIALTQALKMAEGKKLNVYTDSRYAFATAHIHGEIYRRRGWLTSEGKEIKNKDEILALLKALFLPKRLSIIHCPGHQKGHSAEARGNRMADQAARKAAITETPDTSTLLIENSSPSGGSKRTADGSEFEAGKRTADGSEFEKRTADGSEFESPKKKAKVE

SEQ ID NO: 2869 - protein, 2114 aa, synthetic construct
MPAAKRVKLDGGDKKYSIGLDIGTNSVGWAVITDEYKVPSKKFKVLGNTDRHSIKKNLIGALLFDSGETAEATRLKRTARRRYTRRKNRICYLQEIFSNEMAKVDDSFFHRLEESFLVEEDKKHERHPIFGNIVDEVAYHEKYPTIYHLRKKLVDSTDKADLRLIYLALAHMIKFRGHFLIEGDLNPDNSDVDKLFIQLVQTYNQLFEENPINASGVDAKAILSARLSKSRRLENLIAQLPGEKKNGLFGNLIALSLGLTPNFKSNFDLAEDAKLQLSKDTYDDDLDNLLAQIGDQYADLFLAAKNLSDAILLSDILRVNTEITKAPLSASMIKRYDEHHQDLTLLKALVRQQLPEKYKEIFFDQSKNGYAGYIDGGASQEEFYKFIKPILEKMDGTEELLVKLNREDLLRKQRTFDNGSIPHQIHLGELHAILRRQEDFYPFLKDNREKIEKILTFRIPYYVGPLARGNSRFAWMTRKSEETITPWNFEEVVDKGASAQSFIERMTNFDKNLPNEKVLPKHSLLYEYFTVYNELTKVKYVTEGMRKPAFLSGEQKKAIVDLLFKTNRKVTVKQLKEDYFKKIECFDSVEISGVEDRFNASLGTYHDLLKIIKDKDFLDNEENEDILEDIVLTLTLFEDREMIEERLKTYAHLFDDKVMKQLKRRRYTGWGRLSRKLINGIRDKQSGKTILDFLKSDGFANRNFMQLIHDDSLTFKEDIQKAQVSGQGDSLHEHIANLAGSPAIKKGILQTVKVVDELVKVMGRHKPENIVIEMARENQTTQKGQKNSRERMKRIEEGIKELGSQILKEHPVENTQLQNEKLYLYYLQNGRDMYVDQELDINRLSDYDVDHIVPQSFLKDDSIDNKVLTRSDKARGKSDNVPSEEVVKKMKNYWRQLLNAKLITQRKFDNLTKAERGGLSELDKAGFIKRQLVETRQITKHVAQILDSRMNTKYDENDKLIREVKVITLKSKLVSDFRKDFQFYKVREINNYHHAHDAYLNAVVGTALIKKYPKLESEFVYGDYKVYDVRKMIAKSEQEIGKATAKYFFYSNIMNFFKTEITLANGEIRKRPLIETNGETGEIVWDKGRDFATVRKVLSMPQVNIVKKTEVQTGGFSKESILPKRNSDKLIARKKDWDPKKYGGFDSPTVAYSVLVVAKVEKGKSKKLKSVKELLGITIMERSSFEKNPIDFLEAKGYKEVKKDLIIKLPKYSLFELENGRKRMLASAGELQKGNELALPSKYVNFLYLASHYEKLKGSPEDNEQKQLFVEQHKHYLDEIIEQISEFSKRVILADANLDKVLSAYNKHRDKPIREQAENIIHLFTLTNLGAPAAFKYFDTTIDRKRYTSTKEVLDATLIHQSITGLYETRIDLSQLGGDGGPAPGGGGSSGGTLNIEDEYRLHETSKEPDVSLGSTWLSDFPQAWAETGGMGLAVRQAPLIIPLKATSTPVSIKQYPMSQEARLGIKPHIQRLLDQGILVPCQSPWNTPLLPVKKPGTNDYRPVQDLREVNKRVEDIHPTVPNPYNLLSGLPPSHQWYTVLDLKDAFFCLRLHPTSQPLFAFEWRDPEMGISGQLTWTRLPQGFKNSPTLFNEALHRDLADFRIQHPDLILLQYVDDLLLAATSELDCQQGTRALLQTLGNLGYRASAKKAQICQKQVKYLGYLLKEGQRWLTEARKETVMGQPTPKTPRQLREFLGKAGFCRLFIPGFAEMAAPLYPLTKPGTLFNWGPDQQKAYQEIKQALLTAPALGLPDLTKPFELFVDEKQGYAKGVLTQKLGPWRRPVAYLSKKLDPVAAGWPPCLRMVAAIAVLTKDAGKLTMGQPLVILAPHAVEALVKQPPDRWLSNARMTHYQALLLDTDRVQFGPVVALNPATLLPLPEEGLQHNCLDILAEAHGTRPDLTDQPLPDADHTWYTDGSSLLQEGQRKAGAAVTTETEVIWAKALPAGTSAQRAELIALTQALKMAEGKKLNVYTDSRYAFATAHIHGEIYRRRGWLTSEGKEIKNKDEILALLKALFLPKRLSIIHCPGHQKGHSAEARGNRMADQAARKAAITETPDTSTLLIENSSPSGGSKRTADGSEFEAGKRTADGSEFEKRTADGSEFESPKKKAKVE

SEQ ID NO: 2870 - protein, 2116 aa, synthetic construct; identical to SEQ ID NO: 2677

SEQ ID NO: 2871 - protein, 2111 aa, synthetic construct; identical to SEQ ID NO: 2676

SEQ ID NO: 2872 - protein, 2116 aa, synthetic construct
MPAAKRVKLDGGDKKYSIGLDIGTNSVGWAVITDEYKVPSKKFKVLGNTDRHSIKKNLIGALLFDSGETAEATRLKRTARRRYTRRKNRICYLQEIFSNEMAKVDDSFFHRLEESFLVEEDKKHERHPIFGNIVDEVAYHEKYPTIYHLRKKLVDSTDKADLRLIYLALAHMIKFRGHFLIEGDLNPDNSDVDKLFIQLVQTYNQLFEENPINASGVDAKAILSARLSKSRRLENLIAQLPGEKKNGLFGNLIALSLGLTPNFKSNFDLAEDAKLQLSKDTYDDDLDNLLAQIGDQYADLFLAAKNLSDAILLSDILRVNTEITKAPLSASMIKRYDEHHQDLTLLKALVRQQLPEKYKEIFFDQSKNGYAGYIDGGASQEEFYKFIKPILEKMDGTEELLVKLNREDLLRKQRTFDNGSIPHQIHLGELHAILRRQEDFYPFLKDNREKIEKILTFRIPYYVGPLARGNSRFAWMTRKSEETITPWNFEEVVDKGASAQSFIERMTNFDKNLPNEKVLPKHSLLYEYFTVYNELTKVKYVTEGMRKPAFLSGEQKKAIVDLLFKTNRKVTVKQLKEDYFKKIECFDSVEISGVEDRFNASLGTYHDLLKIIKDKDFLDNEENEDILEDIVLTLTLFEDREMIEERLKTYAHLFDDKVMKQLKRRRYTGWGRLSRKLINGIRDKQSGKTILDFLKSDGFANRNFMQLIHDDSLTFKEDIQKAQVSGQGDSLHEHIANLAGSPAIKKGILQTVKVVDELVKVMGRHKPENIVIEMARENQTTQKGQKNSRERMKRIEEGIKELGSQILKEHPVENTQLQNEKLYLYYLQNGRDMYVDQELDINRLSDYDVDHIVPQSFLKDDSIDNKVLTRSDKARGKSDNVPSEEVVKKMKNYWRQLLNAKLITQRKFDNLTKAERGGLSELDKAGFIKRQLVETRQITKHVAQILDSRMNTKYDENDKLIREVKVITLKSKLVSDFRKDFQFYKVREINNYHHAHDAYLNAVVGTALIKKYPKLESEFVYGDYKVYDVRKMIAKSEQEIGKATAKYFFYSNIMNFFKTEITLANGEIRKRPLIETNGETGEIVWDKGRDFATVRKVLSMPQVNIVKKTEVQTGGFSKESILPKRNSDKLIARKKDWDPKKYGGFDSPTVAYSVLVVAKVEKGKSKKLKSVKELLGITIMERSSFEKNPIDFLEAKGYKEVKKDLIIKLPKYSLFELENGRKRMLASAGELQKGNELALPSKYVNFLYLASHYEKLKGSPEDNEQKQLFVEQHKHYLDEIIEQISEFSKRVILADANLDKVLSAYNKHRDKPIREQAENIIHLFTLTNLGAPAAFKYFDTTIDRKRYTSTKEVLDATLIHQSITGLYETRIDLSQLGGDGGPAPGGGEAAAKGGTLNIEDEYRLHETSKEPDVSLGSTWLSDFPQAWAETGGMGLAVRQAPLIIPLKATSTPVSIKQYPMSQEARLGIKPHIQRLLDQGILVPCQSPWNTPLLPVKKPGTNDYRPVQDLREVNKRVEDIHPTVPNPYNLLSGLPPSHQWYTVLDLKDAFFCLRLHPTSQPLFAFEWRDPEMGISGQLTWTRLPQGFKNSPTLFNEALHRDLADFRIQHPDLILLQYVDDLLLAATSELDCQQGTRALLQTLGNLGYRASAKKAQICQKQVKYLGYLLKEGQRWLTEARKETVMGQPTPKTPRQLREFLGKAGFCRLFIPGFAEMAAPLYPLTKPGTLFNWGPDQQKAYQEIKQALLTAPALGLPDLTKPFELFVDEKQGYAKGVLTQKLGPWRRPVAYLSKKLDPVAAGWPPCLRMVAAIAVLTKDAGKLTMGQPLVILAPHAVEALVKQPPDRWLSNARMTHYQALLLDTDRVQFGPVVALNPATLLPLPEEGLQHNCLDILAEAHGTRPDLTDQPLPDADHTWYTDGSSLLQEGQRKAGAAVTTETEVIWAKALPAGTSAQRAELIALTQALKMAEGKKLNVYTDSRYAFATAHIHGEIYRRRGWLTSEGKEIKNKDEILALLKALFLPKRLSIIHCPGHQKGHSAEARGNRMADQAARKAAITETPDTSTLLIENSSPSGGSKRTADGSEFEAGKRTADGSEFEKRTADGSEFESPKKKAKVE

SEQ ID NO: 2873 - protein, 2116 aa, synthetic construct; identical to SEQ ID NO: 2651

SEQ ID NO: 2874 - protein, 2116 aa, synthetic construct; identical to SEQ ID NO: 2638

SEQ ID NO: 2875 - protein, 2114 aa, synthetic construct; identical to SEQ ID NO: 2685

SEQ ID NO: 2876 - protein, 2114 aa, synthetic construct; identical to SEQ ID NO: 2698

SEQ ID NO: 2877 - protein, 2120 aa, synthetic construct; identical to SEQ ID NO: 2627

SEQ ID NO: 2878 - protein, 2114 aa, synthetic construct; identical to SEQ ID NO: 2649

SEQ ID NO: 2879 - protein, 2116 aa, synthetic construct
MPAAKRVKLDGGDKKYSIGLDIGTNSVGWAVITDEYKVPSKKFKVLGNTDRHSIKKNLIGALLFDSGETAEATRLKRTARRRYTRRKNRICYLQEIFSNEMAKVDDSFFHRLEESFLVEEDKKHERHPIFGNIVDEVAYHEKYPTIYHLRKKLVDSTDKADLRLIYLALAHMIKFRGHFLIEGDLNPDNSDVDKLFIQLVQTYNQLFEENPINASGVDAKAILSARLSKSRRLENLIAQLPGEKKNGLFGNLIALSLGLTPNFKSNFDLAEDAKLQLSKDTYDDDLDNLLAQIGDQYADLFLAAKNLSDAILLSDILRVNTEITKAPLSASMIKRYDEHHQDLTLLKALVRQQLPEKYKEIFFDQSKNGYAGYIDGGASQEEFYKFIKPILEKMDGTEELLVKLNREDLLRKQRTFDNGSIPHQIHLGELHAILRRQEDFYPFLKDNREKIEKILTFRIPYYVGPLARGNSRFAWMTRKSEETITPWNFEEVVDKGASAQSFIERMTNFDKNLPNEKVLPKHSLLYEYFTVYNELTKVKYVTEGMRKPAFLSGEQKKAIVDLLFKTNRKVTVKQLKEDYFKKIECFDSVEISGVEDRFNASLGTYHDLLKIIKDKDFLDNEENEDILEDIVLTLTLFEDREMIEERLKTYAHLFDDKVMKQLKRRRYTGWGRLSRKLINGIRDKQSGKTILDFLKSDGFANRNFMQLIHDDSLTFKEDIQKAQVSGQGDSLHEHIANLAGSPAIKKGILQTVKVVDELVKVMGRHKPENIVIEMARENQTTQKGQKNSRERMKRIEEGIKELGSQILKEHPVENTQLQNEKLYLYYLQNGRDMYVDQELDINRLSDYDVDHIVPQSFLKDDSIDNKVLTRSDKARGKSDNVPSEEVVKKMKNYWRQLLNAKLITQRKFDNLTKAERGGLSELDKAGFIKRQLVETRQITKHVAQILDSRMNTKYDENDKLIREVKVITLKSKLVSDFRKDFQFYKVREINNYHHAHDAYLNAVVGTALIKKYPKLESEFVYGDYKVYDVRKMIAKSEQEIGKATAKYFFYSNIMNFFKTEITLANGEIRKRPLIETNGETGEIVWDKGRDFATVRKVLSMPQVNIVKKTEVQTGGFSKESILPKRNSDKLIARKKDWDPKKYGGFDSPTVAYSVLVVAKVEKGKSKKLKSVKELLGITIMERSSFEKNPIDFLEAKGYKEVKKDLIIKLPKYSLFELENGRKRMLASAGELQKGNELALPSKYVNFLYLASHYEKLKGSPEDNEQKQLFVEQHKHYLDEIIEQISEFSKRVILADANLDKVLSAYNKHRDKPIREQAENIIHLFTLTNLGAPAAFKYFDTTIDRKRYTSTKEVLDATLIHQSITGLYETRIDLSQLGGDGGGGGEAAAKPAPGGTLNIEDEYRLHETSKEPDVSLGSTWLSDFPQAWAETGGMGLAVRQAPLIIPLKATSTPVSIKQYPMSQEARLGIKPHIQRLLDQGILVPCQSPWNTPLLPVKKPGTNDYRPVQDLREVNKRVEDIHPTVPNPYNLLSGLPPSHQWYTVLDLKDAFFCLRLHPTSQPLFAFEWRDPEMGISGQLTWTRLPQGFKNSPTLFNEALHRDLADFRIQHPDLILLQYVDDLLLAATSELDCQQGTRALLQTLGNLGYRASAKKAQICQKQVKYLGYLLKEGQRWLTEARKETVMGQPTPKTPRQLREFLGKAGFCRLFIPGFAEMAAPLYPLTKPGTLFNWGPDQQKAYQEIKQALLTAPALGLPDLTKPFELFVDEKQGYAKGVLTQKLGPWRRPVAYLSKKLDPVAAGWPPCLRMVAAIAVLTKDAGKLTMGQPLVILAPHAVEALVKQPPDRWLSNARMTHYQALLLDTDRVQFGPVVALNPATLLPLPEEGLQHNCLDILAEAHGTRPDLTDQPLPDADHTWYTDGSSLLQEGQRKAGAAVTTETEVIWAKALPAGTSAQRAELIALTQALKMAEGKKLNVYTDSRYAFATAHIHGEIYRRRGWLTSEGKEIKNKDEILALLKALFLPKRLSIIHCPGHQKGHSAEARGNRMADQAARKAAITETPDTSTLLIENSSPSGGSKRTADGSEFEAGKRTADGSEFEKRTADGSEFESPKKKAKVE

SEQ ID NO: 2880 - protein, 2130 aa, synthetic construct; identical to SEQ ID NO: 2678

SEQ ID NO: 2881 - protein, 2110 aa, synthetic construct; identical to SEQ ID NO: 2620

SEQ ID NO: 2882 - protein, 2117 aa, synthetic construct; identical to SEQ ID NO: 2687

SEQ ID NO: 2883 - protein, 2113 aa, synthetic construct
MPAAKRVKLDGGDKKYSIGLDIGTNSVGWAVITDEYKVPSKKFKVLGNTDRHSIKKNLIGALLFDSGETAEATRLKRTARRRYTRRKNRICYLQEIFSNEMAKVDDSFFHRLEESFLVEEDKKHERHPIFGNIVDEVAYHEKYPTIYHLRKKLVDSTDKADLRLIYLALAHMIKFRGHFLIEGDLNPDNSDVDKLFIQLVQTYNQLFEENPINASGVDAKAILSARLSKSRRLENLIAQLPGEKKNGLFGNLIALSLGLTPNFKSNFDLAEDAKLQLSKDTYDDDLDNLLAQIGDQYADLFLAAKNLSDAILLSDILRVNTEITKAPLSASMIKRYDEHHQDLTLLKALVRQQLPEKYKEIFFDQSKNGYAGYIDGGASQEEFYKFIKPILEKMDGTEELLVKLNREDLLRKQRTFDNGSIPHQIHLGELHAILRRQEDFYPFLKDNREKIEKILTFRIPYYVGPLARGNSRFAWMTRKSEETITPWNFEEVVDKGASAQSFIERMTNFDKNLPNEKVLPKHSLLYEYFTVYNELTKVKYVTEGMRKPAFLSGEQKKAIVDLLFKTNRKVTVKQLKEDYFKKIECFDSVEISGVEDRFNASLGTYHDLLKIIKDKDFLDNEENEDILEDIVLTLTLFEDREMIEERLKTYAHLFDDKVMKQLKRRRYTGWGRLSRKLINGIRDKQSGKTILDFLKSDGFANRNFMQLIHDDSLTFKEDIQKAQVSGQGDSLHEHIANLAGSPAIKKGILQTVKVVDELVKVMGRHKPENIVIEMARENQTTQKGQKNSRERMKRIEEGIKELGSQILKEHPVENTQLQNEKLYLYYLQNGRDMYVDQELDINRLSDYDVDHIVPQSFLKDDSIDNKVLTRSDKARGKSDNVPSEEVVKKMKNYWRQLLNAKLITQRKFDNLTKAERGGLSELDKAGFIKRQLVETRQITKHVAQILDSRMNTKYDENDKLIREVKVITLKSKLVSDFRKDFQFYKVREINNYHHAHDAYLNAVVGTALIKKYPKLESEFVYGDYKVYDVRKMIAKSEQEIGKATAKYFFYSNIMNFFKTEITLANGEIRKRPLIETNGETGEIVWDKGRDFATVRKVLSMPQVNIVKKTEVQTGGFSKESILPKRNSDKLIARKKDWDPKKYGGFDSPTVAYSVLVVAKVEKGKSKKLKSVKELLGITIMERSSFEKNPIDFLEAKGYKEVKKDLIIKLPKYSLFELENGRKRMLASAGELQKGNELALPSKYVNFLYLASHYEKLKGSPEDNEQKQLFVEQHKHYLDEIIEQISEFSKRVILADANLDKVLSAYNKHRDKPIREQAENIIHLFTLTNLGAPAAFKYFDTTIDRKRYTSTKEVLDATLIHQSITGLYETRIDLSQLGGDGGPAPEAAAKGGTLNIEDEYRLHETSKEPDVSLGSTWLSDFPQAWAETGGMGLAVRQAPLIIPLKATSTPVSIKQYPMSQEARLGIKPHIQRLLDQGILVPCQSPWNTPLLPVKKPGTNDYRPVQDLREVNKRVEDIHPTVPNPYNLLSGLPPSHQWYTVLDLKDAFFCLRLHPTSQPLFAFEWRDPEMGISGQLTWTRLPQGFKNSPTLFNEALHRDLADFRIQHPDLILLQYVDDLLLAATSELDCQQGTRALLQTLGNLGYRASAKKAQICQKQVKYLGYLLKEGQRWLTEARKETVMGQPTPKTPRQLREFLGKAGFCRLFIPGFAEMAAPLYPLTKPGTLFNWGPDQQKAYQEIKQALLTAPALGLPDLTKPFELFVDEKQGYAKGVLTQKLGPWRRPVAYLSKKLDPVAAGWPPCLRMVAAIAVLTKDAGKLTMGQPLVILAPHAVEALVKQPPDRWLSNARMTHYQALLLDTDRVQFGPVVALNPATLLPLPEEGLQHNCLDILAEAHGTRPDLTDQPLPDADHTWYTDGSSLLQEGQRKAGAAVTTETEVIWAKALPAGTSAQRAELIALTQALKMAEGKKLNVYTDSRYAFATAHIHGEIYRRRGWLTSEGKEIKNKDEILALLKALFLPKRLSIIHCPGHQKGHSAEARGNRMADQAARKAAITETPDTSTLLIENSSPSGGSKRTADGSEFEAGKRTADGSEFEKRTADGSEFESPKKKAKVE

SEQ ID NO: 2884 - protein, 2116 aa, synthetic construct; identical to SEQ ID NO: 2674

SEQ ID NO: 2885 - protein, 2116 aa, synthetic construct; identical to SEQ ID NO: 2688

SEQ ID NO: 2886 - protein, 2111 aa, synthetic construct; identical to SEQ ID NO: 2653

SEQ ID NO: 2887 - protein, 2115 aa, synthetic construct; identical to SEQ ID NO: 2647

SEQ ID NO: 2888 - protein, 2125 aa, synthetic construct; identical to SEQ ID NO: 2610

SEQ ID NO: 2889 - protein, 2116 aa, synthetic construct; identical to SEQ ID NO: 2683

SEQ ID NO: 2890 - protein, 2114 aa, synthetic construct; identical to SEQ ID NO: 2633

SEQ ID NO: 2891 - protein, 2116 aa, synthetic construct; identical to SEQ ID NO: 2641

SEQ ID NO: 2892 - protein, 2138 aa, synthetic construct
MPAAKRVKLDGGDKKYSIGLDIGTNSVGWAVITDEYKVPSKKFKVLGNTDRHSIKKNLIGALLFDSGETAEATRLKRTARRRYTRRKNRICYLQEIFSNEMAKVDDSFFHRLEESFLVEEDKKHERHPIFGNIVDEVAYHEKYPTIYHLRKKLVDSTDKADLRLIYLALAHMIKFRGHFLIEGDLNPDNSDVDKLFIQLVQTYNQLFEENPINASGVDAKAILSARLSKSRRLENLIAQLPGEKKNGLFGNLIALSLGLTPNFKSNFDLAEDAKLQLSKDTYDDDLDNLLAQIGDQYADLFLAAKNLSDAILLSDILRVNTEITKAPLSASMIKRYDEHHQDLTLLKALVRQQLPEKYKEIFFDQSKNGYAGYIDGGASQEEFYKFIKPILEKMDGTEELLVKLNREDLLRKQRTFDNGSIPHQIHLGELHAILRRQEDFYPFLKDNREKIEKILTFRIPYYVGPLARGNSRFAWMTRKSEETITPWNFEEVVDKGASAQSFIERMTNFDKNLPNEKVLPKHSLLYEYFTVYNELTKVKYVTEGMRKPAFLSGEQKKAIVDLLFKTNRKVTVKQLKEDYFKKIECFDSVEISGVEDRFNASLGTYHDLLKIIKDKDFLDNEENEDILEDIVLTLTLFEDREMIEERLKTYAHLFDDKVMKQLKRRRYTGWGRLSRKLINGIRDKQSGKTILDFLKSDGFANRNFMQLIHDDSLTFKEDIQKAQVSGQGDSLHEHIANLAGSPAIKKGILQTVKVVDELVKVMGRHKPENIVIEMARENQTTQKGQKNSRERMKRIEEGIKELGSQILKEHPVENTQLQNEKLYLYYLQNGRDMYVDQELDINRLSDYDVDHIVPQSFLKDDSIDNKVLTRSDKARGKSDNVPSEEVVKKMKNYWRQLLNAKLITQRKFDNLTKAERGGLSELDKAGFIKRQLVETRQITKHVAQILDSRMNTKYDENDKLIREVKVITLKSKLVSDFRKDFQFYKVREINNYHHAHDAYLNAVVGTALIKKYPKLESEFVYGDYKVYDVRKMIAKSEQEIGKATAKYFFYSNIMNFFKTEITLANGEIRKRPLIETNGETGEIVWDKGRDFATVRKVLSMPQVNIVKKTEVQTGGFSKESILPKRNSDKLIARKKDWDPKKYGGFDSPTVAYSVLVVAKVEKGKSKKLKSVKELLGITIMERSSFEKNPIDFLEAKGYKEVKKDLIIKLPKYSLFELENGRKRMLASAGELQKGNELALPSKYVNFLYLASHYEKLKGSPEDNEQKQLFVEQHKHYLDEIIEQISEFSKRVILADANLDKVLSAYNKHRDKPIREQAENIIHLFTLTNLGAPAAFKYFDTTIDRKRYTSTKEVLDATLIHQSITGLYETRIDLSQLGGDGGSGGSSGGSSGSETPGTSESATPESSGGSSGGSSGGTLNIEDEYRLHETSKEPDVSLGSTWLSDFPQAWAETGGMGLAVRQAPLIIPLKATSTPVSIKQYPMSQEARLGIKPHIQRLLDQGILVPCQSPWNTPLLPVKKPGTNDYRPVQDLREVNKRVEDIHPTVPNPYNLLSGLPPSHQWYTVLDLKDAFFCLRLHPTSQPLFAFEWRDPEMGISGQLTWTRLPQGFKNSPTLFNEALHRDLADFRIQHPDLILLQYVDDLLLAATSELDCQQGTRALLQTLGNLGYRASAKKAQICQKQVKYLGYLLKEGQRWLTEARKETVMGQPTPKTPRQLREFLGKAGFCRLFIPGFAEMAAPLYPLTKPGTLFNWGPDQQKAYQEIKQALLTAPALGLPDLTKPFELFVDEKQGYAKGVLTQKLGPWRRPVAYLSKKLDPVAAGWPPCLRMVAAIAVLTKDAGKLTMGQPLVILAPHAVEALVKQPPDRWLSNARMTHYQALLLDTDRVQFGPVVALNPATLLPLPEEGLQHNCLDILAEAHGTRPDLTDQPLPDADHTWYTDGSSLLQEGQRKAGAAVTTETEVIWAKALPAGTSAQRAELIALTQALKMAEGKKLNVYTDSRYAFATAHIHGEIYRRRGWLTSEGKEIKNKDEILALLKALFLPKRLSIIHCPGHQKGHSAEARGNRMADQAARKAAITETPDTSTLLIENSSPSGGSKRTADGSEFEAGKRTADGSEFEKRTADGSEFESPKKKAKVE

SEQ ID NO: 2893 - protein, 2116 aa, synthetic construct; identical to SEQ ID NO: 2701

SEQ ID NO: 2894 - protein, 2114 aa, synthetic construct; identical to SEQ ID NO: 2684

SEQ ID NO: 2895 - protein, 2114 aa, synthetic construct; identical to SEQ ID NO: 2622

SEQ ID NO: 2896 - protein, 2116 aa, synthetic construct; identical to SEQ ID NO: 2645

SEQ ID NO: 2897 - protein, 2116 aa, synthetic construct; identical to SEQ ID NO: 2658

SEQ ID NO: 2898 - protein, 2114 aa, synthetic construct; identical to SEQ ID NO: 2670

SEQ ID NO: 2899 - protein, 2110 aa, synthetic construct
MPAAKRVKLDGGDKKYSIGLDIGTNSVGWAVITDEYKVPSKKFKVLGNTDRHSIKKNLIGALLFDSGETAEATRLKRTARRRYTRRKNRICYLQEIFSNEMAKVDDSFFHRLEESFLVEEDKKHERHPIFGNIVDEVAYHEKYPTIYHLRKKLVDSTDKADLRLIYLALAHMIKFRGHFLIEGDLNPDNSDVDKLFIQLVQTYNQLFEENPINASGVDAKAILSARLSKSRRLENLIAQLPGEKKNGLFGNLIALSLGLTPNFKSNFDLAEDAKLQLSKDTYDDDLDNLLAQIGDQYADLFLAAKNLSDAILLSDILRVNTEITKAPLSASMIKRYDEHHQDLTLLKALVRQQLPEKYKEIFFDQSKNGYAGYIDGGASQEEFYKFIKPILEKMDGTEELLVKLNREDLLRKQRTFDNGSIPHQIHLGELHAILRRQEDFYPFLKDNREKIEKILTFRIPYYVGPLARGNSRFAWMTRKSEETITPWNFEEVVDKGASAQSFIERMTNFDKNLPNEKVLPKHSLLYEYFTVYNELTKVKYVTEGMRKPAFLSGEQKKAIVDLLFKTNRKVTVKQLKEDYFKKIECFDSVEISGVEDRFNASLGTYHDLLKIIKDKDFLDNEENEDILEDIVLTLTLFEDREMIEERLKTYAHLFDDKVMKQLKRRRYTGWGRLSRKLINGIRDKQSGKTILDFLKSDGFANRNFMQLIHDDSLTFKEDIQKAQVSGQGDSLHEHIANLAGSPAIKKGILQTVKVVDELVKVMGRHKPENIVIEMARENQTTQKGQKNSRERMKRIEEGIKELGSQILKEHPVENTQLQNEKLYLYYLQNGRDMYVDQELDINRLSDYDVDHIVPQSFLKDDSIDNKVLTRSDKARGKSDNVPSEEVVKKMKNYWRQLLNAKLITQRKFDNLTKAERGGLSELDKAGFIKRQLVETRQITKHVAQILDSRMNTKYDENDKLIREVKVITLKSKLVSDFRKDFQFYKVREINNYHHAHDAYLNAVVGTALIKKYPKLESEFVYGDYKVYDVRKMIAKSEQEIGKATAKYFFYSNIMNFFKTEITLANGEIRKRPLIETNGETGEIVWDKGRDFATVRKVLSMPQVNIVKKTEVQTGGFSKESILPKRNSDKLIARKKDWDPKKYGGFDSPTVAYSVLVVAKVEKGKSKKLKSVKELLGITIMERSSFEKNPIDFLEAKGYKEVKKDLIIKLPKYSLFELENGRKRMLASAGELQKGNELALPSKYVNFLYLASHYEKLKGSPEDNEQKQLFVEQHKHYLDEIIEQISEFSKRVILADANLDKVLSAYNKHRDKPIREQAENIIHLFTLTNLGAPAAFKYFDTTIDRKRYTSTKEVLDATLIHQSITGLYETRIDLSQLGGDGGGGGGGGGTLNIEDEYRLHETSKEPDVSLGSTWLSDFPQAWAETGGMGLAVRQAPLIIPLKATSTPVSIKQYPMSQEARLGIKPHIQRLLDQGILVPCQSPWNTPLLPVKKPGTNDYRPVQDLREVNKRVEDIHPTVPNPYNLLSGLPPSHQWYTVLDLKDAFFCLRLHPTSQPLFAFEWRDPEMGISGQLTWTRLPQGFKNSPTLFNEALHRDLADFRIQHPDLILLQYVDDLLLAATSELDCQQGTRALLQTLGNLGYRASAKKAQICQKQVKYLGYLLKEGQRWLTEARKETVMGQPTPKTPRQLREFLGKAGFCRLFIPGFAEMAAPLYPLTKPGTLFNWGPDQQKAYQEIKQALLTAPALGLPDLTKPFELFVDEKQGYAKGVLTQKLGPWRRPVAYLSKKLDPVAAGWPPCLRMVAAIAVLTKDAGKLTMGQPLVILAPHAVEALVKQPPDRWLSNARMTHYQALLLDTDRVQFGPVVALNPATLLPLPEEGLQHNCLDILAEAHGTRPDLTDQPLPDADHTWYTDGSSLLQEGQRKAGAAVTTETEVIWAKALPAGTSAQRAELIALTQALKMAEGKKLNVYTDSRYAFATAHIHGEIYRRRGWLTSEGKEIKNKDEILALLKALFLPKRLSIIHCPGHQKGHSAEARGNRMADQAARKAAITETPDTSTLLIENSSPSGGSKRTADGSEFEAGKRTADGSEFEKRTADGSEFESPKKKAKVE

SEQ ID NO: 2900 - protein, 2120 aa, synthetic construct; identical to SEQ ID NO: 2662

SEQ ID NO: 2901 - protein, 2116 aa, synthetic construct; identical to SEQ ID NO: 2629

SEQ ID NO: 2902 - protein, 2117 aa, synthetic construct; identical to SEQ ID NO: 2696

SEQ ID NO: 2903 - protein, 2114 aa, synthetic construct; identical to SEQ ID NO: 2634

SEQ ID NO: 2904 - protein, 2114 aa, synthetic construct; identical to SEQ ID NO: 2618

SEQ ID NO: 2905 - protein, 2111 aa, synthetic construct
MPAAKRVKLDGGDKKYSIGLDIGTNSVGWAVITDEYKVPSKKFKVLGNTDRHSIKKNLIGALLFDSGETAEATRLKRTARRRYTRRKNRICYLQEIFSNEMAKVDDSFFHRLEESFLVEEDKKHERHPIFGNIVDEVAYHEKYPTIYHLRKKLVDSTDKADLRLIYLALAHMIKFRGHFLIEGDLNPDNSDVDKLFIQLVQTYNQLFEENPINASGVDAKAILSARLSKSRRLENLIAQLPGEKKNGLFGNLIALSLGLTPNFKSNFDLAEDAKLQLSKDTYDDDLDNLLAQIGDQYADLFLAAKNLSDAILLSDILRVNTEITKAPLSASMIKRYDEHHQDLTLLKALVRQQLPEKYKEIFFDQSKNGYAGYIDGGASQEEFYKFIKPILEKMDGTEELLVKLNREDLLRKQRTFDNGSIPHQIHLGELHAILRRQEDFYPFLKDNREKIEKILTFRIPYYVGPLARGNSRFAWMTRKSEETITPWNFEEVVDKGASAQSFIERMTNFDKNLPNEKVLPKHSLLYEYFTVYNELTKVKYVTEGMRKPAFLSGEQKKAIVDLLFKTNRKVTVKQLKEDYFKKIECFDSVEISGVEDRFNASLGTYHDLLKIIKDKDFLDNEENEDILEDIVLTLTLFEDREMIEERLKTYAHLFDDKVMKQLKRRRYTGWGRLSRKLINGIRDKQSGKTILDFLKSDGFANRNFMQLIHDDSLTFKEDIQKAQVSGQGDSLHEHIANLAGSPAIKKGILQTVKVVDELVKVMGRHKPENIVIEMARENQTTQKGQKNSRERMKRIEEGIKELGSQILKEHPVENTQLQNEKLYLYYLQNGRDMYVDQELDINRLSDYDVDHIVPQSFLKDDSIDNKVLTRSDKARGKSDNVPSEEVVKKMKNYWRQLLNAKLITQRKFDNLTKAERGGLSELDKAGFIKRQLVETRQITKHVAQILDSRMNTKYDENDKLIREVKVITLKSKLVSDFRKDFQFYKVREINNYHHAHDAYLNAVVGTALIKKYPKLESEFVYGDYKVYDVRKMIAKSEQEIGKATAKYFFYSNIMNFFKTEITLANGEIRKRPLIETNGETGEIVWDKGRDFATVRKVLSMPQVNIVKKTEVQTGGFSKESILPKRNSDKLIARKKDWDPKKYGGFDSPTVAYSVLVVAKVEKGKSKKLKSVKELLGITIMERSSFEKNPIDFLEAKGYKEVKKDLIIKLPKYSLFELENGRKRMLASAGELQKGNELALPSKYVNFLYLASHYEKLKGSPEDNEQKQLFVEQHKHYLDEIIEQISEFSKRVILADANLDKVLSAYNKHRDKPIREQAENIIHLFTLTNLGAPAAFKYFDTTIDRKRYTSTKEVLDATLIHQSITGLYETRIDLSQLGGDGGGSSGSSGGTLNIEDEYRLHETSKEPDVSLGSTWLSDFPQAWAETGGMGLAVRQAPLIIPLKATSTPVSIKQYPMSQEARLGIKPHIQRLLDQGILVPCQSPWNTPLLPVKKPGTNDYRPVQDLREVNKRVEDIHPTVPNPYNLLSGLPPSHQWYTVLDLKDAFFCLRLHPTSQPLFAFEWRDPEMGISGQLTWTRLPQGFKNSPTLFNEALHRDLADFRIQHPDLILLQYVDDLLLAATSELDCQQGTRALLQTLGNLGYRASAKKAQICQKQVKYLGYLLKEGQRWLTEARKETVMGQPTPKTPRQLREFLGKAGFCRLFIPGFAEMAAPLYPLTKPGTLFNWGPDQQKAYQEIKQALLTAPALGLPDLTKPFELFVDEKQGYAKGVLTQKLGPWRRPVAYLSKKLDPVAAGWPPCLRMVAAIAVLTKDAGKLTMGQPLVILAPHAVEALVKQPPDRWLSNARMTHYQALLLDTDRVQFGPVVALNPATLLPLPEEGLQHNCLDILAEAHGTRPDLTDQPLPDADHTWYTDGSSLLQEGQRKAGAAVTTETEVIWAKALPAGTSAQRAELIALTQALKMAEGKKLNVYTDSRYAFATAHIHGEIYRRRGWLTSEGKEIKNKDEILALLKALFLPKRLSIIHCPGHQKGHSAEARGNRMADQAARKAAITETPDTSTLLIENSSPSGGSKRTADGSEFEAGKRTADGSEFEKRTADGSEFESPKKKAKVE

SEQ ID NO: 2906 - protein, 2111 aa, synthetic construct; identical to SEQ ID NO: 2643

SEQ ID NO: 2907 - protein, 2121 aa, synthetic construct; identical to SEQ ID NO: 2663

SEQ ID NO: 2908 - protein, 2113 aa, synthetic construct; identical to SEQ ID NO: 2626

SEQ ID NO: 2909 - protein, 2115 aa, synthetic construct; identical to SEQ ID NO: 2639

SEQ ID NO: 2910 - protein, 2111 aa, synthetic construct; identical to SEQ ID NO: 2671

SEQ ID NO: 2911 - protein, 2111 aa, synthetic construct; identical to SEQ ID NO: 2672

SEQ ID NO: 2912 - protein, 2116 aa, synthetic construct; identical to SEQ ID NO: 2703

SEQ ID NO: 2913 - protein, 2116 aa, synthetic construct; identical to SEQ ID NO: 2660

SEQ ID NO: 2914 - protein, 2111 aa, synthetic construct
MPAAKRVKLDGGDKKYSIGLDIGTNSVGWAVITDEYKVPSKKFKVLGNTDRHSIKKNLIGALLFDSGETAEATRLKRTARRRYTRRKNRICYLQEIFSNEMAKVDDSFFHRLEESFLVEEDKKHERHPIFGNIVDEVAYHEKYPTIYHLRKKLVDSTDKADLRLIYLALAHMIKFRGHFLIEGDLNPDNSDVDKLFIQLVQTYNQLFEENPINASGVDAKAILSARLSKSRRLENLIAQLPGEKKNGLFGNLIALSLGLTPNFKSNFDLAEDAKLQLSKDTYDDDLDNLLAQIGDQYADLFLAAKNLSDAILLSDILRVNTEITKAPLSASMIKRYDEHHQDLTLLKALVRQQLPEKYKEIFFDQSKNGYAGYIDGGASQEEFYKFIKPILEKMDGTEELLVKLNREDLLRKQRTFDNGSIPHQIHLGELHAILRRQEDFYPFLKDNREKIEKILTFRIPYYVGPLARGNSRFAWMTRKSEETITPWNFEEVVDKGASAQSFIERMTNFDKNLPNEKVLPKHSLLYEYFTVYNELTKVKYVTEGMRKPAFLSGEQKKAIVDLLFKTNRKVTVKQLKEDYFKKIECFDSVEISGVEDRFNASLGTYHDLLKIIKDKDFLDNEENEDILEDIVLTLTLFEDREMIEERLKTYAHLFDDKVMKQLKRRRYTGWGRLSRKLINGIRDKQSGKTILDFLKSDGFANRNFMQLIHDDSLTFKEDIQKAQVSGQGDSLHEHIANLAGSPAIKKGILQTVKVVDELVKVMGRHKPENIVIEMARENQTTQKGQKNSRERMKRIEEGIKELGSQILKEHPVENTQLQNEKLYLYYLQNGRDMYVDQELDINRLSDYDVDHIVPQSFLKDDSIDNKVLTRSDKARGKSDNVPSEEVVKKMKNYWRQLLNAKLITQRKFDNLTKAERGGLSELDKAGFIKRQLVETRQITKHVAQILDSRMNTKYDENDKLIREVKVITLKSKLVSDFRKDFQFYKVREINNYHHAHDAYLNAVVGTALIKKYPKLESEFVYGDYKVYDVRKMIAKSEQEIGKATAKYFFYSNIMNFFKTEITLANGEIRKRPLIETNGETGEIVWDKGRDFATVRKVLSMPQVNIVKKTEVQTGGFSKESILPKRNSDKLIARKKDWDPKKYGGFDSPTVAYSVLVVAKVEKGKSKKLKSVKELLGITIMERSSFEKNPIDFLEAKGYKEVKKDLIIKLPKYSLFELENGRKRMLASAGELQKGNELALPSKYVNFLYLASHYEKLKGSPEDNEQKQLFVEQHKHYLDEIIEQISEFSKRVILADANLDKVLSAYNKHRDKPIREQAENIIHLFTLTNLGAPAAFKYFDTTIDRKRYTSTKEVLDATLIHQSITGLYETRIDLSQLGGDGGGGSGSSGGTLNIEDEYRLHETSKEPDVSLGSTWLSDFPQAWAETGGMGLAVRQAPLIIPLKATSTPVSIKQYPMSQEARLGIKPHIQRLLDQGILVPCQSPWNTPLLPVKKPGTNDYRPVQDLREVNKRVEDIHPTVPNPYNLLSGLPPSHQWYTVLDLKDAFFCLRLHPTSQPLFAFEWRDPEMGISGQLTWTRLPQGFKNSPTLFNEALHRDLADFRIQHPDLILLQYVDDLLLAATSELDCQQGTRALLQTLGNLGYRASAKKAQICQKQVKYLGYLLKEGQRWLTEARKETVMGQPTPKTPRQLREFLGKAGFCRLFIPGFAEMAAPLYPLTKPGTLFNWGPDQQKAYQEIKQALLTAPALGLPDLTKPFELFVDEKQGYAKGVLTQKLGPWRRPVAYLSKKLDPVAAGWPPCLRMVAAIAVLTKDAGKLTMGQPLVILAPHAVEALVKQPPDRWLSNARMTHYQALLLDTDRVQFGPVVALNPATLLPLPEEGLQHNCLDILAEAHGTRPDLTDQPLPDADHTWYTDGSSLLQEGQRKAGAAVTTETEVIWAKALPAGTSAQRAELIALTQALKMAEGKKLNVYTDSRYAFATAHIHGEIYRRRGWLTSEGKEIKNKDEILALLKALFLPKRLSIIHCPGHQKGHSAEARGNRMADQAARKAAITETPDTSTLLIENSSPSGGSKRTADGSEFEAGKRTADGSEFEKRTADGSEFESPKKKAKVE

SEQ ID NO: 2915 - protein, 2116 aa, synthetic construct; identical to SEQ ID NO: 2668

SEQ ID NO: 2916 - protein, 2113 aa, synthetic construct
MPAAKRVKLDGGDKKYSIGLDIGTNSVGWAVITDEYKVPSKKFKVLGNTDRHSIKKNLIGALLFDSGETAEATRLKRTARRRYTRRKNRICYLQEIFSNEMAKVDDSFFHRLEESFLVEEDKKHERHPIFGNIVDEVAYHEKYPTIYHLRKKLVDSTDKADLRLIYLALAHMIKFRGHFLIEGDLNPDNSDVDKLFIQLVQTYNQLFEENPINASGVDAKAILSARLSKSRRLENLIAQLPGEKKNGLFGNLIALSLGLTPNFKSNFDLAEDAKLQLSKDTYDDDLDNLLAQIGDQYADLFLAAKNLSDAILLSDILRVNTEITKAPLSASMIKRYDEHHQDLTLLKALVRQQLPEKYKEIFFDQSKNGYAGYIDGGASQEEFYKFIKPILEKMDGTEELLVKLNREDLLRKQRTFDNGSIPHQIHLGELHAILRRQEDFYPFLKDNREKIEKILTFRIPYYVGPLARGNSRFAWMTRKSEETITPWNFEEVVDKGASAQSFIERMTNFDKNLPNEKVLPKHSLLYEYFTVYNELTKVKYVTEGMRKPAFLSGEQKKAIVDLLFKTNRKVTVKQLKEDYFKKIECFDSVEISGVEDRFNASLGTYHDLLKIIKDKDFLDNEENEDILEDIVLTLTLFEDREMIEERLKTYAHLFDDKVMKQLKRRRYTGWGRLSRKLINGIRDKQSGKTILDFLKSDGFANRNFMQLIHDDSLTFKEDIQKAQVSGQGDSLHEHIANLAGSPAIKKGILQTVKVVDELVKVMGRHKPENIVIEMARENQTTQKGQKNSRERMKRIEEGIKELGSQILKEHPVENTQLQNEKLYLYYLQNGRDMYVDQELDINRLSDYDVDHIVPQSFLKDDSIDNKVLTRSDKARGKSDNVPSEEVVKKMKNYWRQLLNAKLITQRKFDNLTKAERGGLSELDKAGFIKRQLVETRQITKHVAQILDSRMNTKYDENDKLIREVKVITLKSKLVSDFRKDFQFYKVREINNYHHAHDAYLNAVVGTALIKKYPKLESEFVYGDYKVYDVRKMIAKSEQEIGKATAKYFFYSNIMNFFKTEITLANGEIRKRPLIETNGETGEIVWDKGRDFATVRKVLSMPQVNIVKKTEVQTGGFSKESILPKRNSDKLIARKKDWDPKKYGGFDSPTVAYSVLVVAKVEKGKSKKLKSVKELLGITIMERSSFEKNPIDFLEAKGYKEVKKDLIIKLPKYSLFELENGRKRMLASAGELQKGNELALPSKYVNFLYLASHYEKLKGSPEDNEQKQLFVEQHKHYLDEIIEQISEFSKRVILADANLDKVLSAYNKHRDKPIREQAENIIHLFTLTNLGAPAAFKYFDTTIDRKRYTSTKEVLDATLIHQSITGLYETRIDLSQLGGDGGGSSEAAAKGGTLNIEDEYRLHETSKEPDVSLGSTWLSDFPQAWAETGGMGLAVRQAPLIIPLKATSTPVSIKQYPMSQEARLGIKPHIQRLLDQGILVPCQSPWNTPLLPVKKPGTNDYRPVQDLREVNKRVEDIHPTVPNPYNLLSGLPPSHQWYTVLDLKDAFFCLRLHPTSQPLFAFEWRDPEMGISGQLTWTRLPQGFKNSPTLFNEALHRDLADFRIQHPDLILLQYVDDLLLAATSELDCQQGTRALLQTLGNLGYRASAKKAQICQKQVKYLGYLLKEGQRWLTEARKETVMGQPTPKTPRQLREFLGKAGFCRLFIPGFAEMAAPLYPLTKPGTLFNWGPDQQKAYQEIKQALLTAPALGLPDLTKPFELFVDEKQGYAKGVLTQKLGPWRRPVAYLSKKLDPVAAGWPPCLRMVAAIAVLTKDAGKLTMGQPLVILAPHAVEALVKQPPDRWLSNARMTHYQALLLDTDRVQFGPVVALNPATLLPLPEEGLQHNCLDILAEAHGTRPDLTDQPLPDADHTWYTDGSSLLQEGQRKAGAAVTTETEVIWAKALPAGTSAQRAELIALTQALKMAEGKKLNVYTDSRYAFATAHIHGEIYRRRGWLTSEGKEIKNKDEILALLKALFLPKRLSIIHCPGHQKGHSAEARGNRMADQAARKAAITETPDTSTLLIENSSPSGGSKRTADGSEFEAGKRTADGSEFEKRTADGSEFESPKKKAKVE

SEQ ID NO: 2917 - protein, 2123 aa, synthetic construct
MPAAKRVKLDGGDKKYSIGLDIGTNSVGWAVITDEYKVPSKKFKVLGNTDRHSIKKNLIGALLFDSGETAEATRLKRTARRRYTRRKNRICYLQEIFSNEMAKVDDSFFHRLEESFLVEEDKKHERHPIFGNIVDEVAYHEKYPTIYHLRKKLVDSTDKADLRLIYLALAHMIKFRGHFLIEGDLNPDNSDVDKLFIQLVQTYNQLFEENPINASGVDAKAILSARLSKSRRLENLIAQLPGEKKNGLFGNLIALSLGLTPNFKSNFDLAEDAKLQLSKDTYDDDLDNLLAQIGDQYADLFLAAKNLSDAILLSDILRVNTEITKAPLSASMIKRYDEHHQDLTLLKALVRQQLPEKYKEIFFDQSKNGYAGYIDGGASQEEFYKFIKPILEKMDGTEELLVKLNREDLLRKQRTFDNGSIPHQIHLGELHAILRRQEDFYPFLKDNREKIEKILTFRIPYYVGPLARGNSRFAWMTRKSEETITPWNFEEVVDKGASAQSFIERMTNFDKNLPNEKVLPKHSLLYEYFTVYNELTKVKYVTEGMRKPAFLSGEQKKAIVDLLFKTNRKVTVKQLKEDYFKKIECFDSVEISGVEDRFNASLGTYHDLLKIIKDKDFLDNEENEDILEDIVLTLTLFEDREMIEERLKTYAHLFDDKVMKQLKRRRYTGWGRLSRKLINGIRDKQSGKTILDFLKSDGFANRNFMQLIHDDSLTFKEDIQKAQVSGQGDSLHEHIANLAGSPAIKKGILQTVKVVDELVKVMGRHKPENIVIEMARENQTTQKGQKNSRERMKRIEEGIKELGSQILKEHPVENTQLQNEKLYLYYLQNGRDMYVDQELDINRLSDYDVDHIVPQSFLKDDSIDNKVLTRSDKARGKSDNVPSEEVVKKMKNYWRQLLNAKLITQRKFDNLTKAERGGLSELDKAGFIKRQLVETRQITKHVAQILDSRMNTKYDENDKLIREVKVITLKSKLVSDFRKDFQFYKVREINNYHHAHDAYLNAVVGTALIKKYPKLESEFVYGDYKVYDVRKMIAKSEQEIGKATAKYFFYSNIMNFFKTEITLANGEIRKRPLIETNGETGEIVWDKGRDFATVRKVLSMPQVNIVKKTEVQTGGFSKESILPKRNSDKLIARKKDWDPKKYGGFDSPTVAYSVLVVAKVEKGKSKKLKSVKELLGITIMERSSFEKNPIDFLEAKGYKEVKKDLIIKLPKYSLFELENGRKRMLASAGELQKGNELALPSKYVNFLYLASHYEKLKGSPEDNEQKQLFVEQHKHYLDEIIEQISEFSKRVILADANLDKVLSAYNKHRDKPIREQAENIIHLFTLTNLGAPAAFKYFDTTIDRKRYTSTKEVLDATLIHQSITGLYETRIDLSQLGGDGGGGSGGSGGSGGSGGSGGSGGTLNIEDEYRLHETSKEPDVSLGSTWLSDFPQAWAETGGMGLAVRQAPLIIPLKATSTPVSIKQYPMSQEARLGIKPHIQRLLDQGILVPCQSPWNTPLLPVKKPGTNDYRPVQDLREVNKRVEDIHPTVPNPYNLLSGLPPSHQWYTVLDLKDAFFCLRLHPTSQPLFAFEWRDPEMGISGQLTWTRLPQGFKNSPTLFNEALHRDLADFRIQHPDLILLQYVDDLLLAATSELDCQQGTRALLQTLGNLGYRASAKKAQICQKQVKYLGYLLKEGQRWLTEARKETVMGQPTPKTPRQLREFLGKAGFCRLFIPGFAEMAAPLYPLTKPGTLFNWGPDQQKAYQEIKQALLTAPALGLPDLTKPFELFVDEKQGYAKGVLTQKLGPWRRPVAYLSKKLDPVAAGWPPCLRMVAAIAVLTKDAGKLTMGQPLVILAPHAVEALVKQPPDRWLSNARMTHYQALLLDTDRVQFGPVVALNPATLLPLPEEGLQHNCLDILAEAHGTRPDLTDQPLPDADHTWYTDGSSLLQEGQRKAGAAVTTETEVIWAKALPAGTSAQRAELIALTQALKMAEGKKLNVYTDSRYAFATAHIHGEIYRRRGWLTSEGKEIKNKDEILALLKALFLPKRLSIIHCPGHQKGHSAEARGNRMADQAARKAAITETPDTSTLLIENSSPSGGSKRTADGSEFEAGKRTADGSEFEKRTADGSEFESPKKKAKVE

SEQ ID NO: 2918 - protein, 2114 aa, synthetic construct
MPAAKRVKLDGGDKKYSIGLDIGTNSVGWAVITDEYKVPSKKFKVLGNTDRHSIKKNLIGALLFDSGETAEATRLKRTARRRYTRRKNRICYLQEIFSNEMAKVDDSFFHRLEESFLVEEDKKHERHPIFGNIVDEVAYHEKYPTIYHLRKKLVDSTDKADLRLIYLALAHMIKFRGHFLIEGDLNPDNSDVDKLFIQLVQTYNQLFEENPINASGVDAKAILSARLSKSRRLENLIAQLPGEKKNGLFGNLIALSLGLTPNFKSNFDLAEDAKLQLSKDTYDDDLDNLLAQIGDQYADLFLAAKNLSDAILLSDILRVNTEITKAPLSASMIKRYDEHHQDLTLLKALVRQQLPEKYKEIFFDQSKNGYAGYIDGGASQEEFYKFIKPILEKMDGTEELLVKLNREDLLRKQRTFDNGSIPHQIHLGELHAILRRQEDFYPFLKDNREKIEKILTFRIPYYVGPLARGNSRFAWMTRKSEETITPWNFEEVVDKGASAQSFIERMTNFDKNLPNEKVLPKHSLLYEYFTVYNELTKVKYVTEGMRKPAFLSGEQKKAIVDLLFKTNRKVTVKQLKEDYFKKIECFDSVEISGVEDRFNASLGTYHDLLKIIKDKDFLDNEENEDILEDIVLTLTLFEDREMIEERLKTYAHLFDDKVMKQLKRRRYTGWGRLSRKLINGIRDKQSGKTILDFLKSDGFANRNFMQLIHDDSLTFKEDIQKAQVSGQGDSLHEHIANLAGSPAIKKGILQTVKVVDELVKVMGRHKPENIVIEMARENQTTQKGQKNSRERMKRIEEGIKELGSQILKEHPVENTQLQNEKLYLYYLQNGRDMYVDQELDINRLSDYDVDHIVPQSFLKDDSIDNKVLTRSDKARGKSDNVPSEEVVKKMKNYWRQLLNAKLITQRKFDNLTKAERGGLSELDKAGFIKRQLVETRQITKHVAQILDSRMNTKYDENDKLIREVKVITLKSKLVSDFRKDFQFYKVREINNYHHAHDAYLNAVVGTALIKKYPKLESEFVYGDYKVYDVRKMIAKSEQEIGKATAKYFFYSNIMNFFKTEITLANGEIRKRPLIETNGETGEIVWDKGRDFATVRKVLSMPQVNIVKKTEVQTGGFSKESILPKRNSDKLIARKKDWDPKKYGGFDSPTVAYSVLVVAKVEKGKSKKLKSVKELLGITIMERSSFEKNPIDFLEAKGYKEVKKDLIIKLPKYSLFELENGRKRMLASAGELQKGNELALPSKYVNFLYLASHYEKLKGSPEDNEQKQLFVEQHKHYLDEIIEQISEFSKRVILADANLDKVLSAYNKHRDKPIREQAENIIHLFTLTNLGAPAAFKYFDTTIDRKRYTSTKEVLDATLIHQSITGLYETRIDLSQLGGDGGGGGGGSPAPGGTLNIEDEYRLHETSKEPDVSLGSTWLSDFPQAWAETGGMGLAVRQAPLIIPLKATSTPVSIKQYPMSQEARLGIKPHIQRLLDQGILVPCQSPWNTPLLPVKKPGTNDYRPVQDLREVNKRVEDIHPTVPNPYNLLSGLPPSHQWYTVLDLKDAFFCLRLHPTSQPLFAFEWRDPEMGISGQLTWTRLPQGFKNSPTLFNEALHRDLADFRIQHPDLILLQYVDDLLLAATSELDCQQGTRALLQTLGNLGYRASAKKAQICQKQVKYLGYLLKEGQRWLTEARKETVMGQPTPKTPRQLREFLGKAGFCRLFIPGFAEMAAPLYPLTKPGTLFNWGPDQQKAYQEIKQALLTAPALGLPDLTKPFELFVDEKQGYAKGVLTQKLGPWRRPVAYLSKKLDPVAAGWPPCLRMVAAIAVLTKDAGKLTMGQPLVILAPHAVEALVKQPPDRWLSNARMTHYQALLLDTDRVQFGPVVALNPATLLPLPEEGLQHNCLDILAEAHGTRPDLTDQPLPDADHTWYTDGSSLLQEGQRKAGAAVTTETEVIWAKALPAGTSAQRAELIALTQALKMAEGKKLNVYTDSRYAFATAHIHGEIYRRRGWLTSEGKEIKNKDEILALLKALFLPKRLSIIHCPGHQKGHSAEARGNRMADQAARKAAITETPDTSTLLIENSSPSGGSKRTADGSEFEAGKRTADGSEFEKRTADGSEFESPKKKAKVE

SEQ ID NO: 2919 - protein, 2116 aa, synthetic construct; identical to SEQ ID NO: 2690

SEQ ID NO: 2920 - protein, 2116 aa, synthetic construct; identical to SEQ ID NO: 2648

SEQ ID NO: 2921 - protein, 2114 aa, synthetic construct; identical to SEQ ID NO: 2616

SEQ ID NO: 2922 - protein, 2116 aa, synthetic construct; identical to SEQ ID NO: 2666

SEQ ID NO: 2923 - protein, 2111 aa, synthetic construct
MPAAKRVKLDGGDKKYSIGLDIGTNSVGWAVITDEYKVPSKKFKVLGNTDRHSIKKNLIGALLFDSGETAEATRLKRTARRRYTRRKNRICYLQEIFSNEMAKVDDSFFHRLEESFLVEEDKKHERHPIFGNIVDEVAYHEKYPTIYHLRKKLVDSTDKADLRLIYLALAHMIKFRGHFLIEGDLNPDNSDVDKLFIQLVQTYNQLFEENPINASGVDAKAILSARLSKSRRLENLIAQLPGEKKNGLFGNLIALSLGLTPNFKSNFDLAEDAKLQLSKDTYDDDLDNLLAQIGDQYADLFLAAKNLSDAILLSDILRVNTEITKAPLSASMIKRYDEHHQDLTLLKALVRQQLPEKYKEIFFDQSKNGYAGYIDGGASQEEFYKFIKPILEKMDGTEELLVKLNREDLLRKQRTFDNGSIPHQIHLGELHAILRRQEDFYPFLKDNREKIEKILTFRIPYYVGPLARGNSRFAWMTRKSEETITPWNFEEVVDKGASAQSFIERMTNFDKNLPNEKVLPKHSLLYEYFTVYNELTKVKYVTEGMRKPAFLSGEQKKAIVDLLFKTNRKVTVKQLKEDYFKKIECFDSVEISGVEDRFNASLGTYHDLLKIIKDKDFLDNEENEDILEDIVLTLTLFEDREMIEERLKTYAHLFDDKVMKQLKRRRYTGWGRLSRKLINGIRDKQSGKTILDFLKSDGFANRNFMQLIHDDSLTFKEDIQKAQVSGQGDSLHEHIANLAGSPAIKKGILQTVKVVDELVKVMGRHKPENIVIEMARENQTTQKGQKNSRERMKRIEEGIKELGSQILKEHPVENTQLQNEKLYLYYLQNGRDMYVDQELDINRLSDYDVDHIVPQSFLKDDSIDNKVLTRSDKARGKSDNVPSEEVVKKMKNYWRQLLNAKLITQRKFDNLTKAERGGLSELDKAGFIKRQLVETRQITKHVAQILDSRMNTKYDENDKLIREVKVITLKSKLVSDFRKDFQFYKVREINNYHHAHDAYLNAVVGTALIKKYPKLESEFVYGDYKVYDVRKMIAKSEQEIGKATAKYFFYSNIMNFFKTEITLANGEIRKRPLIETNGETGEIVWDKGRDFATVRKVLSMPQVNIVKKTEVQTGGFSKESILPKRNSDKLIARKKDWDPKKYGGFDSPTVAYSVLVVAKVEKGKSKKLKSVKELLGITIMERSSFEKNPIDFLEAKGYKEVKKDLIIKLPKYSLFELENGRKRMLASAGELQKGNELALPSKYVNFLYLASHYEKLKGSPEDNEQKQLFVEQHKHYLDEIIEQISEFSKRVILADANLDKVLSAYNKHRDKPIREQAENIIHLFTLTNLGAPAAFKYFDTTIDRKRYTSTKEVLDATLIHQSITGLYETRIDLSQLGGDGGPAPGGGGGTLNIEDEYRLHETSKEPDVSLGSTWLSDFPQAWAETGGMGLAVRQAPLIIPLKATSTPVSIKQYPMSQEARLGIKPHIQRLLDQGILVPCQSPWNTPLLPVKKPGTNDYRPVQDLREVNKRVEDIHPTVPNPYNLLSGLPPSHQWYTVLDLKDAFFCLRLHPTSQPLFAFEWRDPEMGISGQLTWTRLPQGFKNSPTLFNEALHRDLADFRIQHPDLILLQYVDDLLLAATSELDCQQGTRALLQTLGNLGYRASAKKAQICQKQVKYLGYLLKEGQRWLTEARKETVMGQPTPKTPRQLREFLGKAGFCRLFIPGFAEMAAPLYPLTKPGTLFNWGPDQQKAYQEIKQALLTAPALGLPDLTKPFELFVDEKQGYAKGVLTQKLGPWRRPVAYLSKKLDPVAAGWPPCLRMVAAIAVLTKDAGKLTMGQPLVILAPHAVEALVKQPPDRWLSNARMTHYQALLLDTDRVQFGPVVALNPATLLPLPEEGLQHNCLDILAEAHGTRPDLTDQPLPDADHTWYTDGSSLLQEGQRKAGAAVTTETEVIWAKALPAGTSAQRAELIALTQALKMAEGKKLNVYTDSRYAFATAHIHGEIYRRRGWLTSEGKEIKNKDEILALLKALFLPKRLSIIHCPGHQKGHSAEARGNRMADQAARKAAITETPDTSTLLIENSSPSGGSKRTADGSEFEAGKRTADGSEFEKRTADGSEFESPKKKAKVE

SEQ ID NO: 2924 - protein, 2116 aa, synthetic construct
MPAAKRVKLDGGDKKYSIGLDIGTNSVGWAVITDEYKVPSKKFKVLGNTDRHSIKKNLIGALLFDSGETAEATRLKRTARRRYTRRKNRICYLQEIFSNEMAKVDDSFFHRLEESFLVEEDKKHERHPIFGNIVDEVAYHEKYPTIYHLRKKLVDSTDKADLRLIYLALAHMIKFRGHFLIEGDLNPDNSDVDKLFIQLVQTYNQLFEENPINASGVDAKAILSARLSKSRRLENLIAQLPGEKKNGLFGNLIALSLGLTPNFKSNFDLAEDAKLQLSKDTYDDDLDNLLAQIGDQYADLFLAAKNLSDAILLSDILRVNTEITKAPLSASMIKRYDEHHQDLTLLKALVRQQLPEKYKEIFFDQSKNGYAGYIDGGASQEEFYKFIKPILEKMDGTEELLVKLNREDLLRKQRTFDNGSIPHQIHLGELHAILRRQEDFYPFLKDNREKIEKILTFRIPYYVGPLARGNSRFAWMTRKSEETITPWNFEEVVDKGASAQSFIERMTNFDKNLPNEKVLPKHSLLYEYFTVYNELTKVKYVTEGMRKPAFLSGEQKKAIVDLLFKTNRKVTVKQLKEDYFKKIECFDSVEISGVEDRFNASLGTYHDLLKIIKDKDFLDNEENEDILEDIVLTLTLFEDREMIEERLKTYAHLFDDKVMKQLKRRRYTGWGRLSRKLINGIRDKQSGKTILDFLKSDGFANRNFMQLIHDDSLTFKEDIQKAQVSGQGDSLHEHIANLAGSPAIKKGILQTVKVVDELVKVMGRHKPENIVIEMARENQTTQKGQKNSRERMKRIEEGIKELGSQILKEHPVENTQLQNEKLYLYYLQNGRDMYVDQELDINRLSDYDVDHIVPQSFLKDDSIDNKVLTRSDKARGKSDNVPSEEVVKKMKNYWRQLLNAKLITQRKFDNLTKAERGGLSELDKAGFIKRQLVETRQITKHVAQILDSRMNTKYDENDKLIREVKVITLKSKLVSDFRKDFQFYKVREINNYHHAHDAYLNAVVGTALIKKYPKLESEFVYGDYKVYDVRKMIAKSEQEIGKATAKYFFYSNIMNFFKTEITLANGEIRKRPLIETNGETGEIVWDKGRDFATVRKVLSMPQVNIVKKTEVQTGGFSKESILPKRNSDKLIARKKDWDPKKYGGFDSPTVAYSVLVVAKVEKGKSKKLKSVKELLGITIMERSSFEKNPIDFLEAKGYKEVKKDLIIKLPKYSLFELENGRKRMLASAGELQKGNELALPSKYVNFLYLASHYEKLKGSPEDNEQKQLFVEQHKHYLDEIIEQISEFSKRVILADANLDKVLSAYNKHRDKPIREQAENIIHLFTLTNLGAPAAFKYFDTTIDRKRYTSTKEVLDATLIHQSITGLYETRIDLSQLGGDGGPAPEAAAKGGSGGTLNIEDEYRLHETSKEPDVSLGSTWLSDFPQAWAETGGMGLAVRQAPLIIPLKATSTPVSIKQYPMSQEARLGIKPHIQRLLDQGILVPCQSPWNTPLLPVKKPGTNDYRPVQDLREVNKRVEDIHPTVPNPYNLLSGLPPSHQWYTVLDLKDAFFCLRLHPTSQPLFAFEWRDPEMGISGQLTWTRLPQGFKNSPTLFNEALHRDLADFRIQHPDLILLQYVDDLLLAATSELDCQQGTRALLQTLGNLGYRASAKKAQICQKQVKYLGYLLKEGQRWLTEARKETVMGQPTPKTPRQLREFLGKAGFCRLFIPGFAEMAAPLYPLTKPGTLFNWGPDQQKAYQEIKQALLTAPALGLPDLTKPFELFVDEKQGYAKGVLTQKLGPWRRPVAYLSKKLDPVAAGWPPCLRMVAAIAVLTKDAGKLTMGQPLVILAPHAVEALVKQPPDRWLSNARMTHYQALLLDTDRVQFGPVVALNPATLLPLPEEGLQHNCLDILAEAHGTRPDLTDQPLPDADHTWYTDGSSLLQEGQRKAGAAVTTETEVIWAKALPAGTSAQRAELIALTQALKMAEGKKLNVYTDSRYAFATAHIHGEIYRRRGWLTSEGKEIKNKDEILALLKALFLPKRLSIIHCPGHQKGHSAEARGNRMADQAARKAAITETPDTSTLLIENSSPSGGSKRTADGSEFEAGKRTADGSEFEKRTADGSEFESPKKKAKVE

SEQ ID NO: 2925 - protein, 2116 aa, synthetic construct; identical to SEQ ID NO: 2628

SEQ ID NO: 2926 - protein, 2116 aa, synthetic construct; identical to SEQ ID NO: 2640

SEQ ID NO: 2927 - protein, 2109 aa, synthetic construct
MPAAKRVKLDGGDKKYSIGLDIGTNSVGWAVITDEYKVPSKKFKVLGNTDRHSIKKNLIGALLFDSGETAEATRLKRTARRRYTRRKNRICYLQEIFSNEMAKVDDSFFHRLEESFLVEEDKKHERHPIFGNIVDEVAYHEKYPTIYHLRKKLVDSTDKADLRLIYLALAHMIKFRGHFLIEGDLNPDNSDVDKLFIQLVQTYNQLFEENPINASGVDAKAILSARLSKSRRLENLIAQLPGEKKNGLFGNLIALSLGLTPNFKSNFDLAEDAKLQLSKDTYDDDLDNLLAQIGDQYADLFLAAKNLSDAILLSDILRVNTEITKAPLSASMIKRYDEHHQDLTLLKALVRQQLPEKYKEIFFDQSKNGYAGYIDGGASQEEFYKFIKPILEKMDGTEELLVKLNREDLLRKQRTFDNGSIPHQIHLGELHAILRRQEDFYPFLKDNREKIEKILTFRIPYYVGPLARGNSRFAWMTRKSEETITPWNFEEVVDKGASAQSFIERMTNFDKNLPNEKVLPKHSLLYEYFTVYNELTKVKYVTEGMRKPAFLSGEQKKAIVDLLFKTNRKVTVKQLKEDYFKKIECFDSVEISGVEDRFNASLGTYHDLLKIIKDKDFLDNEENEDILEDIVLTLTLFEDREMIEERLKTYAHLFDDKVMKQLKRRRYTGWGRLSRKLINGIRDKQSGKTILDFLKSDGFANRNFMQLIHDDSLTFKEDIQKAQVSGQGDSLHEHIANLAGSPAIKKGILQTVKVVDELVKVMGRHKPENIVIEMARENQTTQKGQKNSRERMKRIEEGIKELGSQILKEHPVENTQLQNEKLYLYYLQNGRDMYVDQELDINRLSDYDVDHIVPQSFLKDDSIDNKVLTRSDKARGKSDNVPSEEVVKKMKNYWRQLLNAKLITQRKFDNLTKAERGGLSELDKAGFIKRQLVETRQITKHVAQILDSRMNTKYDENDKLIREVKVITLKSKLVSDFRKDFQFYKVREINNYHHAHDAYLNAVVGTALIKKYPKLESEFVYGDYKVYDVRKMIAKSEQEIGKATAKYFFYSNIMNFFKTEITLANGEIRKRPLIETNGETGEIVWDKGRDFATVRKVLSMPQVNIVKKTEVQTGGFSKESILPKRNSDKLIARKKDWDPKKYGGFDSPTVAYSVLVVAKVEKGKSKKLKSVKELLGITIMERSSFEKNPIDFLEAKGYKEVKKDLIIKLPKYSLFELENGRKRMLASAGELQKGNELALPSKYVNFLYLASHYEKLKGSPEDNEQKQLFVEQHKHYLDEIIEQISEFSKRVILADANLDKVLSAYNKHRDKPIREQAENIIHLFTLTNLGAPAAFKYFDTTIDRKRYTSTKEVLDATLIHQSITGLYETRIDLSQLGGDGGGGGGGGTLNIEDEYRLHETSKEPDVSLGSTWLSDFPQAWAETGGMGLAVRQAPLIIPLKATSTPVSIKQYPMSQEARLGIKPHIQRLLDQGILVPCQSPWNTPLLPVKKPGTNDYRPVQDLREVNKRVEDIHPTVPNPYNLLSGLPPSHQWYTVLDLKDAFFCLRLHPTSQPLFAFEWRDPEMGISGQLTWTRLPQGFKNSPTLFNEALHRDLADFRIQHPDLILLQYVDDLLLAATSELDCQQGTRALLQTLGNLGYRASAKKAQICQKQVKYLGYLLKEGQRWLTEARKETVMGQPTPKTPRQLREFLGKAGFCRLFIPGFAEMAAPLYPLTKPGTLFNWGPDQQKAYQEIKQALLTAPALGLPDLTKPFELFVDEKQGYAKGVLTQKLGPWRRPVAYLSKKLDPVAAGWPPCLRMVAAIAVLTKDAGKLTMGQPLVILAPHAVEALVKQPPDRWLSNARMTHYQALLLDTDRVQFGPVVALNPATLLPLPEEGLQHNCLDILAEAHGTRPDLTDQPLPDADHTWYTDGSSLLQEGQRKAGAAVTTETEVIWAKALPAGTSAQRAELIALTQALKMAEGKKLNVYTDSRYAFATAHIHGEIYRRRGWLTSEGKEIKNKDEILALLKALFLPKRLSIIHCPGHQKGHSAEARGNRMADQAARKAAITETPDTSTLLIENSSPSGGSKRTADGSEFEAGKRTADGSEFEKRTADGSEFESPKKKAKVE

SEQ ID NO: 2928 - protein, 2116 aa, synthetic construct
MPAAKRVKLDGGDKKYSIGLDIGTNSVGWAVITDEYKVPSKKFKVLGNTDRHSIKKNLIGALLFDSGETAEATRLKRTARRRYTRRKNRICYLQEIFSNEMAKVDDSFFHRLEESFLVEEDKKHERHPIFGNIVDEVAYHEKYPTIYHLRKKLVDSTDKADLRLIYLALAHMIKFRGHFLIEGDLNPDNSDVDKLFIQLVQTYNQLFEENPINASGVDAKAILSARLSKSRRLENLIAQLPGEKKNGLFGNLIALSLGLTPNFKSNFDLAEDAKLQLSKDTYDDDLDNLLAQIGDQYADLFLAAKNLSDAILLSDILRVNTEITKAPLSASMIKRYDEHHQDLTLLKALVRQQLPEKYKEIFFDQSKNGYAGYIDGGASQEEFYKFIKPILEKMDGTEELLVKLNREDLLRKQRTFDNGSIPHQIHLGELHAILRRQEDFYPFLKDNREKIEKILTFRIPYYVGPLARGNSRFAWMTRKSEETITPWNFEEVVDKGASAQSFIERMTNFDKNLPNEKVLPKHSLLYEYFTVYNELTKVKYVTEGMRKPAFLSGEQKKAIVDLLFKTNRKVTVKQLKEDYFKKIECFDSVEISGVEDRFNASLGTYHDLLKIIKDKDFLDNEENEDILEDIVLTLTLFEDREMIEERLKTYAHLFDDKVMKQLKRRRYTGWGRLSRKLINGIRDKQSGKTILDFLKSDGFANRNFMQLIHDDSLTFKEDIQKAQVSGQGDSLHEHIANLAGSPAIKKGILQTVKVVDELVKVMGRHKPENIVIEMARENQTTQKGQKNSRERMKRIEEGIKELGSQILKEHPVENTQLQNEKLYLYYLQNGRDMYVDQELDINRLSDYDVDHIVPQSFLKDDSIDNKVLTRSDKARGKSDNVPSEEVVKKMKNYWRQLLNAKLITQRKFDNLTKAERGGLSELDKAGFIKRQLVETRQITKHVAQILDSRMNTKYDENDKLIREVKVITLKSKLVSDFRKDFQFYKVREINNYHHAHDAYLNAVVGTALIKKYPKLESEFVYGDYKVYDVRKMIAKSEQEIGKATAKYFFYSNIMNFFKTEITLANGEIRKRPLIETNGETGEIVWDKGRDFATVRKVLSMPQVNIVKKTEVQTGGFSKESILPKRNSDKLIARKKDWDPKKYGGFDSPTVAYSVLVVAKVEKGKSKKLKSVKELLGITIMERSSFEKNPIDFLEAKGYKEVKKDLIIKLPKYSLFELENGRKRMLASAGELQKGNELALPSKYVNFLYLASHYEKLKGSPEDNEQKQLFVEQHKHYLDEIIEQISEFSKRVILADANLDKVLSAYNKHRDKPIREQAENIIHLFTLTNLGAPAAFKYFDTTIDRKRYTSTKEVLDATLIHQSITGLYETRIDLSQLGGDGGGGGGGSEAAAKGGTLNIEDEYRLHETSKEPDVSLGSTWLSDFPQAWAETGGMGLAVRQAPLIIPLKATSTPVSIKQYPMSQEARLGIKPHIQRLLDQGILVPCQSPWNTPLLPVKKPGTNDYRPVQDLREVNKRVEDIHPTVPNPYNLLSGLPPSHQWYTVLDLKDAFFCLRLHPTSQPLFAFEWRDPEMGISGQLTWTRLPQGFKNSPTLFNEALHRDLADFRIQHPDLILLQYVDDLLLAATSELDCQQGTRALLQTLGNLGYRASAKKAQICQKQVKYLGYLLKEGQRWLTEARKETVMGQPTPKTPRQLREFLGKAGFCRLFIPGFAEMAAPLYPLTKPGTLFNWGPDQQKAYQEIKQALLTAPALGLPDLTKPFELFVDEKQGYAKGVLTQKLGPWRRPVAYLSKKLDPVAAGWPPCLRMVAAIAVLTKDAGKLTMGQPLVILAPHAVEALVKQPPDRWLSNARMTHYQALLLDTDRVQFGPVVALNPATLLPLPEEGLQHNCLDILAEAHGTRPDLTDQPLPDADHTWYTDGSSLLQEGQRKAGAAVTTETEVIWAKALPAGTSAQRAELIALTQALKMAEGKKLNVYTDSRYAFATAHIHGEIYRRRGWLTSEGKEIKNKDEILALLKALFLPKRLSIIHCPGHQKGHSAEARGNRMADQAARKAAITETPDTSTLLIENSSPSGGSKRTADGSEFEAGKRTADGSEFEKRTADGSEFESPKKKAKVE

SEQ ID NO: 2929 - protein, 2113 aa, synthetic construct; identical to SEQ ID NO: 2700

SEQ ID NO: 2930 - protein, 2114 aa, synthetic construct; identical to SEQ ID NO: 2656

SEQ ID NO: 2931 - protein, 2116 aa, synthetic construct; identical to SEQ ID NO: 2652

SEQ ID NO: 2932 - protein, 2120 aa, synthetic construct; identical to SEQ ID NO: 2623

SEQ ID NO: 2933 - protein, 2113 aa, synthetic construct; identical to SEQ ID NO: 2657

SEQ ID NO: 2934 - protein, 2111 aa, synthetic construct; identical to SEQ ID NO: 2693

SEQ ID NO: 2935 - protein, 2108 aa, synthetic construct; identical to SEQ ID NO: 2646

SEQ ID NO: 2936 - protein, 2111 aa, synthetic construct
MPAAKRVKLDGGDKKYSIGLDIGTNSVGWAVITDEYKVPSKKFKVLGNTDRHSIKKNLIGALLFDSGETAEATRLKRTARRRYTRRKNRICYLQEIFSNEMAKVDDSFFHRLEESFLVEEDKKHERHPIFGNIVDEVAYHEKYPTIYHLRKKLVDSTDKADLRLIYLALAHMIKFRGHFLIEGDLNPDNSDVDKLFIQLVQTYNQLFEENPINASGVDAKAILSARLSKSRRLENLIAQLPGEKKNGLFGNLIALSLGLTPNFKSNFDLAEDAKLQLSKDTYDDDLDNLLAQIGDQYADLFLAAKNLSDAILLSDILRVNTEITKAPLSASMIKRYDEHHQDLTLLKALVRQQLPEKYKEIFFDQSKNGYAGYIDGGASQEEFYKFIKPILEKMDGTEELLVKLNREDLLRKQRTFDNGSIPHQIHLGELHAILRRQEDFYPFLKDNREKIEKILTFRIPYYVGPLARGNSRFAWMTRKSEETITPWNFEEVVDKGASAQSFIERMTNFDKNLPNEKVLPKHSLLYEYFTVYNELTKVKYVTEGMRKPAFLSGEQKKAIVDLLFKTNRKVTVKQLKEDYFKKIECFDSVEISGVEDRFNASLGTYHDLLKIIKDKDFLDNEENEDILEDIVLTLTLFEDREMIEERLKTYAHLFDDKVMKQLKRRRYTGWGRLSRKLINGIRDKQSGKTILDFLKSDGFANRNFMQLIHDDSLTFKEDIQKAQVSGQGDSLHEHIANLAGSPAIKKGILQTVKVVDELVKVMGRHKPENIVIEMARENQTTQKGQKNSRERMKRIEEGIKELGSQILKEHPVENTQLQNEKLYLYYLQNGRDMYVDQELDINRLSDYDVDHIVPQSFLKDDSIDNKVLTRSDKARGKSDNVPSEEVVKKMKNYWRQLLNAKLITQRKFDNLTKAERGGLSELDKAGFIKRQLVETRQITKHVAQILDSRMNTKYDENDKLIREVKVITLKSKLVSDFRKDFQFYKVREINNYHHAHDAYLNAVVGTALIKKYPKLESEFVYGDYKVYDVRKMIAKSEQEIGKATAKYFFYSNIMNFFKTEITLANGEIRKRPLIETNGETGEIVWDKGRDFATVRKVLSMPQVNIVKKTEVQTGGFSKESILPKRNSDKLIARKKDWDPKKYGGFDSPTVAYSVLVVAKVEKGKSKKLKSVKELLGITIMERSSFEKNPIDFLEAKGYKEVKKDLIIKLPKYSLFELENGRKRMLASAGELQKGNELALPSKYVNFLYLASHYEKLKGSPEDNEQKQLFVEQHKHYLDEIIEQISEFSKRVILADANLDKVLSAYNKHRDKPIREQAENIIHLFTLTNLGAPAAFKYFDTTIDRKRYTSTKEVLDATLIHQSITGLYETRIDLSQLGGDGGPAPGSSGGTLNIEDEYRLHETSKEPDVSLGSTWLSDFPQAWAETGGMGLAVRQAPLIIPLKATSTPVSIKQYPMSQEARLGIKPHIQRLLDQGILVPCQSPWNTPLLPVKKPGTNDYRPVQDLREVNKRVEDIHPTVPNPYNLLSGLPPSHQWYTVLDLKDAFFCLRLHPTSQPLFAFEWRDPEMGISGQLTWTRLPQGFKNSPTLFNEALHRDLADFRIQHPDLILLQYVDDLLLAATSELDCQQGTRALLQTLGNLGYRASAKKAQICQKQVKYLGYLLKEGQRWLTEARKETVMGQPTPKTPRQLREFLGKAGFCRLFIPGFAEMAAPLYPLTKPGTLFNWGPDQQKAYQEIKQALLTAPALGLPDLTKPFELFVDEKQGYAKGVLTQKLGPWRRPVAYLSKKLDPVAAGWPPCLRMVAAIAVLTKDAGKLTMGQPLVILAPHAVEALVKQPPDRWLSNARMTHYQALLLDTDRVQFGPVVALNPATLLPLPEEGLQHNCLDILAEAHGTRPDLTDQPLPDADHTWYTDGSSLLQEGQRKAGAAVTTETEVIWAKALPAGTSAQRAELIALTQALKMAEGKKLNVYTDSRYAFATAHIHGEIYRRRGWLTSEGKEIKNKDEILALLKALFLPKRLSIIHCPGHQKGHSAEARGNRMADQAARKAAITETPDTSTLLIENSSPSGGSKRTADGSEFEAGKRTADGSEFEKRTADGSEFESPKKKAKVE

SEQ ID NO: 2937 - protein, 2120 aa, synthetic construct; identical to SEQ ID NO: 2636

SEQ ID NO: 2938 - protein, 2116 aa, synthetic construct; identical to SEQ ID NO: 2661

SEQ ID NO: 2939 - protein, 2120 aa, synthetic construct; identical to SEQ ID NO: 2680

SEQ ID NO: 2940 - protein, 2116 aa, synthetic construct
MPAAKRVKLDGGDKKYSIGLDIGTNSVGWAVITDEYKVPSKKFKVLGNTDRHSIKKNLIGALLFDSGETAEATRLKRTARRRYTRRKNRICYLQEIFSNEMAKVDDSFFHRLEESFLVEEDKKHERHPIFGNIVDEVAYHEKYPTIYHLRKKLVDSTDKADLRLIYLALAHMIKFRGHFLIEGDLNPDNSDVDKLFIQLVQTYNQLFEENPINASGVDAKAILSARLSKSRRLENLIAQLPGEKKNGLFGNLIALSLGLTPNFKSNFDLAEDAKLQLSKDTYDDDLDNLLAQIGDQYADLFLAAKNLSDAILLSDILRVNTEITKAPLSASMIKRYDEHHQDLTLLKALVRQQLPEKYKEIFFDQSKNGYAGYIDGGASQEEFYKFIKPILEKMDGTEELLVKLNREDLLRKQRTFDNGSIPHQIHLGELHAILRRQEDFYPFLKDNREKIEKILTFRIPYYVGPLARGNSRFAWMTRKSEETITPWNFEEVVDKGASAQSFIERMTNFDKNLPNEKVLPKHSLLYEYFTVYNELTKVKYVTEGMRKPAFLSGEQKKAIVDLLFKTNRKVTVKQLKEDYFKKIECFDSVEISGVEDRFNASLGTYHDLLKIIKDKDFLDNEENEDILEDIVLTLTLFEDREMIEERLKTYAHLFDDKVMKQLKRRRYTGWGRLSRKLINGIRDKQSGKTILDFLKSDGFANRNFMQLIHDDSLTFKEDIQKAQVSGQGDSLHEHIANLAGSPAIKKGILQTVKVVDELVKVMGRHKPENIVIEMARENQTTQKGQKNSRERMKRIEEGIKELGSQILKEHPVENTQLQNEKLYLYYLQNGRDMYVDQELDINRLSDYDVDHIVPQSFLKDDSIDNKVLTRSDKARGKSDNVPSEEVVKKMKNYWRQLLNAKLITQRKFDNLTKAERGGLSELDKAGFIKRQLVETRQITKHVAQILDSRMNTKYDENDKLIREVKVITLKSKLVSDFRKDFQFYKVREINNYHHAHDAYLNAVVGTALIKKYPKLESEFVYGDYKVYDVRKMIAKSEQEIGKATAKYFFYSNIMNFFKTEITLANGEIRKRPLIETNGETGEIVWDKGRDFATVRKVLSMPQVNIVKKTEVQTGGFSKESILPKRNSDKLIARKKDWDPKKYGGFDSPTVAYSVLVVAKVEKGKSKKLKSVKELLGITIMERSSFEKNPIDFLEAKGYKEVKKDLIIKLPKYSLFELENGRKRMLASAGELQKGNELALPSKYVNFLYLASHYEKLKGSPEDNEQKQLFVEQHKHYLDEIIEQISEFSKRVILADANLDKVLSAYNKHRDKPIREQAENIIHLFTLTNLGAPAAFKYFDTTIDRKRYTSTKEVLDATLIHQSITGLYETRIDLSQLGGDGGGGGPAPEAAAKGGTLNIEDEYRLHETSKEPDVSLGSTWLSDFPQAWAETGGMGLAVRQAPLIIPLKATSTPVSIKQYPMSQEARLGIKPHIQRLLDQGILVPCQSPWNTPLLPVKKPGTNDYRPVQDLREVNKRVEDIHPTVPNPYNLLSGLPPSHQWYTVLDLKDAFFCLRLHPTSQPLFAFEWRDPEMGISGQLTWTRLPQGFKNSPTLFNEALHRDLADFRIQHPDLILLQYVDDLLLAATSELDCQQGTRALLQTLGNLGYRASAKKAQICQKQVKYLGYLLKEGQRWLTEARKETVMGQPTPKTPRQLREFLGKAGFCRLFIPGFAEMAAPLYPLTKPGTLFNWGPDQQKAYQEIKQALLTAPALGLPDLTKPFELFVDEKQGYAKGVLTQKLGPWRRPVAYLSKKLDPVAAGWPPCLRMVAAIAVLTKDAGKLTMGQPLVILAPHAVEALVKQPPDRWLSNARMTHYQALLLDTDRVQFGPVVALNPATLLPLPEEGLQHNCLDILAEAHGTRPDLTDQPLPDADHTWYTDGSSLLQEGQRKAGAAVTTETEVIWAKALPAGTSAQRAELIALTQALKMAEGKKLNVYTDSRYAFATAHIHGEIYRRRGWLTSEGKEIKNKDEILALLKALFLPKRLSIIHCPGHQKGHSAEARGNRMADQAARKAAITETPDTSTLLIENSSPSGGSKRTADGSEFEAGKRTADGSEFEKRTADGSEFESPKKKAKVE

SEQ ID NO: 2941 - protein, 2120 aa, synthetic construct; identical to SEQ ID NO: 2669

SEQ ID NO: 2942 - protein, 2116 aa, synthetic construct; identical to SEQ ID NO: 2695

SEQ ID NO: 2943 - protein, 2123 aa, synthetic construct; identical to SEQ ID NO: 2612

SEQ ID NO: 2944 - protein, 2110 aa, synthetic construct; identical to SEQ ID NO: 2691

SEQ ID NO: 2945 - protein, 2113 aa, synthetic construct; identical to SEQ ID NO: 2659

SEQ ID NO: 2946 - protein, 2114 aa, synthetic construct; identical to SEQ ID NO: 2694

SEQ ID NO: 2947 - protein, 2111 aa, synthetic construct; identical to SEQ ID NO: 2682

SEQ ID NO: 2948 - protein, 2114 aa, synthetic construct; identical to SEQ ID NO: 2675

SEQ ID NO: 2949 - protein, 2116 aa, synthetic construct; identical to SEQ ID NO: 2686

SEQ ID NO: 2950 - protein, 2114 aa, synthetic construct; identical to SEQ ID NO: 2632

SEQ ID NO: 2951 - protein, 2113 aa, synthetic construct; identical to SEQ ID NO: 2625

SEQ ID NO: 2952 - protein, 2114 aa, synthetic construct; identical to SEQ ID NO: 2699

SEQ ID NO: 2953 - protein, 2113 aa, synthetic construct
MPAAKRVKLDGGDKKYSIGLDIGTNSVGWAVITDEYKVPSKKFKVLGNTDRHSIKKNLIGALLFDSGETAEATRLKRTARRRYTRRKNRICYLQEIFSNEMAKVDDSFFHRLEESFLVEEDKKHERHPIFGNIVDEVAYHEKYPTIYHLRKKLVDSTDKADLRLIYLALAHMIKFRGHFLIEGDLNPDNSDVDKLFIQLVQTYNQLFEENPINASGVDAKAILSARLSKSRRLENLIAQLPGEKKNGLFGNLIALSLGLTPNFKSNFDLAEDAKLQLSKDTYDDDLDNLLAQIGDQYADLFLAAKNLSDAILLSDILRVNTEITKAPLSASMIKRYDEHHQDLTLLKALVRQQLPEKYKEIFFDQSKNGYAGYIDGGASQEEFYKFIKPILEKMDGTEELLVKLNREDLLRKQRTFDNGSIPHQIHLGELHAILRRQEDFYPFLKDNREKIEKILTFRIPYYVGPLARGNSRFAWMTRKSEETITPWNFEEVVDKGASAQSFIERMTNFDKNLPNEKVLPKHSLLYEYFTVYNELTKVKYVTEGMRKPAFLSGEQKKAIVDLLFKTNRKVTVKQLKEDYFKKIECFDSVEISGVEDRFNASLGTYHDLLKIIKDKDFLDNEENEDILEDIVLTLTLFEDREMIEERLKTYAHLFDDKVMKQLKRRRYTGWGRLSRKLINGIRDKQSGKTILDFLKSDGFANRNFMQLIHDDSLTFKEDIQKAQVSGQGDSLHEHIANLAGSPAIKKGILQTVKVVDELVKVMGRHKPENIVIEMARENQTTQKGQKNSRERMKRIEEGIKELGSQILKEHPVENTQLQNEKLYLYYLQNGRDMYVDQELDINRLSDYDVDHIVPQSFLKDDSIDNKVLTRSDKARGKSDNVPSEEVVKKMKNYWRQLLNAKLITQRKFDNLTKAERGGLSELDKAGFIKRQLVETRQITKHVAQILDSRMNTKYDENDKLIREVKVITLKSKLVSDFRKDFQFYKVREINNYHHAHDAYLNAVVGTALIKKYPKLESEFVYGDYKVYDVRKMIAKSEQEIGKATAKYFFYSNIMNFFKTEITLANGEIRKRPLIETNGETGEIVWDKGRDFATVRKVLSMPQVNIVKKTEVQTGGFSKESILPKRNSDKLIARKKDWDPKKYGGFDSPTVAYSVLVVAKVEKGKSKKLKSVKELLGITIMERSSFEKNPIDFLEAKGYKEVKKDLIIKLPKYSLFELENGRKRMLASAGELQKGNELALPSKYVNFLYLASHYEKLKGSPEDNEQKQLFVEQHKHYLDEIIEQISEFSKRVILADANLDKVLSAYNKHRDKPIREQAENIIHLFTLTNLGAPAAFKYFDTTIDRKRYTSTKEVLDATLIHQSITGLYETRIDLSQLGGDGGGGGEAAAKGGTLNIEDEYRLHETSKEPDVSLGSTWLSDFPQAWAETGGMGLAVRQAPLIIPLKATSTPVSIKQYPMSQEARLGIKPHIQRLLDQGILVPCQSPWNTPLLPVKKPGTNDYRPVQDLREVNKRVEDIHPTVPNPYNLLSGLPPSHQWYTVLDLKDAFFCLRLHPTSQPLFAFEWRDPEMGISGQLTWTRLPQGFKNSPTLFNEALHRDLADFRIQHPDLILLQYVDDLLLAATSELDCQQGTRALLQTLGNLGYRASAKKAQICQKQVKYLGYLLKEGQRWLTEARKETVMGQPTPKTPRQLREFLGKAGFCRLFIPGFAEMAAPLYPLTKPGTLFNWGPDQQKAYQEIKQALLTAPALGLPDLTKPFELFVDEKQGYAKGVLTQKLGPWRRPVAYLSKKLDPVAAGWPPCLRMVAAIAVLTKDAGKLTMGQPLVILAPHAVEALVKQPPDRWLSNARMTHYQALLLDTDRVQFGPVVALNPATLLPLPEEGLQHNCLDILAEAHGTRPDLTDQPLPDADHTWYTDGSSLLQEGQRKAGAAVTTETEVIWAKALPAGTSAQRAELIALTQALKMAEGKKLNVYTDSRYAFATAHIHGEIYRRRGWLTSEGKEIKNKDEILALLKALFLPKRLSIIHCPGHQKGHSAEARGNRMADQAARKAAITETPDTSTLLIENSSPSGGSKRTADGSEFEAGKRTADGSEFEKRTADGSEFESPKKKAKVE

SEQ ID NO: 2954 - protein, 2114 aa, synthetic construct
MPAAKRVKLDGGDKKYSIGLDIGTNSVGWAVITDEYKVPSKKFKVLGNTDRHSIKKNLIGALLFDSGETAEATRLKRTARRRYTRRKNRICYLQEIFSNEMAKVDDSFFHRLEESFLVEEDKKHERHPIFGNIVDEVAYHEKYPTIYHLRKKLVDSTDKADLRLIYLALAHMIKFRGHFLIEGDLNPDNSDVDKLFIQLVQTYNQLFEENPINASGVDAKAILSARLSKSRRLENLIAQLPGEKKNGLFGNLIALSLGLTPNFKSNFDLAEDAKLQLSKDTYDDDLDNLLAQIGDQYADLFLAAKNLSDAILLSDILRVNTEITKAPLSASMIKRYDEHHQDLTLLKALVRQQLPEKYKEIFFDQSKNGYAGYIDGGASQEEFYKFIKPILEKMDGTEELLVKLNREDLLRKQRTFDNGSIPHQIHLGELHAILRRQEDFYPFLKDNREKIEKILTFRIPYYVGPLARGNSRFAWMTRKSEETITPWNFEEVVDKGASAQSFIERMTNFDKNLPNEKVLPKHSLLYEYFTVYNELTKVKYVTEGMRKPAFLSGEQKKAIVDLLFKTNRKVTVKQLKEDYFKKIECFDSVEISGVEDRFNASLGTYHDLLKIIKDKDFLDNEENEDILEDIVLTLTLFEDREMIEERLKTYAHLFDDKVMKQLKRRRYTGWGRLSRKLINGIRDKQSGKTILDFLKSDGFANRNFMQLIHDDSLTFKEDIQKAQVSGQGDSLHEHIANLAGSPAIKKGILQTVKVVDELVKVMGRHKPENIVIEMARENQTTQKGQKNSRERMKRIEEGIKELGSQILKEHPVENTQLQNEKLYLYYLQNGRDMYVDQELDINRLSDYDVDHIVPQSFLKDDSIDNKVLTRSDKARGKSDNVPSEEVVKKMKNYWRQLLNAKLITQRKFDNLTKAERGGLSELDKAGFIKRQLVETRQITKHVAQILDSRMNTKYDENDKLIREVKVITLKSKLVSDFRKDFQFYKVREINNYHHAHDAYLNAVVGTALIKKYPKLESEFVYGDYKVYDVRKMIAKSEQEIGKATAKYFFYSNIMNFFKTEITLANGEIRKRPLIETNGETGEIVWDKGRDFATVRKVLSMPQVNIVKKTEVQTGGFSKESILPKRNSDKLIARKKDWDPKKYGGFDSPTVAYSVLVVAKVEKGKSKKLKSVKELLGITIMERSSFEKNPIDFLEAKGYKEVKKDLIIKLPKYSLFELENGRKRMLASAGELQKGNELALPSKYVNFLYLASHYEKLKGSPEDNEQKQLFVEQHKHYLDEIIEQISEFSKRVILADANLDKVLSAYNKHRDKPIREQAENIIHLFTLTNLGAPAAFKYFDTTIDRKRYTSTKEVLDATLIHQSITGLYETRIDLSQLGGDGGGSSGGGPAPGGTLNIEDEYRLHETSKEPDVSLGSTWLSDFPQAWAETGGMGLAVRQAPLIIPLKATSTPVSIKQYPMSQEARLGIKPHIQRLLDQGILVPCQSPWNTPLLPVKKPGTNDYRPVQDLREVNKRVEDIHPTVPNPYNLLSGLPPSHQWYTVLDLKDAFFCLRLHPTSQPLFAFEWRDPEMGISGQLTWTRLPQGFKNSPTLFNEALHRDLADFRIQHPDLILLQYVDDLLLAATSELDCQQGTRALLQTLGNLGYRASAKKAQICQKQVKYLGYLLKEGQRWLTEARKETVMGQPTPKTPRQLREFLGKAGFCRLFIPGFAEMAAPLYPLTKPGTLFNWGPDQQKAYQEIKQALLTAPALGLPDLTKPFELFVDEKQGYAKGVLTQKLGPWRRPVAYLSKKLDPVAAGWPPCLRMVAAIAVLTKDAGKLTMGQPLVILAPHAVEALVKQPPDRWLSNARMTHYQALLLDTDRVQFGPVVALNPATLLPLPEEGLQHNCLDILAEAHGTRPDLTDQPLPDADHTWYTDGSSLLQEGQRKAGAAVTTETEVIWAKALPAGTSAQRAELIALTQALKMAEGKKLNVYTDSRYAFATAHIHGEIYRRRGWLTSEGKEIKNKDEILALLKALFLPKRLSIIHCPGHQKGHSAEARGNRMADQAARKAAITETPDTSTLLIENSSPSGGSKRTADGSEFEAGKRTADGSEFEKRTADGSEFESPKKKAKVE

SEQ ID NO: 2955 - protein, 2114 aa, synthetic construct; identical to SEQ ID NO: 2689

SEQ ID NO: 2956 - protein, 1999 aa, synthetic construct
MPAAKRVKLDGGDKKYSIGLDIGTNSVGWAVITDEYKVPSKKFKVLGNTDRHSIKKNLIGALLFDSGETAEATRLKRTARRRYTRRKNRICYLQEIFSNEMAKVDDSFFHRLEESFLVEEDKKHERHPIFGNIVDEVAYHEKYPTIYHLRKKLVDSTDKADLRLIYLALAHMIKFRGHFLIEGDLNPDNSDVDKLFIQLVQTYNQLFEENPINASGVDAKAILSARLSKSRRLENLIAQLPGEKKNGLFGNLIALSLGLTPNFKSNFDLAEDAKLQLSKDTYDDDLDNLLAQIGDQYADLFLAAKNLSDAILLSDILRVNTEITKAPLSASMIKRYDEHHQDLTLLKALVRQQLPEKYKEIFFDQSKNGYAGYIDGGASQEEFYKFIKPILEKMDGTEELLVKLNREDLLRKQRTFDNGSIPHQIHLGELHAILRRQEDFYPFLKDNREKIEKILTFRIPYYVGPLARGNSRFAWMTRKSEETITPWNFEEVVDKGASAQSFIERMTNFDKNLPNEKVLPKHSLLYEYFTVYNELTKVKYVTEGMRKPAFLSGEQKKAIVDLLFKTNRKVTVKQLKEDYFKKIECFDSVEISGVEDRFNASLGTYHDLLKIIKDKDFLDNEENEDILEDIVLTLTLFEDREMIEERLKTYAHLFDDKVMKQLKRRRYTGWGRLSRKLINGIRDKQSGKTILDFLKSDGFANRNFMQLIHDDSLTFKEDIQKAQVSGQGDSLHEHIANLAGSPAIKKGILQTVKVVDELVKVMGRHKPENIVIEMARENQTTQKGQKNSRERMKRIEEGIKELGSQILKEHPVENTQLQNEKLYLYYLQNGRDMYVDQELDINRLSDYDVDHIVPQSFLKDDSIDNKVLTRSDKARGKSDNVPSEEVVKKMKNYWRQLLNAKLITQRKFDNLTKAERGGLSELDKAGFIKRQLVETRQITKHVAQILDSRMNTKYDENDKLIREVKVITLKSKLVSDFRKDFQFYKVREINNYHHAHDAYLNAVVGTALIKKYPKLESEFVYGDYKVYDVRKMIAKSEQEIGKATAKYFFYSNIMNFFKTEITLANGEIRKRPLIETNGETGEIVWDKGRDFATVRKVLSMPQVNIVKKTEVQTGGFSKESILPKRNSDKLIARKKDWDPKKYGGFDSPTVAYSVLVVAKVEKGKSKKLKSVKELLGITIMERSSFEKNPIDFLEAKGYKEVKKDLIIKLPKYSLFELENGRKRMLASAGELQKGNELALPSKYVNFLYLASHYEKLKGSPEDNEQKQLFVEQHKHYLDEIIEQISEFSKRVILADANLDKVLSAYNKHRDKPIREQAENIIHLFTLTNLGAPAAFKYFDTTIDRKRYTSTKEVLDATLIHQSITGLYETRIDLSQLGGDGGGGGGSSGGSGGGVLDAPPSHIGLEHLPPPPEVPQFPLNLERLQALQDLVHRSLEAGYISPWDGPGNNPVFPVRKPNGAWRFVHDLRVTNALTKPIPALSPGPPDLTAIPTHLPHIICLDLKDAFFQIPVEDRFRSYFAFTLPTPGGLQPHRRFAWRVLPQGFINSPALFQRALQEPLRQVSAAFSQSLLVSYMDDILYVSPTEEQRLQCYQTMAAHLRDLGFQVASEKTRQTPSPVPFLGQMVHERMVTYQSLPTLQISSPISLHQLQTVLGDLQWVSRGTPTTRRPLQLLYSSLKPIDDPRAIIHLSPEQQQGIAELRQALSHNARSRYNEQEPLLAYVHLTRAGSTLVLFQKGAQFPLAYFQTPLTDNQASPWGLLLLLGCQYLQAQALSSYAKTILKYYHNLPKTSLDNWIQSSEDPRVQELLQLWPQISSQGIQPPGPWKTLVTRAEVFLTPQFSPEPIPAALCLFSDGAARRGAYCLWKDHLLDFQAVPAPESAQKGELAGLLAGLAAAPPEPLNIWVDSKYLYSLLRTLVLGAWLQPDPVPSYALLYKSLLRHPAIFVGHVRSHSSASHPIASLNNYVDQLAGKRTADGSEFEKRTADGSEFESPKKKAKVE

SEQ ID NO: 2957 - protein, 2131 aa, synthetic construct
MPAAKRVKLDGGDKKYSIGLDIGTNSVGWAVITDEYKVPSKKFKVLGNTDRHSIKKNLIGALLFDSGETAEATRLKRTARRRYTRRKNRICYLQEIFSNEMAKVDDSFFHRLEESFLVEEDKKHERHPIFGNIVDEVAYHEKYPTIYHLRKKLVDSTDKADLRLIYLALAHMIKFRGHFLIEGDLNPDNSDVDKLFIQLVQTYNQLFEENPINASGVDAKAILSARLSKSRRLENLIAQLPGEKKNGLFGNLIALSLGLTPNFKSNFDLAEDAKLQLSKDTYDDDLDNLLAQIGDQYADLFLAAKNLSDAILLSDILRVNTEITKAPLSASMIKRYDEHHQDLTLLKALVRQQLPEKYKEIFFDQSKNGYAGYIDGGASQEEFYKFIKPILEKMDGTEELLVKLNREDLLRKQRTFDNGSIPHQIHLGELHAILRRQEDFYPFLKDNREKIEKILTFRIPYYVGPLARGNSRFAWMTRKSEETITPWNFEEVVDKGASAQSFIERMTNFDKNLPNEKVLPKHSLLYEYFTVYNELTKVKYVTEGMRKPAFLSGEQKKAIVDLLFKTNRKVTVKQLKEDYFKKIECFDSVEISGVEDRFNASLGTYHDLLKIIKDKDFLDNEENEDILEDIVLTLTLFEDREMIEERLKTYAHLFDDKVMKQLKRRRYTGWGRLSRKLINGIRDKQSGKTILDFLKSDGFANRNFMQLIHDDSLTFKEDIQKAQVSGQGDSLHEHIANLAGSPAIKKGILQTVKVVDELVKVMGRHKPENIVIEMARENQTTQKGQKNSRERMKRIEEGIKELGSQILKEHPVENTQLQNEKLYLYYLQNGRDMYVDQELDINRLSDYDVDHIVPQSFLKDDSIDNKVLTRSDKARGKSDNVPSEEVVKKMKNYWRQLLNAKLITQRKFDNLTKAERGGLSELDKAGFIKRQLVETRQITKHVAQILDSRMNTKYDENDKLIREVKVITLKSKLVSDFRKDFQFYKVREINNYHHAHDAYLNAVVGTALIKKYPKLESEFVYGDYKVYDVRKMIAKSEQEIGKATAKYFFYSNIMNFFKTEITLANGEIRKRPLIETNGETGEIVWDKGRDFATVRKVLSMPQVNIVKKTEVQTGGFSKESILPKRNSDKLIARKKDWDPKKYGGFDSPTVAYSVLVVAKVEKGKSKKLKSVKELLGITIMERSSFEKNPIDFLEAKGYKEVKKDLIIKLPKYSLFELENGRKRMLASAGELQKGNELALPSKYVNFLYLASHYEKLKGSPEDNEQKQLFVEQHKHYLDEIIEQISEFSKRVILADANLDKVLSAYNKHRDKPIREQAENIIHLFTLTNLGAPAAFKYFDTTIDRKRYTSTKEVLDATLIHQSITGLYETRIDLSQLGGDGGAEAAAKEAAAKEAAAKEAAAKALEAEAAAKEAAAKEAAAKEAAAKAGGTLNIEDEHRLHETSKEPDVSLGSTWLSDFPQAWAETGGMGLAVRQAPLIIPLKATSTPVSIKQYPMSQEARLGIKPHIQRLLDQGILVPCQSPWNTPLLPVKKPGTNDYRPVQDLREVNKRVEDIHPTVPNPYNLLSGLPPSHQWYTVLDLKDAFFCLRLHPTSQPLFAFEWRDPEMGISGQLTWTRLPQGFKNSPTLFDEALHRDLADFRIQHPDLILLQYVDDLLLAATSELDCQQGTRALLQTLGNLGYRASAKKAQICQKQVKYLGYLLKEGQRWLTEARKETVMGQPTPKTPRQLREFLGTAGFCRLWIPGFAEMAAPLYPLTKTGTLFNWGPDQQKAYQEIKQALLTAPALGLPDLTKPFELFVDEKQGYAKGVLTQKLGPWRRPVAYLSKKLDPVAAGWPPCLRMVAAIAVLTKDAGKLTMGQPLVILAPHAVEALVKQPPDRWLSNARMTHYQALLLDTDRVQFGPVVALNPATLLPLPEEGLQHNCLDILAEAHGTRPDLTDQPLPDADHTWYTDGSSLLQEGQRKAGAAVTTETEVIWAKALPAGTSAQRAELIALTQALKMAEGKKLNVYTDSRYAFATAHIHGEIYRRRGLLTSEGKEIKNKDEILALLKALFLPKRLSIIHCPGHQKGHSAEARGNRMADQAARKAAITETPDTSTLLAGKRTADGSEFEKRTADGSEFESPKKKAKVE

SEQ ID NO: 2958 - protein, 2101 aa, synthetic construct
MPAAKRVKLDGGDKKYSIGLDIGTNSVGWAVITDEYKVPSKKFKVLGNTDRHSIKKNLIGALLFDSGETAEATRLKRTARRRYTRRKNRICYLQEIFSNEMAKVDDSFFHRLEESFLVEEDKKHERHPIFGNIVDEVAYHEKYPTIYHLRKKLVDSTDKADLRLIYLALAHMIKFRGHFLIEGDLNPDNSDVDKLFIQLVQTYNQLFEENPINASGVDAKAILSARLSKSRRLENLIAQLPGEKKNGLFGNLIALSLGLTPNFKSNFDLAEDAKLQLSKDTYDDDLDNLLAQIGDQYADLFLAAKNLSDAILLSDILRVNTEITKAPLSASMIKRYDEHHQDLTLLKALVRQQLPEKYKEIFFDQSKNGYAGYIDGGASQEEFYKFIKPILEKMDGTEELLVKLNREDLLRKQRTFDNGSIPHQIHLGELHAILRRQEDFYPFLKDNREKIEKILTFRIPYYVGPLARGNSRFAWMTRKSEETITPWNFEEVVDKGASAQSFIERMTNFDKNLPNEKVLPKHSLLYEYFTVYNELTKVKYVTEGMRKPAFLSGEQKKAIVDLLFKTNRKVTVKQLKEDYFKKIECFDSVEISGVEDRFNASLGTYHDLLKIIKDKDFLDNEENEDILEDIVLTLTLFEDREMIEERLKTYAHLFDDKVMKQLKRRRYTGWGRLSRKLINGIRDKQSGKTILDFLKSDGFANRNFMQLIHDDSLTFKEDIQKAQVSGQGDSLHEHIANLAGSPAIKKGILQTVKVVDELVKVMGRHKPENIVIEMARENQTTQKGQKNSRERMKRIEEGIKELGSQILKEHPVENTQLQNEKLYLYYLQNGRDMYVDQELDINRLSDYDVDHIVPQSFLKDDSIDNKVLTRSDKARGKSDNVPSEEVVKKMKNYWRQLLNAKLITQRKFDNLTKAERGGLSELDKAGFIKRQLVETRQITKHVAQILDSRMNTKYDENDKLIREVKVITLKSKLVSDFRKDFQFYKVREINNYHHAHDAYLNAVVGTALIKKYPKLESEFVYGDYKVYDVRKMIAKSEQEIGKATAKYFFYSNIMNFFKTEITLANGEIRKRPLIETNGETGEIVWDKGRDFATVRKVLSMPQVNIVKKTEVQTGGFSKESILPKRNSDKLIARKKDWDPKKYGGFDSPTVAYSVLVVAKVEKGKSKKLKSVKELLGITIMERSSFEKNPIDFLEAKGYKEVKKDLIIKLPKYSLFELENGRKRMLASAGELQKGNELALPSKYVNFLYLASHYEKLKGSPEDNEQKQLFVEQHKHYLDEIIEQISEFSKRVILADANLDKVLSAYNKHRDKPIREQAENIIHLFTLTNLGAPAAFKYFDTTIDRKRYTSTKEVLDATLIHQSITGLYETRIDLSQLGGDGGSGSETPGTSESATPESGGTLNIEDEHRLHETSKEPDVSLGSTWLSDFPQAWAETGGMGLAVRQAPLIIPLKATSTPVSIKQYPMSQEARLGIKPHIQRLLDQGILVPCQSPWNTPLLPVKKPGTNDYRPVQDLREVNKRVEDIHPTVPNPYNLLSGLPPSHQWYTVLDLKDAFFCLRLHPTSQPLFAFEWRDPEMGISGQLTWTRLPQGFKNSPTLFDEALHRDLADFRIQHPDLILLQYVDDLLLAATSELDCQQGTRALLQTLGNLGYRASAKKAQICQKQVKYLGYLLKEGQRWLTEARKETVMGQPTPKTPRQLREFLGTAGFCRLWIPGFAEMAAPLYPLTKTGTLFNWGPDQQKAYQEIKQALLTAPALGLPDLTKPFELFVDEKQGYAKGVLTQKLGPWRRPVAYLSKKLDPVAAGWPPCLRMVAAIAVLTKDAGKLTMGQPLVILAPHAVEALVKQPPDRWLSNARMTHYQALLLDTDRVQFGPVVALNPATLLPLPEEGLQHNCLDILAEAHGTRPDLTDQPLPDADHTWYTDGSSLLQEGQRKAGAAVTTETEVIWAKALPAGTSAQRAELIALTQALKMAEGKKLNVYTDSRYAFATAHIHGEIYRRRGLLTSEGKEIKNKDEILALLKALFLPKRLSIIHCPGHQKGHSAEARGNRMADQAARKAAITETPDTSTLLAGKRTADGSEFEKRTADGSEFESPKKKAKVE

SEQ ID NO: 2959 - protein, 2096 aa, synthetic construct
MPAAKRVKLDGGDKKYSIGLDIGTNSVGWAVITDEYKVPSKKFKVLGNTDRHSIKKNLIGALLFDSGETAEATRLKRTARRRYTRRKNRICYLQEIFSNEMAKVDDSFFHRLEESFLVEEDKKHERHPIFGNIVDEVAYHEKYPTIYHLRKKLVDSTDKADLRLIYLALAHMIKFRGHFLIEGDLNPDNSDVDKLFIQLVQTYNQLFEENPINASGVDAKAILSARLSKSRRLENLIAQLPGEKKNGLFGNLIALSLGLTPNFKSNFDLAEDAKLQLSKDTYDDDLDNLLAQIGDQYADLFLAAKNLSDAILLSDILRVNTEITKAPLSASMIKRYDEHHQDLTLLKALVRQQLPEKYKEIFFDQSKNGYAGYIDGGASQEEFYKFIKPILEKMDGTEELLVKLNREDLLRKQRTFDNGSIPHQIHLGELHAILRRQEDFYPFLKDNREKIEKILTFRIPYYVGPLARGNSRFAWMTRKSEETITPWNFEEVVDKGASAQSFIERMTNFDKNLPNEKVLPKHSLLYEYFTVYNELTKVKYVTEGMRKPAFLSGEQKKAIVDLLFKTNRKVTVKQLKEDYFKKIECFDSVEISGVEDRFNASLGTYHDLLKIIKDKDFLDNEENEDILEDIVLTLTLFEDREMIEERLKTYAHLFDDKVMKQLKRRRYTGWGRLSRKLINGIRDKQSGKTILDFLKSDGFANRNFMQLIHDDSLTFKEDIQKAQVSGQGDSLHEHIANLAGSPAIKKGILQTVKVVDELVKVMGRHKPENIVIEMARENQTTQKGQKNSRERMKRIEEGIKELGSQILKEHPVENTQLQNEKLYLYYLQNGRDMYVDQELDINRLSDYDVDHIVPQSFLKDDSIDNKVLTRSDKARGKSDNVPSEEVVKKMKNYWRQLLNAKLITQRKFDNLTKAERGGLSELDKAGFIKRQLVETRQITKHVAQILDSRMNTKYDENDKLIREVKVITLKSKLVSDFRKDFQFYKVREINNYHHAHDAYLNAVVGTALIKKYPKLESEFVYGDYKVYDVRKMIAKSEQEIGKATAKYFFYSNIMNFFKTEITLANGEIRKRPLIETNGETGEIVWDKGRDFATVRKVLSMPQVNIVKKTEVQTGGFSKESILPKRNSDKLIARKKDWDPKKYGGFDSPTVAYSVLVVAKVEKGKSKKLKSVKELLGITIMERSSFEKNPIDFLEAKGYKEVKKDLIIKLPKYSLFELENGRKRMLASAGELQKGNELALPSKYVNFLYLASHYEKLKGSPEDNEQKQLFVEQHKHYLDEIIEQISEFSKRVILADANLDKVLSAYNKHRDKPIREQAENIIHLFTLTNLGAPAAFKYFDTTIDRKRYTSTKEVLDATLIHQSITGLYETRIDLSQLGGDGGEAAAKGGSGGGGGTLNIEDEHRLHETSKEPDVSLGSTWLSDFPQAWAETGGMGLAVRQAPLIIPLKATSTPVSIKQYPMSQEARLGIKPHIQRLLDQGILVPCQSPWNTPLLPVKKPGTNDYRPVQDLREVNKRVEDIHPTVPNPYNLLSGLPPSHQWYTVLDLKDAFFCLRLHPTSQPLFAFEWRDPEMGISGQLTWTRLPQGFKNSPTLFDEALHRDLADFRIQHPDLILLQYVDDLLLAATSELDCQQGTRALLQTLGNLGYRASAKKAQICQKQVKYLGYLLKEGQRWLTEARKETVMGQPTPKTPRQLREFLGTAGFCRLWIPGFAEMAAPLYPLTKTGTLFNWGPDQQKAYQEIKQALLTAPALGLPDLTKPFELFVDEKQGYAKGVLTQKLGPWRRPVAYLSKKLDPVAAGWPPCLRMVAAIAVLTKDAGKLTMGQPLVILAPHAVEALVKQPPDRWLSNARMTHYQALLLDTDRVQFGPVVALNPATLLPLPEEGLQHNCLDILAEAHGTRPDLTDQPLPDADHTWYTDGSSLLQEGQRKAGAAVTTETEVIWAKALPAGTSAQRAELIALTQALKMAEGKKLNVYTDSRYAFATAHIHGEIYRRRGLLTSEGKEIKNKDEILALLKALFLPKRLSIIHCPGHQKGHSAEARGNRMADQAARKAAITETPDTSTLLAGKRTADGSEFEKRTADGSEFESPKKKAKVE

SEQ ID NO: 2960 - protein, 2096 aa, synthetic construct
MPAAKRVKLDGGDKKYSIGLDIGTNSVGWAVITDEYKVPSKKFKVLGNTDRHSIKKNLIGALLFDSGETAEATRLKRTARRRYTRRKNRICYLQEIFSNEMAKVDDSFFHRLEESFLVEEDKKHERHPIFGNIVDEVAYHEKYPTIYHLRKKLVDSTDKADLRLIYLALAHMIKFRGHFLIEGDLNPDNSDVDKLFIQLVQTYNQLFEENPINASGVDAKAILSARLSKSRRLENLIAQLPGEKKNGLFGNLIALSLGLTPNFKSNFDLAEDAKLQLSKDTYDDDLDNLLAQIGDQYADLFLAAKNLSDAILLSDILRVNTEITKAPLSASMIKRYDEHHQDLTLLKALVRQQLPEKYKEIFFDQSKNGYAGYIDGGASQEEFYKFIKPILEKMDGTEELLVKLNREDLLRKQRTFDNGSIPHQIHLGELHAILRRQEDFYPFLKDNREKIEKILTFRIPYYVGPLARGNSRFAWMTRKSEETITPWNFEEVVDKGASAQSFIERMTNFDKNLPNEKVLPKHSLLYEYFTVYNELTKVKYVTEGMRKPAFLSGEQKKAIVDLLFKTNRKVTVKQLKEDYFKKIECFDSVEISGVEDRFNASLGTYHDLLKIIKDKDFLDNEENEDILEDIVLTLTLFEDREMIEERLKTYAHLFDDKVMKQLKRRRYTGWGRLSRKLINGIRDKQSGKTILDFLKSDGFANRNFMQLIHDDSLTFKEDIQKAQVSGQGDSLHEHIANLAGSPAIKKGILQTVKVVDELVKVMGRHKPENIVIEMARENQTTQKGQKNSRERMKRIEEGIKELGSQILKEHPVENTQLQNEKLYLYYLQNGRDMYVDQELDINRLSDYDVDHIVPQSFLKDDSIDNKVLTRSDKARGKSDNVPSEEVVKKMKNYWRQLLNAKLITQRKFDNLTKAERGGLSELDKAGFIKRQLVETRQITKHVAQILDSRMNTKYDENDKLIREVKVITLKSKLVSDFRKDFQFYKVREINNYHHAHDAYLNAVVGTALIKKYPKLESEFVYGDYKVYDVRKMIAKSEQEIGKATAKYFFYSNIMNFFKTEITLANGEIRKRPLIETNGETGEIVWDKGRDFATVRKVLSMPQVNIVKKTEVQTGGFSKESILPKRNSDKLIARKKDWDPKKYGGFDSPTVAYSVLVVAKVEKGKSKKLKSVKELLGITIMERSSFEKNPIDFLEAKGYKEVKKDLIIKLPKYSLFELENGRKRMLASAGELQKGNELALPSKYVNFLYLASHYEKLKGSPEDNEQKQLFVEQHKHYLDEIIEQISEFSKRVILADANLDKVLSAYNKHRDKPIREQAENIIHLFTLTNLGAPAAFKYFDTTIDRKRYTSTKEVLDATLIHQSITGLYETRIDLSQLGGDGGGGSEAAAKGSSGGTLNIEDEHRLHETSKEPDVSLGSTWLSDFPQAWAETGGMGLAVRQAPLIIPLKATSTPVSIKQYPMSQEARLGIKPHIQRLLDQGILVPCQSPWNTPLLPVKKPGTNDYRPVQDLREVNKRVEDIHPTVPNPYNLLSGLPPSHQWYTVLDLKDAFFCLRLHPTSQPLFAFEWRDPEMGISGQLTWTRLPQGFKNSPTLFDEALHRDLADFRIQHPDLILLQYVDDLLLAATSELDCQQGTRALLQTLGNLGYRASAKKAQICQKQVKYLGYLLKEGQRWLTEARKETVMGQPTPKTPRQLREFLGTAGFCRLWIPGFAEMAAPLYPLTKTGTLFNWGPDQQKAYQEIKQALLTAPALGLPDLTKPFELFVDEKQGYAKGVLTQKLGPWRRPVAYLSKKLDPVAAGWPPCLRMVAAIAVLTKDAGKLTMGQPLVILAPHAVEALVKQPPDRWLSNARMTHYQALLLDTDRVQFGPVVALNPATLLPLPEEGLQHNCLDILAEAHGTRPDLTDQPLPDADHTWYTDGSSLLQEGQRKAGAAVTTETEVIWAKALPAGTSAQRAELIALTQALKMAEGKKLNVYTDSRYAFATAHIHGEIYRRRGLLTSEGKEIKNKDEILALLKALFLPKRLSIIHCPGHQKGHSAEARGNRMADQAARKAAITETPDTSTLLAGKRTADGSEFEKRTADGSEFESPKKKAKVE

SEQ ID NO: 2961 - protein, 2096 aa, synthetic construct
MPAAKRVKLDGGDKKYSIGLDIGTNSVGWAVITDEYKVPSKKFKVLGNTDRHSIKKNLIGALLFDSGETAEATRLKRTARRRYTRRKNRICYLQEIFSNEMAKVDDSFFHRLEESFLVEEDKKHERHPIFGNIVDEVAYHEKYPTIYHLRKKLVDSTDKADLRLIYLALAHMIKFRGHFLIEGDLNPDNSDVDKLFIQLVQTYNQLFEENPINASGVDAKAILSARLSKSRRLENLIAQLPGEKKNGLFGNLIALSLGLTPNFKSNFDLAEDAKLQLSKDTYDDDLDNLLAQIGDQYADLFLAAKNLSDAILLSDILRVNTEITKAPLSASMIKRYDEHHQDLTLLKALVRQQLPEKYKEIFFDQSKNGYAGYIDGGASQEEFYKFIKPILEKMDGTEELLVKLNREDLLRKQRTFDNGSIPHQIHLGELHAILRRQEDFYPFLKDNREKIEKILTFRIPYYVGPLARGNSRFAWMTRKSEETITPWNFEEVVDKGASAQSFIERMTNFDKNLPNEKVLPKHSLLYEYFTVYNELTKVKYVTEGMRKPAFLSGEQKKAIVDLLFKTNRKVTVKQLKEDYFKKIECFDSVEISGVEDRFNASLGTYHDLLKIIKDKDFLDNEENEDILEDIVLTLTLFEDREMIEERLKTYAHLFDDKVMKQLKRRRYTGWGRLSRKLINGIRDKQSGKTILDFLKSDGFANRNFMQLIHDDSLTFKEDIQKAQVSGQGDSLHEHIANLAGSPAIKKGILQTVKVVDELVKVMGRHKPENIVIEMARENQTTQKGQKNSRERMKRIEEGIKELGSQILKEHPVENTQLQNEKLYLYYLQNGRDMYVDQELDINRLSDYDVDHIVPQSFLKDDSIDNKVLTRSDKARGKSDNVPSEEVVKKMKNYWRQLLNAKLITQRKFDNLTKAERGGLSELDKAGFIKRQLVETRQITKHVAQILDSRMNTKYDENDKLIREVKVITLKSKLVSDFRKDFQFYKVREINNYHHAHDAYLNAVVGTALIKKYPKLESEFVYGDYKVYDVRKMIAKSEQEIGKATAKYFFYSNIMNFFKTEITLANGEIRKRPLIETNGETGEIVWDKGRDFATVRKVLSMPQVNIVKKTEVQTGGFSKESILPKRNSDKLIARKKDWDPKKYGGFDSPTVAYSVLVVAKVEKGKSKKLKSVKELLGITIMERSSFEKNPIDFLEAKGYKEVKKDLIIKLPKYSLFELENGRKRMLASAGELQKGNELALPSKYVNFLYLASHYEKLKGSPEDNEQKQLFVEQHKHYLDEIIEQISEFSKRVILADANLDKVLSAYNKHRDKPIREQAENIIHLFTLTNLGAPAAFKYFDTTIDRKRYTSTKEVLDATLIHQSITGLYETRIDLSQLGGDGGPAPGGSEAAAKGGTLNIEDEHRLHETSKEPDVSLGSTWLSDFPQAWAETGGMGLAVRQAPLIIPLKATSTPVSIKQYPMSQEARLGIKPHIQRLLDQGILVPCQSPWNTPLLPVKKPGTNDYRPVQDLREVNKRVEDIHPTVPNPYNLLSGLPPSHQWYTVLDLKDAFFCLRLHPTSQPLFAFEWRDPEMGISGQLTWTRLPQGFKNSPTLFDEALHRDLADFRIQHPDLILLQYVDDLLLAATSELDCQQGTRALLQTLGNLGYRASAKKAQICQKQVKYLGYLLKEGQRWLTEARKETVMGQPTPKTPRQLREFLGTAGFCRLWIPGFAEMAAPLYPLTKTGTLFNWGPDQQKAYQEIKQALLTAPALGLPDLTKPFELFVDEKQGYAKGVLTQKLGPWRRPVAYLSKKLDPVAAGWPPCLRMVAAIAVLTKDAGKLTMGQPLVILAPHAVEALVKQPPDRWLSNARMTHYQALLLDTDRVQFGPVVALNPATLLPLPEEGLQHNCLDILAEAHGTRPDLTDQPLPDADHTWYTDGSSLLQEGQRKAGAAVTTETEVIWAKALPAGTSAQRAELIALTQALKMAEGKKLNVYTDSRYAFATAHIHGEIYRRRGLLTSEGKEIKNKDEILALLKALFLPKRLSIIHCPGHQKGHSAEARGNRMADQAARKAAITETPDTSTLLAGKRTADGSEFEKRTADGSEFESPKKKAKVE

SEQ ID NO: 2962 - protein, 2093 aa, synthetic construct
MPAAKRVKLDGGDKKYSIGLDIGTNSVGWAVITDEYKVPSKKFKVLGNTDRHSIKKNLIGALLFDSGETAEATRLKRTARRRYTRRKNRICYLQEIFSNEMAKVDDSFFHRLEESFLVEEDKKHERHPIFGNIVDEVAYHEKYPTIYHLRKKLVDSTDKADLRLIYLALAHMIKFRGHFLIEGDLNPDNSDVDKLFIQLVQTYNQLFEENPINASGVDAKAILSARLSKSRRLENLIAQLPGEKKNGLFGNLIALSLGLTPNFKSNFDLAEDAKLQLSKDTYDDDLDNLLAQIGDQYADLFLAAKNLSDAILLSDILRVNTEITKAPLSASMIKRYDEHHQDLTLLKALVRQQLPEKYKEIFFDQSKNGYAGYIDGGASQEEFYKFIKPILEKMDGTEELLVKLNREDLLRKQRTFDNGSIPHQIHLGELHAILRRQEDFYPFLKDNREKIEKILTFRIPYYVGPLARGNSRFAWMTRKSEETITPWNFEEVVDKGASAQSFIERMTNFDKNLPNEKVLPKHSLLYEYFTVYNELTKVKYVTEGMRKPAFLSGEQKKAIVDLLFKTNRKVTVKQLKEDYFKKIECFDSVEISGVEDRFNASLGTYHDLLKIIKDKDFLDNEENEDILEDIVLTLTLFEDREMIEERLKTYAHLFDDKVMKQLKRRRYTGWGRLSRKLINGIRDKQSGKTILDFLKSDGFANRNFMQLIHDDSLTFKEDIQKAQVSGQGDSLHEHIANLAGSPAIKKGILQTVKVVDELVKVMGRHKPENIVIEMARENQTTQKGQKNSRERMKRIEEGIKELGSQILKEHPVENTQLQNEKLYLYYLQNGRDMYVDQELDINRLSDYDVDHIVPQSFLKDDSIDNKVLTRSDKARGKSDNVPSEEVVKKMKNYWRQLLNAKLITQRKFDNLTKAERGGLSELDKAGFIKRQLVETRQITKHVAQILDSRMNTKYDENDKLIREVKVITLKSKLVSDFRKDFQFYKVREINNYHHAHDAYLNAVVGTALIKKYPKLESEFVYGDYKVYDVRKMIAKSEQEIGKATAKYFFYSNIMNFFKTEITLANGEIRKRPLIETNGETGEIVWDKGRDFATVRKVLSMPQVNIVKKTEVQTGGFSKESILPKRNSDKLIARKKDWDPKKYGGFDSPTVAYSVLVVAKVEKGKSKKLKSVKELLGITIMERSSFEKNPIDFLEAKGYKEVKKDLIIKLPKYSLFELENGRKRMLASAGELQKGNELALPSKYVNFLYLASHYEKLKGSPEDNEQKQLFVEQHKHYLDEIIEQISEFSKRVILADANLDKVLSAYNKHRDKPIREQAENIIHLFTLTNLGAPAAFKYFDTTIDRKRYTSTKEVLDATLIHQSITGLYETRIDLSQLGGDGGGGSEAAAKGGTLNIEDEHRLHETSKEPDVSLGSTWLSDFPQAWAETGGMGLAVRQAPLIIPLKATSTPVSIKQYPMSQEARLGIKPHIQRLLDQGILVPCQSPWNTPLLPVKKPGTNDYRPVQDLREVNKRVEDIHPTVPNPYNLLSGLPPSHQWYTVLDLKDAFFCLRLHPTSQPLFAFEWRDPEMGISGQLTWTRLPQGFKNSPTLFDEALHRDLADFRIQHPDLILLQYVDDLLLAATSELDCQQGTRALLQTLGNLGYRASAKKAQICQKQVKYLGYLLKEGQRWLTEARKETVMGQPTPKTPRQLREFLGTAGFCRLWIPGFAEMAAPLYPLTKTGTLFNWGPDQQKAYQEIKQALLTAPALGLPDLTKPFELFVDEKQGYAKGVLTQKLGPWRRPVAYLSKKLDPVAAGWPPCLRMVAAIAVLTKDAGKLTMGQPLVILAPHAVEALVKQPPDRWLSNARMTHYQALLLDTDRVQFGPVVALNPATLLPLPEEGLQHNCLDILAEAHGTRPDLTDQPLPDADHTWYTDGSSLLQEGQRKAGAAVTTETEVIWAKALPAGTSAQRAELIALTQALKMAEGKKLNVYTDSRYAFATAHIHGEIYRRRGLLTSEGKEIKNKDEILALLKALFLPKRLSIIHCPGHQKGHSAEARGNRMADQAARKAAITETPDTSTLLAGKRTADGSEFEKRTADGSEFESPKKKAKVE

SEQ ID NO: 2963 - protein, 2088 aa, synthetic construct
MPAAKRVKLDGGDKKYSIGLDIGTNSVGWAVITDEYKVPSKKFKVLGNTDRHSIKKNLIGALLFDSGETAEATRLKRTARRRYTRRKNRICYLQEIFSNEMAKVDDSFFHRLEESFLVEEDKKHERHPIFGNIVDEVAYHEKYPTIYHLRKKLVDSTDKADLRLIYLALAHMIKFRGHFLIEGDLNPDNSDVDKLFIQLVQTYNQLFEENPINASGVDAKAILSARLSKSRRLENLIAQLPGEKKNGLFGNLIALSLGLTPNFKSNFDLAEDAKLQLSKDTYDDDLDNLLAQIGDQYADLFLAAKNLSDAILLSDILRVNTEITKAPLSASMIKRYDEHHQDLTLLKALVRQQLPEKYKEIFFDQSKNGYAGYIDGGASQEEFYKFIKPILEKMDGTEELLVKLNREDLLRKQRTFDNGSIPHQIHLGELHAILRRQEDFYPFLKDNREKIEKILTFRIPYYVGPLARGNSRFAWMTRKSEETITPWNFEEVVDKGASAQSFIERMTNFDKNLPNEKVLPKHSLLYEYFTVYNELTKVKYVTEGMRKPAFLSGEQKKAIVDLLFKTNRKVTVKQLKEDYFKKIECFDSVEISGVEDRFNASLGTYHDLLKIIKDKDFLDNEENEDILEDIVLTLTLFEDREMIEERLKTYAHLFDDKVMKQLKRRRYTGWGRLSRKLINGIRDKQSGKTILDFLKSDGFANRNFMQLIHDDSLTFKEDIQKAQVSGQGDSLHEHIANLAGSPAIKKGILQTVKVVDELVKVMGRHKPENIVIEMARENQTTQKGQKNSRERMKRIEEGIKELGSQILKEHPVENTQLQNEKLYLYYLQNGRDMYVDQELDINRLSDYDVDHIVPQSFLKDDSIDNKVLTRSDKARGKSDNVPSEEVVKKMKNYWRQLLNAKLITQRKFDNLTKAERGGLSELDKAGFIKRQLVETRQITKHVAQILDSRMNTKYDENDKLIREVKVITLKSKLVSDFRKDFQFYKVREINNYHHAHDAYLNAVVGTALIKKYPKLESEFVYGDYKVYDVRKMIAKSEQEIGKATAKYFFYSNIMNFFKTEITLANGEIRKRPLIETNGETGEIVWDKGRDFATVRKVLSMPQVNIVKKTEVQTGGFSKESILPKRNSDKLIARKKDWDPKKYGGFDSPTVAYSVLVVAKVEKGKSKKLKSVKELLGITIMERSSFEKNPIDFLEAKGYKEVKKDLIIKLPKYSLFELENGRKRMLASAGELQKGNELALPSKYVNFLYLASHYEKLKGSPEDNEQKQLFVEQHKHYLDEIIEQISEFSKRVILADANLDKVLSAYNKHRDKPIREQAENIIHLFTLTNLGAPAAFKYFDTTIDRKRYTSTKEVLDATLIHQSITGLYETRIDLSQLGGDGGGSSGGTLNIEDEHRLHETSKEPDVSLGSTWLSDFPQAWAETGGMGLAVRQAPLIIPLKATSTPVSIKQYPMSQEARLGIKPHIQRLLDQGILVPCQSPWNTPLLPVKKPGTNDYRPVQDLREVNKRVEDIHPTVPNPYNLLSGLPPSHQWYTVLDLKDAFFCLRLHPTSQPLFAFEWRDPEMGISGQLTWTRLPQGFKNSPTLFDEALHRDLADFRIQHPDLILLQYVDDLLLAATSELDCQQGTRALLQTLGNLGYRASAKKAQICQKQVKYLGYLLKEGQRWLTEARKETVMGQPTPKTPRQLREFLGTAGFCRLWIPGFAEMAAPLYPLTKTGTLFNWGPDQQKAYQEIKQALLTAPALGLPDLTKPFELFVDEKQGYAKGVLTQKLGPWRRPVAYLSKKLDPVAAGWPPCLRMVAAIAVLTKDAGKLTMGQPLVILAPHAVEALVKQPPDRWLSNARMTHYQALLLDTDRVQFGPVVALNPATLLPLPEEGLQHNCLDILAEAHGTRPDLTDQPLPDADHTWYTDGSSLLQEGQRKAGAAVTTETEVIWAKALPAGTSAQRAELIALTQALKMAEGKKLNVYTDSRYAFATAHIHGEIYRRRGLLTSEGKEIKNKDEILALLKALFLPKRLSIIHCPGHQKGHSAEARGNRMADQAARKAAITETPDTSTLLAGKRTADGSEFEKRTADGSEFESPKKKAKVE

SEQ ID NO: 2964 - protein, 2094 aa, synthetic construct
MPAAKRVKLDGGDKKYSIGLDIGTNSVGWAVITDEYKVPSKKFKVLGNTDRHSIKKNLIGALLFDSGETAEATRLKRTARRRYTRRKNRICYLQEIFSNEMAKVDDSFFHRLEESFLVEEDKKHERHPIFGNIVDEVAYHEKYPTIYHLRKKLVDSTDKADLRLIYLALAHMIKFRGHFLIEGDLNPDNSDVDKLFIQLVQTYNQLFEENPINASGVDAKAILSARLSKSRRLENLIAQLPGEKKNGLFGNLIALSLGLTPNFKSNFDLAEDAKLQLSKDTYDDDLDNLLAQIGDQYADLFLAAKNLSDAILLSDILRVNTEITKAPLSASMIKRYDEHHQDLTLLKALVRQQLPEKYKEIFFDQSKNGYAGYIDGGASQEEFYKFIKPILEKMDGTEELLVKLNREDLLRKQRTFDNGSIPHQIHLGELHAILRRQEDFYPFLKDNREKIEKILTFRIPYYVGPLARGNSRFAWMTRKSEETITPWNFEEVVDKGASAQSFIERMTNFDKNLPNEKVLPKHSLLYEYFTVYNELTKVKYVTEGMRKPAFLSGEQKKAIVDLLFKTNRKVTVKQLKEDYFKKIECFDSVEISGVEDRFNASLGTYHDLLKIIKDKDFLDNEENEDILEDIVLTLTLFEDREMIEERLKTYAHLFDDKVMKQLKRRRYTGWGRLSRKLINGIRDKQSGKTILDFLKSDGFANRNFMQLIHDDSLTFKEDIQKAQVSGQGDSLHEHIANLAGSPAIKKGILQTVKVVDELVKVMGRHKPENIVIEMARENQTTQKGQKNSRERMKRIEEGIKELGSQILKEHPVENTQLQNEKLYLYYLQNGRDMYVDQELDINRLSDYDVDHIVPQSFLKDDSIDNKVLTRSDKARGKSDNVPSEEVVKKMKNYWRQLLNAKLITQRKFDNLTKAERGGLSELDKAGFIKRQLVETRQITKHVAQILDSRMNTKYDENDKLIREVKVITLKSKLVSDFRKDFQFYKVREINNYHHAHDAYLNAVVGTALIKKYPKLESEFVYGDYKVYDVRKMIAKSEQEIGKATAKYFFYSNIMNFFKTEITLANGEIRKRPLIETNGETGEIVWDKGRDFATVRKVLSMPQVNIVKKTEVQTGGFSKESILPKRNSDKLIARKKDWDPKKYGGFDSPTVAYSVLVVAKVEKGKSKKLKSVKELLGITIMERSSFEKNPIDFLEAKGYKEVKKDLIIKLPKYSLFELENGRKRMLASAGELQKGNELALPSKYVNFLYLASHYEKLKGSPEDNEQKQLFVEQHKHYLDEIIEQISEFSKRVILADANLDKVLSAYNKHRDKPIREQAENIIHLFTLTNLGAPAAFKYFDTTIDRKRYTSTKEVLDATLIHQSITGLYETRIDLSQLGGDGGGGSGSSPAPGGTLNIEDEHRLHETSKEPDVSLGSTWLSDFPQAWAETGGMGLAVRQAPLIIPLKATSTPVSIKQYPMSQEARLGIKPHIQRLLDQGILVPCQSPWNTPLLPVKKPGTNDYRPVQDLREVNKRVEDIHPTVPNPYNLLSGLPPSHQWYTVLDLKDAFFCLRLHPTSQPLFAFEWRDPEMGISGQLTWTRLPQGFKNSPTLFDEALHRDLADFRIQHPDLILLQYVDDLLLAATSELDCQQGTRALLQTLGNLGYRASAKKAQICQKQVKYLGYLLKEGQRWLTEARKETVMGQPTPKTPRQLREFLGTAGFCRLWIPGFAEMAAPLYPLTKTGTLFNWGPDQQKAYQEIKQALLTAPALGLPDLTKPFELFVDEKQGYAKGVLTQKLGPWRRPVAYLSKKLDPVAAGWPPCLRMVAAIAVLTKDAGKLTMGQPLVILAPHAVEALVKQPPDRWLSNARMTHYQALLLDTDRVQFGPVVALNPATLLPLPEEGLQHNCLDILAEAHGTRPDLTDQPLPDADHTWYTDGSSLLQEGQRKAGAAVTTETEVIWAKALPAGTSAQRAELIALTQALKMAEGKKLNVYTDSRYAFATAHIHGEIYRRRGLLTSEGKEIKNKDEILALLKALFLPKRLSIIHCPGHQKGHSAEARGNRMADQAARKAAITETPDTSTLLAGKRTADGSEFEKRTADGSEFESPKKKAKVE

SEQ ID NO: 2965 - protein, 2103 aa, synthetic construct
MPAAKRVKLDGGDKKYSIGLDIGTNSVGWAVITDEYKVPSKKFKVLGNTDRHSIKKNLIGALLFDSGETAEATRLKRTARRRYTRRKNRICYLQEIFSNEMAKVDDSFFHRLEESFLVEEDKKHERHPIFGNIVDEVAYHEKYPTIYHLRKKLVDSTDKADLRLIYLALAHMIKFRGHFLIEGDLNPDNSDVDKLFIQLVQTYNQLFEENPINASGVDAKAILSARLSKSRRLENLIAQLPGEKKNGLFGNLIALSLGLTPNFKSNFDLAEDAKLQLSKDTYDDDLDNLLAQIGDQYADLFLAAKNLSDAILLSDILRVNTEITKAPLSASMIKRYDEHHQDLTLLKALVRQQLPEKYKEIFFDQSKNGYAGYIDGGASQEEFYKFIKPILEKMDGTEELLVKLNREDLLRKQRTFDNGSIPHQIHLGELHAILRRQEDFYPFLKDNREKIEKILTFRIPYYVGPLARGNSRFAWMTRKSEETITPWNFEEVVDKGASAQSFIERMTNFDKNLPNEKVLPKHSLLYEYFTVYNELTKVKYVTEGMRKPAFLSGEQKKAIVDLLFKTNRKVTVKQLKEDYFKKIECFDSVEISGVEDRFNASLGTYHDLLKIIKDKDFLDNEENEDILEDIVLTLTLFEDREMIEERLKTYAHLFDDKVMKQLKRRRYTGWGRLSRKLINGIRDKQSGKTILDFLKSDGFANRNFMQLIHDDSLTFKEDIQKAQVSGQGDSLHEHIANLAGSPAIKKGILQTVKVVDELVKVMGRHKPENIVIEMARENQTTQKGQKNSRERMKRIEEGIKELGSQILKEHPVENTQLQNEKLYLYYLQNGRDMYVDQELDINRLSDYDVDHIVPQSFLKDDSIDNKVLTRSDKARGKSDNVPSEEVVKKMKNYWRQLLNAKLITQRKFDNLTKAERGGLSELDKAGFIKRQLVETRQITKHVAQILDSRMNTKYDENDKLIREVKVITLKSKLVSDFRKDFQFYKVREINNYHHAHDAYLNAVVGTALIKKYPKLESEFVYGDYKVYDVRKMIAKSEQEIGKATAKYFFYSNIMNFFKTEITLANGEIRKRPLIETNGETGEIVWDKGRDFATVRKVLSMPQVNIVKKTEVQTGGFSKESILPKRNSDKLIARKKDWDPKKYGGFDSPTVAYSVLVVAKVEKGKSKKLKSVKELLGITIMERSSFEKNPIDFLEAKGYKEVKKDLIIKLPKYSLFELENGRKRMLASAGELQKGNELALPSKYVNFLYLASHYEKLKGSPEDNEQKQLFVEQHKHYLDEIIEQISEFSKRVILADANLDKVLSAYNKHRDKPIREQAENIIHLFTLTNLGAPAAFKYFDTTIDRKRYTSTKEVLDATLIHQSITGLYETRIDLSQLGGDGGGSSGSSGSSGSSGSSGSSGGTLNIEDEHRLHETSKEPDVSLGSTWLSDFPQAWAETGGMGLAVRQAPLIIPLKATSTPVSIKQYPMSQEARLGIKPHIQRLLDQGILVPCQSPWNTPLLPVKKPGTNDYRPVQDLREVNKRVEDIHPTVPNPYNLLSGLPPSHQWYTVLDLKDAFFCLRLHPTSQPLFAFEWRDPEMGISGQLTWTRLPQGFKNSPTLFNEALHRDLADFRIQHPDLILLQYVDDLLLAATSELDCQQGTRALLQTLGNLGYRASAKKAQICQKQVKYLGYLLKEGQRWLTEARKETVMGQPTPKTPRQLREFLGTAGFCRLWIPGFAEMAAPLYPLTKPGTLFNWGPDQQKAYQEIKQALLTAPALGLPDLTKPFELFVDEKQGYAKGVLTQKLGPWRRPVAYLSKKLDPVAAGWPPCLRMVAAIAVLTKDAGKLTMGQPLVILAPHAVEALVKQPPDRWLSNARMTHYQALLLDTDRVQFGPVVALNPATLLPLPEEGLQHNCLDILAEAHGTRPDLTDQPLPDADHTWYTDGSSLLQEGQRKAGAAVTTETEVIWAKALPAGTSAQRAELIALTQALKMAEGKKLNVYTDSRYAFATAHIHGEIYRRRGWLTSEGKEIKNKDEILALLKALFLPKRLSIIHCPGHQKGHSAEARGNRMADQAARKAAITETPDTSTLLAGKRTADGSEFEKRTADGSEFESPKKKAKVE

SEQ ID NO: 2966 - protein, 2096 aa, synthetic construct; identical to SEQ ID NO: 2713

SEQ ID NO: 2967 - protein, 2091 aa, synthetic construct
MPAAKRVKLDGGDKKYSIGLDIGTNSVGWAVITDEYKVPSKKFKVLGNTDRHSIKKNLIGALLFDSGETAEATRLKRTARRRYTRRKNRICYLQEIFSNEMAKVDDSFFHRLEESFLVEEDKKHERHPIFGNIVDEVAYHEKYPTIYHLRKKLVDSTDKADLRLIYLALAHMIKFRGHFLIEGDLNPDNSDVDKLFIQLVQTYNQLFEENPINASGVDAKAILSARLSKSRRLENLIAQLPGEKKNGLFGNLIALSLGLTPNFKSNFDLAEDAKLQLSKDTYDDDLDNLLAQIGDQYADLFLAAKNLSDAILLSDILRVNTEITKAPLSASMIKRYDEHHQDLTLLKALVRQQLPEKYKEIFFDQSKNGYAGYIDGGASQEEFYKFIKPILEKMDGTEELLVKLNREDLLRKQRTFDNGSIPHQIHLGELHAILRRQEDFYPFLKDNREKIEKILTFRIPYYVGPLARGNSRFAWMTRKSEETITPWNFEEVVDKGASAQSFIERMTNFDKNLPNEKVLPKHSLLYEYFTVYNELTKVKYVTEGMRKPAFLSGEQKKAIVDLLFKTNRKVTVKQLKEDYFKKIECFDSVEISGVEDRFNASLGTYHDLLKIIKDKDFLDNEENEDILEDIVLTLTLFEDREMIEERLKTYAHLFDDKVMKQLKRRRYTGWGRLSRKLINGIRDKQSGKTILDFLKSDGFANRNFMQLIHDDSLTFKEDIQKAQVSGQGDSLHEHIANLAGSPAIKKGILQTVKVVDELVKVMGRHKPENIVIEMARENQTTQKGQKNSRERMKRIEEGIKELGSQILKEHPVENTQLQNEKLYLYYLQNGRDMYVDQELDINRLSDYDVDHIVPQSFLKDDSIDNKVLTRSDKARGKSDNVPSEEVVKKMKNYWRQLLNAKLITQRKFDNLTKAERGGLSELDKAGFIKRQLVETRQITKHVAQILDSRMNTKYDENDKLIREVKVITLKSKLVSDFRKDFQFYKVREINNYHHAHDAYLNAVVGTALIKKYPKLESEFVYGDYKVYDVRKMIAKSEQEIGKATAKYFFYSNIMNFFKTEITLANGEIRKRPLIETNGETGEIVWDKGRDFATVRKVLSMPQVNIVKKTEVQTGGFSKESILPKRNSDKLIARKKDWDPKKYGGFDSPTVAYSVLVVAKVEKGKSKKLKSVKELLGITIMERSSFEKNPIDFLEAKGYKEVKKDLIIKLPKYSLFELENGRKRMLASAGELQKGNELALPSKYVNFLYLASHYEKLKGSPEDNEQKQLFVEQHKHYLDEIIEQISEFSKRVILADANLDKVLSAYNKHRDKPIREQAENIIHLFTLTNLGAPAAFKYFDTTIDRKRYTSTKEVLDATLIHQSITGLYETRIDLSQLGGDGGGSSGGGGGTLNIEDEHRLHETSKEPDVSLGSTWLSDFPQAWAETGGMGLAVRQAPLIIPLKATSTPVSIKQYPMSQEARLGIKPHIQRLLDQGILVPCQSPWNTPLLPVKKPGTNDYRPVQDLREVNKRVEDIHPTVPNPYNLLSGLPPSHQWYTVLDLKDAFFCLRLHPTSQPLFAFEWRDPEMGISGQLTWTRLPQGFKNSPTLFNEALHRDLADFRIQHPDLILLQYVDDLLLAATSELDCQQGTRALLQTLGNLGYRASAKKAQICQKQVKYLGYLLKEGQRWLTEARKETVMGQPTPKTPRQLREFLGTAGFCRLWIPGFAEMAAPLYPLTKPGTLFNWGPDQQKAYQEIKQALLTAPALGLPDLTKPFELFVDEKQGYAKGVLTQKLGPWRRPVAYLSKKLDPVAAGWPPCLRMVAAIAVLTKDAGKLTMGQPLVILAPHAVEALVKQPPDRWLSNARMTHYQALLLDTDRVQFGPVVALNPATLLPLPEEGLQHNCLDILAEAHGTRPDLTDQPLPDADHTWYTDGSSLLQEGQRKAGAAVTTETEVIWAKALPAGTSAQRAELIALTQALKMAEGKKLNVYTDSRYAFATAHIHGEIYRRRGWLTSEGKEIKNKDEILALLKALFLPKRLSIIHCPGHQKGHSAEARGNRMADQAARKAAITETPDTSTLLAGKRTADGSEFEKRTADGSEFESPKKKAKVE

SEQ ID NO: 2968 - protein, 2105 aa, synthetic construct; identical to SEQ ID NO: 2771

SEQ ID NO: 2969 - protein, 2096 aa, synthetic construct; identical to SEQ ID NO: 2753

SEQ ID NO: 2970 - protein, 2096 aa, synthetic construct
MPAAKRVKLDGGDKKYSIGLDIGTNSVGWAVITDEYKVPSKKFKVLGNTDRHSIKKNLIGALLFDSGETAEATRLKRTARRRYTRRKNRICYLQEIFSNEMAKVDDSFFHRLEESFLVEEDKKHERHPIFGNIVDEVAYHEKYPTIYHLRKKLVDSTDKADLRLIYLALAHMIKFRGHFLIEGDLNPDNSDVDKLFIQLVQTYNQLFEENPINASGVDAKAILSARLSKSRRLENLIAQLPGEKKNGLFGNLIALSLGLTPNFKSNFDLAEDAKLQLSKDTYDDDLDNLLAQIGDQYADLFLAAKNLSDAILLSDILRVNTEITKAPLSASMIKRYDEHHQDLTLLKALVRQQLPEKYKEIFFDQSKNGYAGYIDGGASQEEFYKFIKPILEKMDGTEELLVKLNREDLLRKQRTFDNGSIPHQIHLGELHAILRRQEDFYPFLKDNREKIEKILTFRIPYYVGPLARGNSRFAWMTRKSEETITPWNFEEVVDKGASAQSFIERMTNFDKNLPNEKVLPKHSLLYEYFTVYNELTKVKYVTEGMRKPAFLSGEQKKAIVDLLFKTNRKVTVKQLKEDYFKKIECFDSVEISGVEDRFNASLGTYHDLLKIIKDKDFLDNEENEDILEDIVLTLTLFEDREMIEERLKTYAHLFDDKVMKQLKRRRYTGWGRLSRKLINGIRDKQSGKTILDFLKSDGFANRNFMQLIHDDSLTFKEDIQKAQVSGQGDSLHEHIANLAGSPAIKKGILQTVKVVDELVKVMGRHKPENIVIEMARENQTTQKGQKNSRERMKRIEEGIKELGSQILKEHPVENTQLQNEKLYLYYLQNGRDMYVDQELDINRLSDYDVDHIVPQSFLKDDSIDNKVLTRSDKARGKSDNVPSEEVVKKMKNYWRQLLNAKLITQRKFDNLTKAERGGLSELDKAGFIKRQLVETRQITKHVAQILDSRMNTKYDENDKLIREVKVITLKSKLVSDFRKDFQFYKVREINNYHHAHDAYLNAVVGTALIKKYPKLESEFVYGDYKVYDVRKMIAKSEQEIGKATAKYFFYSNIMNFFKTEITLANGEIRKRPLIETNGETGEIVWDKGRDFATVRKVLSMPQVNIVKKTEVQTGGFSKESILPKRNSDKLIARKKDWDPKKYGGFDSPTVAYSVLVVAKVEKGKSKKLKSVKELLGITIMERSSFEKNPIDFLEAKGYKEVKKDLIIKLPKYSLFELENGRKRMLASAGELQKGNELALPSKYVNFLYLASHYEKLKGSPEDNEQKQLFVEQHKHYLDEIIEQISEFSKRVILADANLDKVLSAYNKHRDKPIREQAENIIHLFTLTNLGAPAAFKYFDTTIDRKRYTSTKEVLDATLIHQSITGLYETRIDLSQLGGDGGPAPAPAPAPAPGGTLNIEDEHRLHETSKEPDVSLGSTWLSDFPQAWAETGGMGLAVRQAPLIIPLKATSTPVSIKQYPMSQEARLGIKPHIQRLLDQGILVPCQSPWNTPLLPVKKPGTNDYRPVQDLREVNKRVEDIHPTVPNPYNLLSGLPPSHQWYTVLDLKDAFFCLRLHPTSQPLFAFEWRDPEMGISGQLTWTRLPQGFKNSPTLFNEALHRDLADFRIQHPDLILLQYVDDLLLAATSELDCQQGTRALLQTLGNLGYRASAKKAQICQKQVKYLGYLLKEGQRWLTEARKETVMGQPTPKTPRQLREFLGTAGFCRLWIPGFAEMAAPLYPLTKPGTLFNWGPDQQKAYQEIKQALLTAPALGLPDLTKPFELFVDEKQGYAKGVLTQKLGPWRRPVAYLSKKLDPVAAGWPPCLRMVAAIAVLTKDAGKLTMGQPLVILAPHAVEALVKQPPDRWLSNARMTHYQALLLDTDRVQFGPVVALNPATLLPLPEEGLQHNCLDILAEAHGTRPDLTDQPLPDADHTWYTDGSSLLQEGQRKAGAAVTTETEVIWAKALPAGTSAQRAELIALTQALKMAEGKKLNVYTDSRYAFATAHIHGEIYRRRGWLTSEGKEIKNKDEILALLKALFLPKRLSIIHCPGHQKGHSAEARGNRMADQAARKAAITETPDTSTLLAGKRTADGSEFEKRTADGSEFESPKKKAKVE

SEQ ID NO: 2971 - protein, 2093 aa, synthetic construct; identical to SEQ ID NO: 2724

SEQ ID NO: 2972 - protein, 2131 aa, synthetic construct; identical to SEQ ID NO: 2711

SEQ ID NO: 2973 - protein, 2088 aa, synthetic construct
MPAAKRVKLDGGDKKYSIGLDIGTNSVGWAVITDEYKVPSKKFKVLGNTDRHSIKKNLIGALLFDSGETAEATRLKRTARRRYTRRKNRICYLQEIFSNEMAKVDDSFFHRLEESFLVEEDKKHERHPIFGNIVDEVAYHEKYPTIYHLRKKLVDSTDKADLRLIYLALAHMIKFRGHFLIEGDLNPDNSDVDKLFIQLVQTYNQLFEENPINASGVDAKAILSARLSKSRRLENLIAQLPGEKKNGLFGNLIALSLGLTPNFKSNFDLAEDAKLQLSKDTYDDDLDNLLAQIGDQYADLFLAAKNLSDAILLSDILRVNTEITKAPLSASMIKRYDEHHQDLTLLKALVRQQLPEKYKEIFFDQSKNGYAGYIDGGASQEEFYKFIKPILEKMDGTEELLVKLNREDLLRKQRTFDNGSIPHQIHLGELHAILRRQEDFYPFLKDNREKIEKILTFRIPYYVGPLARGNSRFAWMTRKSEETITPWNFEEVVDKGASAQSFIERMTNFDKNLPNEKVLPKHSLLYEYFTVYNELTKVKYVTEGMRKPAFLSGEQKKAIVDLLFKTNRKVTVKQLKEDYFKKIECFDSVEISGVEDRFNASLGTYHDLLKIIKDKDFLDNEENEDILEDIVLTLTLFEDREMIEERLKTYAHLFDDKVMKQLKRRRYTGWGRLSRKLINGIRDKQSGKTILDFLKSDGFANRNFMQLIHDDSLTFKEDIQKAQVSGQGDSLHEHIANLAGSPAIKKGILQTVKVVDELVKVMGRHKPENIVIEMARENQTTQKGQKNSRERMKRIEEGIKELGSQILKEHPVENTQLQNEKLYLYYLQNGRDMYVDQELDINRLSDYDVDHIVPQSFLKDDSIDNKVLTRSDKARGKSDNVPSEEVVKKMKNYWRQLLNAKLITQRKFDNLTKAERGGLSELDKAGFIKRQLVETRQITKHVAQILDSRMNTKYDENDKLIREVKVITLKSKLVSDFRKDFQFYKVREINNYHHAHDAYLNAVVGTALIKKYPKLESEFVYGDYKVYDVRKMIAKSEQEIGKATAKYFFYSNIMNFFKTEITLANGEIRKRPLIETNGETGEIVWDKGRDFATVRKVLSMPQVNIVKKTEVQTGGFSKESILPKRNSDKLIARKKDWDPKKYGGFDSPTVAYSVLVVAKVEKGKSKKLKSVKELLGITIMERSSFEKNPIDFLEAKGYKEVKKDLIIKLPKYSLFELENGRKRMLASAGELQKGNELALPSKYVNFLYLASHYEKLKGSPEDNEQKQLFVEQHKHYLDEIIEQISEFSKRVILADANLDKVLSAYNKHRDKPIREQAENIIHLFTLTNLGAPAAFKYFDTTIDRKRYTSTKEVLDATLIHQSITGLYETRIDLSQLGGDGGPAPGGTLNIEDEHRLHETSKEPDVSLGSTWLSDFPQAWAETGGMGLAVRQAPLIIPLKATSTPVSIKQYPMSQEARLGIKPHIQRLLDQGILVPCQSPWNTPLLPVKKPGTNDYRPVQDLREVNKRVEDIHPTVPNPYNLLSGLPPSHQWYTVLDLKDAFFCLRLHPTSQPLFAFEWRDPEMGISGQLTWTRLPQGFKNSPTLFNEALHRDLADFRIQHPDLILLQYVDDLLLAATSELDCQQGTRALLQTLGNLGYRASAKKAQICQKQVKYLGYLLKEGQRWLTEARKETVMGQPTPKTPRQLREFLGTAGFCRLWIPGFAEMAAPLYPLTKPGTLFNWGPDQQKAYQEIKQALLTAPALGLPDLTKPFELFVDEKQGYAKGVLTQKLGPWRRPVAYLSKKLDPVAAGWPPCLRMVAAIAVLTKDAGKLTMGQPLVILAPHAVEALVKQPPDRWLSNARMTHYQALLLDTDRVQFGPVVALNPATLLPLPEEGLQHNCLDILAEAHGTRPDLTDQPLPDADHTWYTDGSSLLQEGQRKAGAAVTTETEVIWAKALPAGTSAQRAELIALTQALKMAEGKKLNVYTDSRYAFATAHIHGEIYRRRGWLTSEGKEIKNKDEILALLKALFLPKRLSIIHCPGHQKGHSAEARGNRMADQAARKAAITETPDTSTLLAGKRTADGSEFEKRTADGSEFESPKKKAKVE

SEQ ID NO: 2974 - protein, 2098 aa, synthetic construct
MPAAKRVKLDGGDKKYSIGLDIGTNSVGWAVITDEYKVPSKKFKVLGNTDRHSIKKNLIGALLFDSGETAEATRLKRTARRRYTRRKNRICYLQEIFSNEMAKVDDSFFHRLEESFLVEEDKKHERHPIFGNIVDEVAYHEKYPTIYHLRKKLVDSTDKADLRLIYLALAHMIKFRGHFLIEGDLNPDNSDVDKLFIQLVQTYNQLFEENPINASGVDAKAILSARLSKSRRLENLIAQLPGEKKNGLFGNLIALSLGLTPNFKSNFDLAEDAKLQLSKDTYDDDLDNLLAQIGDQYADLFLAAKNLSDAILLSDILRVNTEITKAPLSASMIKRYDEHHQDLTLLKALVRQQLPEKYKEIFFDQSKNGYAGYIDGGASQEEFYKFIKPILEKMDGTEELLVKLNREDLLRKQRTFDNGSIPHQIHLGELHAILRRQEDFYPFLKDNREKIEKILTFRIPYYVGPLARGNSRFAWMTRKSEETITPWNFEEVVDKGASAQSFIERMTNFDKNLPNEKVLPKHSLLYEYFTVYNELTKVKYVTEGMRKPAFLSGEQKKAIVDLLFKTNRKVTVKQLKEDYFKKIECFDSVEISGVEDRFNASLGTYHDLLKIIKDKDFLDNEENEDILEDIVLTLTLFEDREMIEERLKTYAHLFDDKVMKQLKRRRYTGWGRLSRKLINGIRDKQSGKTILDFLKSDGFANRNFMQLIHDDSLTFKEDIQKAQVSGQGDSLHEHIANLAGSPAIKKGILQTVKVVDELVKVMGRHKPENIVIEMARENQTTQKGQKNSRERMKRIEEGIKELGSQILKEHPVENTQLQNEKLYLYYLQNGRDMYVDQELDINRLSDYDVDHIVPQSFLKDDSIDNKVLTRSDKARGKSDNVPSEEVVKKMKNYWRQLLNAKLITQRKFDNLTKAERGGLSELDKAGFIKRQLVETRQITKHVAQILDSRMNTKYDENDKLIREVKVITLKSKLVSDFRKDFQFYKVREINNYHHAHDAYLNAVVGTALIKKYPKLESEFVYGDYKVYDVRKMIAKSEQEIGKATAKYFFYSNIMNFFKTEITLANGEIRKRPLIETNGETGEIVWDKGRDFATVRKVLSMPQVNIVKKTEVQTGGFSKESILPKRNSDKLIARKKDWDPKKYGGFDSPTVAYSVLVVAKVEKGKSKKLKSVKELLGITIMERSSFEKNPIDFLEAKGYKEVKKDLIIKLPKYSLFELENGRKRMLASAGELQKGNELALPSKYVNFLYLASHYEKLKGSPEDNEQKQLFVEQHKHYLDEIIEQISEFSKRVILADANLDKVLSAYNKHRDKPIREQAENIIHLFTLTNLGAPAAFKYFDTTIDRKRYTSTKEVLDATLIHQSITGLYETRIDLSQLGGDGGPAPAPAPAPAPAPGGTLNIEDEHRLHETSKEPDVSLGSTWLSDFPQAWAETGGMGLAVRQAPLIIPLKATSTPVSIKQYPMSQEARLGIKPHIQRLLDQGILVPCQSPWNTPLLPVKKPGTNDYRPVQDLREVNKRVEDIHPTVPNPYNLLSGLPPSHQWYTVLDLKDAFFCLRLHPTSQPLFAFEWRDPEMGISGQLTWTRLPQGFKNSPTLFNEALHRDLADFRIQHPDLILLQYVDDLLLAATSELDCQQGTRALLQTLGNLGYRASAKKAQICQKQVKYLGYLLKEGQRWLTEARKETVMGQPTPKTPRQLREFLGTAGFCRLWIPGFAEMAAPLYPLTKPGTLFNWGPDQQKAYQEIKQALLTAPALGLPDLTKPFELFVDEKQGYAKGVLTQKLGPWRRPVAYLSKKLDPVAAGWPPCLRMVAAIAVLTKDAGKLTMGQPLVILAPHAVEALVKQPPDRWLSNARMTHYQALLLDTDRVQFGPVVALNPATLLPLPEEGLQHNCLDILAEAHGTRPDLTDQPLPDADHTWYTDGSSLLQEGQRKAGAAVTTETEVIWAKALPAGTSAQRAELIALTQALKMAEGKKLNVYTDSRYAFATAHIHGEIYRRRGWLTSEGKEIKNKDEILALLKALFLPKRLSIIHCPGHQKGHSAEARGNRMADQAARKAAITETPDTSTLLAGKRTADGSEFEKRTADGSEFESPKKKAKVE

SEQ ID NO: 2975 - protein, 2091 aa, synthetic construct
MPAAKRVKLDGGDKKYSIGLDIGTNSVGWAVITDEYKVPSKKFKVLGNTDRHSIKKNLIGALLFDSGETAEATRLKRTARRRYTRRKNRICYLQEIFSNEMAKVDDSFFHRLEESFLVEEDKKHERHPIFGNIVDEVAYHEKYPTIYHLRKKLVDSTDKADLRLIYLALAHMIKFRGHFLIEGDLNPDNSDVDKLFIQLVQTYNQLFEENPINASGVDAKAILSARLSKSRRLENLIAQLPGEKKNGLFGNLIALSLGLTPNFKSNFDLAEDAKLQLSKDTYDDDLDNLLAQIGDQYADLFLAAKNLSDAILLSDILRVNTEITKAPLSASMIKRYDEHHQDLTLLKALVRQQLPEKYKEIFFDQSKNGYAGYIDGGASQEEFYKFIKPILEKMDGTEELLVKLNREDLLRKQRTFDNGSIPHQIHLGELHAILRRQEDFYPFLKDNREKIEKILTFRIPYYVGPLARGNSRFAWMTRKSEETITPWNFEEVVDKGASAQSFIERMTNFDKNLPNEKVLPKHSLLYEYFTVYNELTKVKYVTEGMRKPAFLSGEQKKAIVDLLFKTNRKVTVKQLKEDYFKKIECFDSVEISGVEDRFNASLGTYHDLLKIIKDKDFLDNEENEDILEDIVLTLTLFEDREMIEERLKTYAHLFDDKVMKQLKRRRYTGWGRLSRKLINGIRDKQSGKTILDFLKSDGFANRNFMQLIHDDSLTFKEDIQKAQVSGQGDSLHEHIANLAGSPAIKKGILQTVKVVDELVKVMGRHKPENIVIEMARENQTTQKGQKNSRERMKRIEEGIKELGSQILKEHPVENTQLQNEKLYLYYLQNGRDMYVDQELDINRLSDYDVDHIVPQSFLKDDSIDNKVLTRSDKARGKSDNVPSEEVVKKMKNYWRQLLNAKLITQRKFDNLTKAERGGLSELDKAGFIKRQLVETRQITKHVAQILDSRMNTKYDENDKLIREVKVITLKSKLVSDFRKDFQFYKVREINNYHHAHDAYLNAVVGTALIKKYPKLESEFVYGDYKVYDVRKMIAKSEQEIGKATAKYFFYSNIMNFFKTEITLANGEIRKRPLIETNGETGEIVWDKGRDFATVRKVLSMPQVNIVKKTEVQTGGFSKESILPKRNSDKLIARKKDWDPKKYGGFDSPTVAYSVLVVAKVEKGKSKKLKSVKELLGITIMERSSFEKNPIDFLEAKGYKEVKKDLIIKLPKYSLFELENGRKRMLASAGELQKGNELALPSKYVNFLYLASHYEKLKGSPEDNEQKQLFVEQHKHYLDEIIEQISEFSKRVILADANLDKVLSAYNKHRDKPIREQAENIIHLFTLTNLGAPAAFKYFDTTIDRKRYTSTKEVLDATLIHQSITGLYETRIDLSQLGGDGGGGGGGGGGTLNIEDEHRLHETSKEPDVSLGSTWLSDFPQAWAETGGMGLAVRQAPLIIPLKATSTPVSIKQYPMSQEARLGIKPHIQRLLDQGILVPCQSPWNTPLLPVKKPGTNDYRPVQDLREVNKRVEDIHPTVPNPYNLLSGLPPSHQWYTVLDLKDAFFCLRLHPTSQPLFAFEWRDPEMGISGQLTWTRLPQGFKNSPTLFNEALHRDLADFRIQHPDLILLQYVDDLLLAATSELDCQQGTRALLQTLGNLGYRASAKKAQICQKQVKYLGYLLKEGQRWLTEARKETVMGQPTPKTPRQLREFLGTAGFCRLWIPGFAEMAAPLYPLTKPGTLFNWGPDQQKAYQEIKQALLTAPALGLPDLTKPFELFVDEKQGYAKGVLTQKLGPWRRPVAYLSKKLDPVAAGWPPCLRMVAAIAVLTKDAGKLTMGQPLVILAPHAVEALVKQPPDRWLSNARMTHYQALLLDTDRVQFGPVVALNPATLLPLPEEGLQHNCLDILAEAHGTRPDLTDQPLPDADHTWYTDGSSLLQEGQRKAGAAVTTETEVIWAKALPAGTSAQRAELIALTQALKMAEGKKLNVYTDSRYAFATAHIHGEIYRRRGWLTSEGKEIKNKDEILALLKALFLPKRLSIIHCPGHQKGHSAEARGNRMADQAARKAAITETPDTSTLLAGKRTADGSEFEKRTADGSEFESPKKKAKVE

SEQ ID NO: 2976 - protein, 2096 aa, synthetic construct; identical to SEQ ID NO: 2723

SEQ ID NO: 2977 - protein, 2096 aa, synthetic construct; identical to SEQ ID NO: 2777

SEQ ID NO: 2978 - protein, 2093 aa, synthetic construct
MPAAKRVKLDGGDKKYSIGLDIGTNSVGWAVITDEYKVPSKKFKVLGNTDRHSIKKNLIGALLFDSGETAEATRLKRTARRRYTRRKNRICYLQEIFSNEMAKVDDSFFHRLEESFLVEEDKKHERHPIFGNIVDEVAYHEKYPTIYHLRKKLVDSTDKADLRLIYLALAHMIKFRGHFLIEGDLNPDNSDVDKLFIQLVQTYNQLFEENPINASGVDAKAILSARLSKSRRLENLIAQLPGEKKNGLFGNLIALSLGLTPNFKSNFDLAEDAKLQLSKDTYDDDLDNLLAQIGDQYADLFLAAKNLSDAILLSDILRVNTEITKAPLSASMIKRYDEHHQDLTLLKALVRQQLPEKYKEIFFDQSKNGYAGYIDGGASQEEFYKFIKPILEKMDGTEELLVKLNREDLLRKQRTFDNGSIPHQIHLGELHAILRRQEDFYPFLKDNREKIEKILTFRIPYYVGPLARGNSRFAWMTRKSEETITPWNFEEVVDKGASAQSFIERMTNFDKNLPNEKVLPKHSLLYEYFTVYNELTKVKYVTEGMRKPAFLSGEQKKAIVDLLFKTNRKVTVKQLKEDYFKKIECFDSVEISGVEDRFNASLGTYHDLLKIIKDKDFLDNEENEDILEDIVLTLTLFEDREMIEERLKTYAHLFDDKVMKQLKRRRYTGWGRLSRKLINGIRDKQSGKTILDFLKSDGFANRNFMQLIHDDSLTFKEDIQKAQVSGQGDSLHEHIANLAGSPAIKKGILQTVKVVDELVKVMGRHKPENIVIEMARENQTTQKGQKNSRERMKRIEEGIKELGSQILKEHPVENTQLQNEKLYLYYLQNGRDMYVDQELDINRLSDYDVDHIVPQSFLKDDSIDNKVLTRSDKARGKSDNVPSEEVVKKMKNYWRQLLNAKLITQRKFDNLTKAERGGLSELDKAGFIKRQLVETRQITKHVAQILDSRMNTKYDENDKLIREVKVITLKSKLVSDFRKDFQFYKVREINNYHHAHDAYLNAVVGTALIKKYPKLESEFVYGDYKVYDVRKMIAKSEQEIGKATAKYFFYSNIMNFFKTEITLANGEIRKRPLIETNGETGEIVWDKGRDFATVRKVLSMPQVNIVKKTEVQTGGFSKESILPKRNSDKLIARKKDWDPKKYGGFDSPTVAYSVLVVAKVEKGKSKKLKSVKELLGITIMERSSFEKNPIDFLEAKGYKEVKKDLIIKLPKYSLFELENGRKRMLASAGELQKGNELALPSKYVNFLYLASHYEKLKGSPEDNEQKQLFVEQHKHYLDEIIEQISEFSKRVILADANLDKVLSAYNKHRDKPIREQAENIIHLFTLTNLGAPAAFKYFDTTIDRKRYTSTKEVLDATLIHQSITGLYETRIDLSQLGGDGGEAAAKGGGGGTLNIEDEHRLHETSKEPDVSLGSTWLSDFPQAWAETGGMGLAVRQAPLIIPLKATSTPVSIKQYPMSQEARLGIKPHIQRLLDQGILVPCQSPWNTPLLPVKKPGTNDYRPVQDLREVNKRVEDIHPTVPNPYNLLSGLPPSHQWYTVLDLKDAFFCLRLHPTSQPLFAFEWRDPEMGISGQLTWTRLPQGFKNSPTLFNEALHRDLADFRIQHPDLILLQYVDDLLLAATSELDCQQGTRALLQTLGNLGYRASAKKAQICQKQVKYLGYLLKEGQRWLTEARKETVMGQPTPKTPRQLREFLGTAGFCRLWIPGFAEMAAPLYPLTKPGTLFNWGPDQQKAYQEIKQALLTAPALGLPDLTKPFELFVDEKQGYAKGVLTQKLGPWRRPVAYLSKKLDPVAAGWPPCLRMVAAIAVLTKDAGKLTMGQPLVILAPHAVEALVKQPPDRWLSNARMTHYQALLLDTDRVQFGPVVALNPATLLPLPEEGLQHNCLDILAEAHGTRPDLTDQPLPDADHTWYTDGSSLLQEGQRKAGAAVTTETEVIWAKALPAGTSAQRAELIALTQALKMAEGKKLNVYTDSRYAFATAHIHGEIYRRRGWLTSEGKEIKNKDEILALLKALFLPKRLSIIHCPGHQKGHSAEARGNRMADQAARKAAITETPDTSTLLAGKRTADGSEFEKRTADGSEFESPKKKAKVE

SEQ ID NO: 2979 - protein, 2094 aa, synthetic construct
MPAAKRVKLDGGDKKYSIGLDIGTNSVGWAVITDEYKVPSKKFKVLGNTDRHSIKKNLIGALLFDSGETAEATRLKRTARRRYTRRKNRICYLQEIFSNEMAKVDDSFFHRLEESFLVEEDKKHERHPIFGNIVDEVAYHEKYPTIYHLRKKLVDSTDKADLRLIYLALAHMIKFRGHFLIEGDLNPDNSDVDKLFIQLVQTYNQLFEENPINASGVDAKAILSARLSKSRRLENLIAQLPGEKKNGLFGNLIALSLGLTPNFKSNFDLAEDAKLQLSKDTYDDDLDNLLAQIGDQYADLFLAAKNLSDAILLSDILRVNTEITKAPLSASMIKRYDEHHQDLTLLKALVRQQLPEKYKEIFFDQSKNGYAGYIDGGASQEEFYKFIKPILEKMDGTEELLVKLNREDLLRKQRTFDNGSIPHQIHLGELHAILRRQEDFYPFLKDNREKIEKILTFRIPYYVGPLARGNSRFAWMTRKSEETITPWNFEEVVDKGASAQSFIERMTNFDKNLPNEKVLPKHSLLYEYFTVYNELTKVKYVTEGMRKPAFLSGEQKKAIVDLLFKTNRKVTVKQLKEDYFKKIECFDSVEISGVEDRFNASLGTYHDLLKIIKDKDFLDNEENEDILEDIVLTLTLFEDREMIEERLKTYAHLFDDKVMKQLKRRRYTGWGRLSRKLINGIRDKQSGKTILDFLKSDGFANRNFMQLIHDDSLTFKEDIQKAQVSGQGDSLHEHIANLAGSPAIKKGILQTVKVVDELVKVMGRHKPENIVIEMARENQTTQKGQKNSRERMKRIEEGIKELGSQILKEHPVENTQLQNEKLYLYYLQNGRDMYVDQELDINRLSDYDVDHIVPQSFLKDDSIDNKVLTRSDKARGKSDNVPSEEVVKKMKNYWRQLLNAKLITQRKFDNLTKAERGGLSELDKAGFIKRQLVETRQITKHVAQILDSRMNTKYDENDKLIREVKVITLKSKLVSDFRKDFQFYKVREINNYHHAHDAYLNAVVGTALIKKYPKLESEFVYGDYKVYDVRKMIAKSEQEIGKATAKYFFYSNIMNFFKTEITLANGEIRKRPLIETNGETGEIVWDKGRDFATVRKVLSMPQVNIVKKTEVQTGGFSKESILPKRNSDKLIARKKDWDPKKYGGFDSPTVAYSVLVVAKVEKGKSKKLKSVKELLGITIMERSSFEKNPIDFLEAKGYKEVKKDLIIKLPKYSLFELENGRKRMLASAGELQKGNELALPSKYVNFLYLASHYEKLKGSPEDNEQKQLFVEQHKHYLDEIIEQISEFSKRVILADANLDKVLSAYNKHRDKPIREQAENIIHLFTLTNLGAPAAFKYFDTTIDRKRYTSTKEVLDATLIHQSITGLYETRIDLSQLGGDGGGGSGSSGGGGGTLNIEDEHRLHETSKEPDVSLGSTWLSDFPQAWAETGGMGLAVRQAPLIIPLKATSTPVSIKQYPMSQEARLGIKPHIQRLLDQGILVPCQSPWNTPLLPVKKPGTNDYRPVQDLREVNKRVEDIHPTVPNPYNLLSGLPPSHQWYTVLDLKDAFFCLRLHPTSQPLFAFEWRDPEMGISGQLTWTRLPQGFKNSPTLFNEALHRDLADFRIQHPDLILLQYVDDLLLAATSELDCQQGTRALLQTLGNLGYRASAKKAQICQKQVKYLGYLLKEGQRWLTEARKETVMGQPTPKTPRQLREFLGTAGFCRLWIPGFAEMAAPLYPLTKPGTLFNWGPDQQKAYQEIKQALLTAPALGLPDLTKPFELFVDEKQGYAKGVLTQKLGPWRRPVAYLSKKLDPVAAGWPPCLRMVAAIAVLTKDAGKLTMGQPLVILAPHAVEALVKQPPDRWLSNARMTHYQALLLDTDRVQFGPVVALNPATLLPLPEEGLQHNCLDILAEAHGTRPDLTDQPLPDADHTWYTDGSSLLQEGQRKAGAAVTTETEVIWAKALPAGTSAQRAELIALTQALKMAEGKKLNVYTDSRYAFATAHIHGEIYRRRGWLTSEGKEIKNKDEILALLKALFLPKRLSIIHCPGHQKGHSAEARGNRMADQAARKAAITETPDTSTLLAGKRTADGSEFEKRTADGSEFESPKKKAKVE

SEQ ID NO: 2980 - protein, 2092 aa, synthetic construct
MPAAKRVKLDGGDKKYSIGLDIGTNSVGWAVITDEYKVPSKKFKVLGNTDRHSIKKNLIGALLFDSGETAEATRLKRTARRRYTRRKNRICYLQEIFSNEMAKVDDSFFHRLEESFLVEEDKKHERHPIFGNIVDEVAYHEKYPTIYHLRKKLVDSTDKADLRLIYLALAHMIKFRGHFLIEGDLNPDNSDVDKLFIQLVQTYNQLFEENPINASGVDAKAILSARLSKSRRLENLIAQLPGEKKNGLFGNLIALSLGLTPNFKSNFDLAEDAKLQLSKDTYDDDLDNLLAQIGDQYADLFLAAKNLSDAILLSDILRVNTEITKAPLSASMIKRYDEHHQDLTLLKALVRQQLPEKYKEIFFDQSKNGYAGYIDGGASQEEFYKFIKPILEKMDGTEELLVKLNREDLLRKQRTFDNGSIPHQIHLGELHAILRRQEDFYPFLKDNREKIEKILTFRIPYYVGPLARGNSRFAWMTRKSEETITPWNFEEVVDKGASAQSFIERMTNFDKNLPNEKVLPKHSLLYEYFTVYNELTKVKYVTEGMRKPAFLSGEQKKAIVDLLFKTNRKVTVKQLKEDYFKKIECFDSVEISGVEDRFNASLGTYHDLLKIIKDKDFLDNEENEDILEDIVLTLTLFEDREMIEERLKTYAHLFDDKVMKQLKRRRYTGWGRLSRKLINGIRDKQSGKTILDFLKSDGFANRNFMQLIHDDSLTFKEDIQKAQVSGQGDSLHEHIANLAGSPAIKKGILQTVKVVDELVKVMGRHKPENIVIEMARENQTTQKGQKNSRERMKRIEEGIKELGSQILKEHPVENTQLQNEKLYLYYLQNGRDMYVDQELDINRLSDYDVDHIVPQSFLKDDSIDNKVLTRSDKARGKSDNVPSEEVVKKMKNYWRQLLNAKLITQRKFDNLTKAERGGLSELDKAGFIKRQLVETRQITKHVAQILDSRMNTKYDENDKLIREVKVITLKSKLVSDFRKDFQFYKVREINNYHHAHDAYLNAVVGTALIKKYPKLESEFVYGDYKVYDVRKMIAKSEQEIGKATAKYFFYSNIMNFFKTEITLANGEIRKRPLIETNGETGEIVWDKGRDFATVRKVLSMPQVNIVKKTEVQTGGFSKESILPKRNSDKLIARKKDWDPKKYGGFDSPTVAYSVLVVAKVEKGKSKKLKSVKELLGITIMERSSFEKNPIDFLEAKGYKEVKKDLIIKLPKYSLFELENGRKRMLASAGELQKGNELALPSKYVNFLYLASHYEKLKGSPEDNEQKQLFVEQHKHYLDEIIEQISEFSKRVILADANLDKVLSAYNKHRDKPIREQAENIIHLFTLTNLGAPAAFKYFDTTIDRKRYTSTKEVLDATLIHQSITGLYETRIDLSQLGGDGGPAPAPAPGGTLNIEDEHRLHETSKEPDVSLGSTWLSDFPQAWAETGGMGLAVRQAPLIIPLKATSTPVSIKQYPMSQEARLGIKPHIQRLLDQGILVPCQSPWNTPLLPVKKPGTNDYRPVQDLREVNKRVEDIHPTVPNPYNLLSGLPPSHQWYTVLDLKDAFFCLRLHPTSQPLFAFEWRDPEMGISGQLTWTRLPQGFKNSPTLFNEALHRDLADFRIQHPDLILLQYVDDLLLAATSELDCQQGTRALLQTLGNLGYRASAKKAQICQKQVKYLGYLLKEGQRWLTEARKETVMGQPTPKTPRQLREFLGTAGFCRLWIPGFAEMAAPLYPLTKPGTLFNWGPDQQKAYQEIKQALLTAPALGLPDLTKPFELFVDEKQGYAKGVLTQKLGPWRRPVAYLSKKLDPVAAGWPPCLRMVAAIAVLTKDAGKLTMGQPLVILAPHAVEALVKQPPDRWLSNARMTHYQALLLDTDRVQFGPVVALNPATLLPLPEEGLQHNCLDILAEAHGTRPDLTDQPLPDADHTWYTDGSSLLQEGQRKAGAAVTTETEVIWAKALPAGTSAQRAELIALTQALKMAEGKKLNVYTDSRYAFATAHIHGEIYRRRGWLTSEGKEIKNKDEILALLKALFLPKRLSIIHCPGHQKGHSAEARGNRMADQAARKAAITETPDTSTLLAGKRTADGSEFEKRTADGSEFESPKKKAKVE

SEQ ID NO: 2981 - protein, 2100 aa, synthetic construct
MPAAKRVKLDGGDKKYSIGLDIGTNSVGWAVITDEYKVPSKKFKVLGNTDRHSIKKNLIGALLFDSGETAEATRLKRTARRRYTRRKNRICYLQEIFSNEMAKVDDSFFHRLEESFLVEEDKKHERHPIFGNIVDEVAYHEKYPTIYHLRKKLVDSTDKADLRLIYLALAHMIKFRGHFLIEGDLNPDNSDVDKLFIQLVQTYNQLFEENPINASGVDAKAILSARLSKSRRLENLIAQLPGEKKNGLFGNLIALSLGLTPNFKSNFDLAEDAKLQLSKDTYDDDLDNLLAQIGDQYADLFLAAKNLSDAILLSDILRVNTEITKAPLSASMIKRYDEHHQDLTLLKALVRQQLPEKYKEIFFDQSKNGYAGYIDGGASQEEFYKFIKPILEKMDGTEELLVKLNREDLLRKQRTFDNGSIPHQIHLGELHAILRRQEDFYPFLKDNREKIEKILTFRIPYYVGPLARGNSRFAWMTRKSEETITPWNFEEVVDKGASAQSFIERMTNFDKNLPNEKVLPKHSLLYEYFTVYNELTKVKYVTEGMRKPAFLSGEQKKAIVDLLFKTNRKVTVKQLKEDYFKKIECFDSVEISGVEDRFNASLGTYHDLLKIIKDKDFLDNEENEDILEDIVLTLTLFEDREMIEERLKTYAHLFDDKVMKQLKRRRYTGWGRLSRKLINGIRDKQSGKTILDFLKSDGFANRNFMQLIHDDSLTFKEDIQKAQVSGQGDSLHEHIANLAGSPAIKKGILQTVKVVDELVKVMGRHKPENIVIEMARENQTTQKGQKNSRERMKRIEEGIKELGSQILKEHPVENTQLQNEKLYLYYLQNGRDMYVDQELDINRLSDYDVDHIVPQSFLKDDSIDNKVLTRSDKARGKSDNVPSEEVVKKMKNYWRQLLNAKLITQRKFDNLTKAERGGLSELDKAGFIKRQLVETRQITKHVAQILDSRMNTKYDENDKLIREVKVITLKSKLVSDFRKDFQFYKVREINNYHHAHDAYLNAVVGTALIKKYPKLESEFVYGDYKVYDVRKMIAKSEQEIGKATAKYFFYSNIMNFFKTEITLANGEIRKRPLIETNGETGEIVWDKGRDFATVRKVLSMPQVNIVKKTEVQTGGFSKESILPKRNSDKLIARKKDWDPKKYGGFDSPTVAYSVLVVAKVEKGKSKKLKSVKELLGITIMERSSFEKNPIDFLEAKGYKEVKKDLIIKLPKYSLFELENGRKRMLASAGELQKGNELALPSKYVNFLYLASHYEKLKGSPEDNEQKQLFVEQHKHYLDEIIEQISEFSKRVILADANLDKVLSAYNKHRDKPIREQAENIIHLFTLTNLGAPAAFKYFDTTIDRKRYTSTKEVLDATLIHQSITGLYETRIDLSQLGGDGGGGSGGSGGSGGSGGSGGTLNIEDEHRLHETSKEPDVSLGSTWLSDFPQAWAETGGMGLAVRQAPLIIPLKATSTPVSIKQYPMSQEARLGIKPHIQRLLDQGILVPCQSPWNTPLLPVKKPGTNDYRPVQDLREVNKRVEDIHPTVPNPYNLLSGLPPSHQWYTVLDLKDAFFCLRLHPTSQPLFAFEWRDPEMGISGQLTWTRLPQGFKNSPTLFNEALHRDLADFRIQHPDLILLQYVDDLLLAATSELDCQQGTRALLQTLGNLGYRASAKKAQICQKQVKYLGYLLKEGQRWLTEARKETVMGQPTPKTPRQLREFLGTAGFCRLWIPGFAEMAAPLYPLTKPGTLFNWGPDQQKAYQEIKQALLTAPALGLPDLTKPFELFVDEKQGYAKGVLTQKLGPWRRPVAYLSKKLDPVAAGWPPCLRMVAAIAVLTKDAGKLTMGQPLVILAPHAVEALVKQPPDRWLSNARMTHYQALLLDTDRVQFGPVVALNPATLLPLPEEGLQHNCLDILAEAHGTRPDLTDQPLPDADHTWYTDGSSLLQEGQRKAGAAVTTETEVIWAKALPAGTSAQRAELIALTQALKMAEGKKLNVYTDSRYAFATAHIHGEIYRRRGWLTSEGKEIKNKDEILALLKALFLPKRLSIIHCPGHQKGHSAEARGNRMADQAARKAAITETPDTSTLLAGKRTADGSEFEKRTADGSEFESPKKKAKVE

SEQ ID NO: 2982 - protein, 2093 aa, synthetic construct; identical to SEQ ID NO: 2726

SEQ ID NO: 2983 - protein, 2115 aa, synthetic construct; identical to SEQ ID NO: 2741

SEQ ID NO: 2984 - protein, 2090 aa, synthetic construct
MPAAKRVKLDGGDKKYSIGLDIGTNSVGWAVITDEYKVPSKKFKVLGNTDRHSIKKNLIGALLFDSGETAEATRLKRTARRRYTRRKNRICYLQEIFSNEMAKVDDSFFHRLEESFLVEEDKKHERHPIFGNIVDEVAYHEKYPTIYHLRKKLVDSTDKADLRLIYLALAHMIKFRGHFLIEGDLNPDNSDVDKLFIQLVQTYNQLFEENPINASGVDAKAILSARLSKSRRLENLIAQLPGEKKNGLFGNLIALSLGLTPNFKSNFDLAEDAKLQLSKDTYDDDLDNLLAQIGDQYADLFLAAKNLSDAILLSDILRVNTEITKAPLSASMIKRYDEHHQDLTLLKALVRQQLPEKYKEIFFDQSKNGYAGYIDGGASQEEFYKFIKPILEKMDGTEELLVKLNREDLLRKQRTFDNGSIPHQIHLGELHAILRRQEDFYPFLKDNREKIEKILTFRIPYYVGPLARGNSRFAWMTRKSEETITPWNFEEVVDKGASAQSFIERMTNFDKNLPNEKVLPKHSLLYEYFTVYNELTKVKYVTEGMRKPAFLSGEQKKAIVDLLFKTNRKVTVKQLKEDYFKKIECFDSVEISGVEDRFNASLGTYHDLLKIIKDKDFLDNEENEDILEDIVLTLTLFEDREMIEERLKTYAHLFDDKVMKQLKRRRYTGWGRLSRKLINGIRDKQSGKTILDFLKSDGFANRNFMQLIHDDSLTFKEDIQKAQVSGQGDSLHEHIANLAGSPAIKKGILQTVKVVDELVKVMGRHKPENIVIEMARENQTTQKGQKNSRERMKRIEEGIKELGSQILKEHPVENTQLQNEKLYLYYLQNGRDMYVDQELDINRLSDYDVDHIVPQSFLKDDSIDNKVLTRSDKARGKSDNVPSEEVVKKMKNYWRQLLNAKLITQRKFDNLTKAERGGLSELDKAGFIKRQLVETRQITKHVAQILDSRMNTKYDENDKLIREVKVITLKSKLVSDFRKDFQFYKVREINNYHHAHDAYLNAVVGTALIKKYPKLESEFVYGDYKVYDVRKMIAKSEQEIGKATAKYFFYSNIMNFFKTEITLANGEIRKRPLIETNGETGEIVWDKGRDFATVRKVLSMPQVNIVKKTEVQTGGFSKESILPKRNSDKLIARKKDWDPKKYGGFDSPTVAYSVLVVAKVEKGKSKKLKSVKELLGITIMERSSFEKNPIDFLEAKGYKEVKKDLIIKLPKYSLFELENGRKRMLASAGELQKGNELALPSKYVNFLYLASHYEKLKGSPEDNEQKQLFVEQHKHYLDEIIEQISEFSKRVILADANLDKVLSAYNKHRDKPIREQAENIIHLFTLTNLGAPAAFKYFDTTIDRKRYTSTKEVLDATLIHQSITGLYETRIDLSQLGGDGGGGGGGGGTLNIEDEHRLHETSKEPDVSLGSTWLSDFPQAWAETGGMGLAVRQAPLIIPLKATSTPVSIKQYPMSQEARLGIKPHIQRLLDQGILVPCQSPWNTPLLPVKKPGTNDYRPVQDLREVNKRVEDIHPTVPNPYNLLSGLPPSHQWYTVLDLKDAFFCLRLHPTSQPLFAFEWRDPEMGISGQLTWTRLPQGFKNSPTLFNEALHRDLADFRIQHPDLILLQYVDDLLLAATSELDCQQGTRALLQTLGNLGYRASAKKAQICQKQVKYLGYLLKEGQRWLTEARKETVMGQPTPKTPRQLREFLGTAGFCRLWIPGFAEMAAPLYPLTKPGTLFNWGPDQQKAYQEIKQALLTAPALGLPDLTKPFELFVDEKQGYAKGVLTQKLGPWRRPVAYLSKKLDPVAAGWPPCLRMVAAIAVLTKDAGKLTMGQPLVILAPHAVEALVKQPPDRWLSNARMTHYQALLLDTDRVQFGPVVALNPATLLPLPEEGLQHNCLDILAEAHGTRPDLTDQPLPDADHTWYTDGSSLLQEGQRKAGAAVTTETEVIWAKALPAGTSAQRAELIALTQALKMAEGKKLNVYTDSRYAFATAHIHGEIYRRRGWLTSEGKEIKNKDEILALLKALFLPKRLSIIHCPGHQKGHSAEARGNRMADQAARKAAITETPDTSTLLAGKRTADGSEFEKRTADGSEFESPKKKAKVE

SEQ ID NO: 2985 - protein, 2094 aa, synthetic construct
MPAAKRVKLDGGDKKYSIGLDIGTNSVGWAVITDEYKVPSKKFKVLGNTDRHSIKKNLIGALLFDSGETAEATRLKRTARRRYTRRKNRICYLQEIFSNEMAKVDDSFFHRLEESFLVEEDKKHERHPIFGNIVDEVAYHEKYPTIYHLRKKLVDSTDKADLRLIYLALAHMIKFRGHFLIEGDLNPDNSDVDKLFIQLVQTYNQLFEENPINASGVDAKAILSARLSKSRRLENLIAQLPGEKKNGLFGNLIALSLGLTPNFKSNFDLAEDAKLQLSKDTYDDDLDNLLAQIGDQYADLFLAAKNLSDAILLSDILRVNTEITKAPLSASMIKRYDEHHQDLTLLKALVRQQLPEKYKEIFFDQSKNGYAGYIDGGASQEEFYKFIKPILEKMDGTEELLVKLNREDLLRKQRTFDNGSIPHQIHLGELHAILRRQEDFYPFLKDNREKIEKILTFRIPYYVGPLARGNSRFAWMTRKSEETITPWNFEEVVDKGASAQSFIERMTNFDKNLPNEKVLPKHSLLYEYFTVYNELTKVKYVTEGMRKPAFLSGEQKKAIVDLLFKTNRKVTVKQLKEDYFKKIECFDSVEISGVEDRFNASLGTYHDLLKIIKDKDFLDNEENEDILEDIVLTLTLFEDREMIEERLKTYAHLFDDKVMKQLKRRRYTGWGRLSRKLINGIRDKQSGKTILDFLKSDGFANRNFMQLIHDDSLTFKEDIQKAQVSGQGDSLHEHIANLAGSPAIKKGILQTVKVVDELVKVMGRHKPENIVIEMARENQTTQKGQKNSRERMKRIEEGIKELGSQILKEHPVENTQLQNEKLYLYYLQNGRDMYVDQELDINRLSDYDVDHIVPQSFLKDDSIDNKVLTRSDKARGKSDNVPSEEVVKKMKNYWRQLLNAKLITQRKFDNLTKAERGGLSELDKAGFIKRQLVETRQITKHVAQILDSRMNTKYDENDKLIREVKVITLKSKLVSDFRKDFQFYKVREINNYHHAHDAYLNAVVGTALIKKYPKLESEFVYGDYKVYDVRKMIAKSEQEIGKATAKYFFYSNIMNFFKTEITLANGEIRKRPLIETNGETGEIVWDKGRDFATVRKVLSMPQVNIVKKTEVQTGGFSKESILPKRNSDKLIARKKDWDPKKYGGFDSPTVAYSVLVVAKVEKGKSKKLKSVKELLGITIMERSSFEKNPIDFLEAKGYKEVKKDLIIKLPKYSLFELENGRKRMLASAGELQKGNELALPSKYVNFLYLASHYEKLKGSPEDNEQKQLFVEQHKHYLDEIIEQISEFSKRVILADANLDKVLSAYNKHRDKPIREQAENIIHLFTLTNLGAPAAFKYFDTTIDRKRYTSTKEVLDATLIHQSITGLYETRIDLSQLGGDGGGGSGSSPAPGGTLNIEDEHRLHETSKEPDVSLGSTWLSDFPQAWAETGGMGLAVRQAPLIIPLKATSTPVSIKQYPMSQEARLGIKPHIQRLLDQGILVPCQSPWNTPLLPVKKPGTNDYRPVQDLREVNKRVEDIHPTVPNPYNLLSGLPPSHQWYTVLDLKDAFFCLRLHPTSQPLFAFEWRDPEMGISGQLTWTRLPQGFKNSPTLFNEALHRDLADFRIQHPDLILLQYVDDLLLAATSELDCQQGTRALLQTLGNLGYRASAKKAQICQKQVKYLGYLLKEGQRWLTEARKETVMGQPTPKTPRQLREFLGTAGFCRLWIPGFAEMAAPLYPLTKPGTLFNWGPDQQKAYQEIKQALLTAPALGLPDLTKPFELFVDEKQGYAKGVLTQKLGPWRRPVAYLSKKLDPVAAGWPPCLRMVAAIAVLTKDAGKLTMGQPLVILAPHAVEALVKQPPDRWLSNARMTHYQALLLDTDRVQFGPVVALNPATLLPLPEEGLQHNCLDILAEAHGTRPDLTDQPLPDADHTWYTDGSSLLQEGQRKAGAAVTTETEVIWAKALPAGTSAQRAELIALTQALKMAEGKKLNVYTDSRYAFATAHIHGEIYRRRGWLTSEGKEIKNKDEILALLKALFLPKRLSIIHCPGHQKGHSAEARGNRMADQAARKAAITETPDTSTLLAGKRTADGSEFEKRTADGSEFESPKKKAKVE

SEQ ID NO: 2986 - protein, 2088 aa, synthetic construct
MPAAKRVKLDGGDKKYSIGLDIGTNSVGWAVITDEYKVPSKKFKVLGNTDRHSIKKNLIGALLFDSGETAEATRLKRTARRRYTRRKNRICYLQEIFSNEMAKVDDSFFHRLEESFLVEEDKKHERHPIFGNIVDEVAYHEKYPTIYHLRKKLVDSTDKADLRLIYLALAHMIKFRGHFLIEGDLNPDNSDVDKLFIQLVQTYNQLFEENPINASGVDAKAILSARLSKSRRLENLIAQLPGEKKNGLFGNLIALSLGLTPNFKSNFDLAEDAKLQLSKDTYDDDLDNLLAQIGDQYADLFLAAKNLSDAILLSDILRVNTEITKAPLSASMIKRYDEHHQDLTLLKALVRQQLPEKYKEIFFDQSKNGYAGYIDGGASQEEFYKFIKPILEKMDGTEELLVKLNREDLLRKQRTFDNGSIPHQIHLGELHAILRRQEDFYPFLKDNREKIEKILTFRIPYYVGPLARGNSRFAWMTRKSEETITPWNFEEVVDKGASAQSFIERMTNFDKNLPNEKVLPKHSLLYEYFTVYNELTKVKYVTEGMRKPAFLSGEQKKAIVDLLFKTNRKVTVKQLKEDYFKKIECFDSVEISGVEDRFNASLGTYHDLLKIIKDKDFLDNEENEDILEDIVLTLTLFEDREMIEERLKTYAHLFDDKVMKQLKRRRYTGWGRLSRKLINGIRDKQSGKTILDFLKSDGFANRNFMQLIHDDSLTFKEDIQKAQVSGQGDSLHEHIANLAGSPAIKKGILQTVKVVDELVKVMGRHKPENIVIEMARENQTTQKGQKNSRERMKRIEEGIKELGSQILKEHPVENTQLQNEKLYLYYLQNGRDMYVDQELDINRLSDYDVDHIVPQSFLKDDSIDNKVLTRSDKARGKSDNVPSEEVVKKMKNYWRQLLNAKLITQRKFDNLTKAERGGLSELDKAGFIKRQLVETRQITKHVAQILDSRMNTKYDENDKLIREVKVITLKSKLVSDFRKDFQFYKVREINNYHHAHDAYLNAVVGTALIKKYPKLESEFVYGDYKVYDVRKMIAKSEQEIGKATAKYFFYSNIMNFFKTEITLANGEIRKRPLIETNGETGEIVWDKGRDFATVRKVLSMPQVNIVKKTEVQTGGFSKESILPKRNSDKLIARKKDWDPKKYGGFDSPTVAYSVLVVAKVEKGKSKKLKSVKELLGITIMERSSFEKNPIDFLEAKGYKEVKKDLIIKLPKYSLFELENGRKRMLASAGELQKGNELALPSKYVNFLYLASHYEKLKGSPEDNEQKQLFVEQHKHYLDEIIEQISEFSKRVILADANLDKVLSAYNKHRDKPIREQAENIIHLFTLTNLGAPAAFKYFDTTIDRKRYTSTKEVLDATLIHQSITGLYETRIDLSQLGGDGGGSSGGTLNIEDEHRLHETSKEPDVSLGSTWLSDFPQAWAETGGMGLAVRQAPLIIPLKATSTPVSIKQYPMSQEARLGIKPHIQRLLDQGILVPCQSPWNTPLLPVKKPGTNDYRPVQDLREVNKRVEDIHPTVPNPYNLLSGLPPSHQWYTVLDLKDAFFCLRLHPTSQPLFAFEWRDPEMGISGQLTWTRLPQGFKNSPTLFNEALHRDLADFRIQHPDLILLQYVDDLLLAATSELDCQQGTRALLQTLGNLGYRASAKKAQICQKQVKYLGYLLKEGQRWLTEARKETVMGQPTPKTPRQLREFLGTAGFCRLWIPGFAEMAAPLYPLTKPGTLFNWGPDQQKAYQEIKQALLTAPALGLPDLTKPFELFVDEKQGYAKGVLTQKLGPWRRPVAYLSKKLDPVAAGWPPCLRMVAAIAVLTKDAGKLTMGQPLVILAPHAVEALVKQPPDRWLSNARMTHYQALLLDTDRVQFGPVVALNPATLLPLPEEGLQHNCLDILAEAHGTRPDLTDQPLPDADHTWYTDGSSLLQEGQRKAGAAVTTETEVIWAKALPAGTSAQRAELIALTQALKMAEGKKLNVYTDSRYAFATAHIHGEIYRRRGWLTSEGKEIKNKDEILALLKALFLPKRLSIIHCPGHQKGHSAEARGNRMADQAARKAAITETPDTSTLLAGKRTADGSEFEKRTADGSEFESPKKKAKVE

SEQ ID NO: 2987 - protein, 2096 aa, synthetic construct; identical to SEQ ID NO: 2776

SEQ ID NO: 2988 - protein, 2094 aa, synthetic construct
MPAAKRVKLDGGDKKYSIGLDIGTNSVGWAVITDEYKVPSKKFKVLGNTDRHSIKKNLIGALLFDSGETAEATRLKRTARRRYTRRKNRICYLQEIFSNEMAKVDDSFFHRLEESFLVEEDKKHERHPIFGNIVDEVAYHEKYPTIYHLRKKLVDSTDKADLRLIYLALAHMIKFRGHFLIEGDLNPDNSDVDKLFIQLVQTYNQLFEENPINASGVDAKAILSARLSKSRRLENLIAQLPGEKKNGLFGNLIALSLGLTPNFKSNFDLAEDAKLQLSKDTYDDDLDNLLAQIGDQYADLFLAAKNLSDAILLSDILRVNTEITKAPLSASMIKRYDEHHQDLTLLKALVRQQLPEKYKEIFFDQSKNGYAGYIDGGASQEEFYKFIKPILEKMDGTEELLVKLNREDLLRKQRTFDNGSIPHQIHLGELHAILRRQEDFYPFLKDNREKIEKILTFRIPYYVGPLARGNSRFAWMTRKSEETITPWNFEEVVDKGASAQSFIERMTNFDKNLPNEKVLPKHSLLYEYFTVYNELTKVKYVTEGMRKPAFLSGEQKKAIVDLLFKTNRKVTVKQLKEDYFKKIECFDSVEISGVEDRFNASLGTYHDLLKIIKDKDFLDNEENEDILEDIVLTLTLFEDREMIEERLKTYAHLFDDKVMKQLKRRRYTGWGRLSRKLINGIRDKQSGKTILDFLKSDGFANRNFMQLIHDDSLTFKEDIQKAQVSGQGDSLHEHIANLAGSPAIKKGILQTVKVVDELVKVMGRHKPENIVIEMARENQTTQKGQKNSRERMKRIEEGIKELGSQILKEHPVENTQLQNEKLYLYYLQNGRDMYVDQELDINRLSDYDVDHIVPQSFLKDDSIDNKVLTRSDKARGKSDNVPSEEVVKKMKNYWRQLLNAKLITQRKFDNLTKAERGGLSELDKAGFIKRQLVETRQITKHVAQILDSRMNTKYDENDKLIREVKVITLKSKLVSDFRKDFQFYKVREINNYHHAHDAYLNAVVGTALIKKYPKLESEFVYGDYKVYDVRKMIAKSEQEIGKATAKYFFYSNIMNFFKTEITLANGEIRKRPLIETNGETGEIVWDKGRDFATVRKVLSMPQVNIVKKTEVQTGGFSKESILPKRNSDKLIARKKDWDPKKYGGFDSPTVAYSVLVVAKVEKGKSKKLKSVKELLGITIMERSSFEKNPIDFLEAKGYKEVKKDLIIKLPKYSLFELENGRKRMLASAGELQKGNELALPSKYVNFLYLASHYEKLKGSPEDNEQKQLFVEQHKHYLDEIIEQISEFSKRVILADANLDKVLSAYNKHRDKPIREQAENIIHLFTLTNLGAPAAFKYFDTTIDRKRYTSTKEVLDATLIHQSITGLYETRIDLSQLGGDGGGSSPAPGGGGGTLNIEDEHRLHETSKEPDVSLGSTWLSDFPQAWAETGGMGLAVRQAPLIIPLKATSTPVSIKQYPMSQEARLGIKPHIQRLLDQGILVPCQSPWNTPLLPVKKPGTNDYRPVQDLREVNKRVEDIHPTVPNPYNLLSGLPPSHQWYTVLDLKDAFFCLRLHPTSQPLFAFEWRDPEMGISGQLTWTRLPQGFKNSPTLFNEALHRDLADFRIQHPDLILLQYVDDLLLAATSELDCQQGTRALLQTLGNLGYRASAKKAQICQKQVKYLGYLLKEGQRWLTEARKETVMGQPTPKTPRQLREFLGTAGFCRLWIPGFAEMAAPLYPLTKPGTLFNWGPDQQKAYQEIKQALLTAPALGLPDLTKPFELFVDEKQGYAKGVLTQKLGPWRRPVAYLSKKLDPVAAGWPPCLRMVAAIAVLTKDAGKLTMGQPLVILAPHAVEALVKQPPDRWLSNARMTHYQALLLDTDRVQFGPVVALNPATLLPLPEEGLQHNCLDILAEAHGTRPDLTDQPLPDADHTWYTDGSSLLQEGQRKAGAAVTTETEVIWAKALPAGTSAQRAELIALTQALKMAEGKKLNVYTDSRYAFATAHIHGEIYRRRGWLTSEGKEIKNKDEILALLKALFLPKRLSIIHCPGHQKGHSAEARGNRMADQAARKAAITETPDTSTLLAGKRTADGSEFEKRTADGSEFESPKKKAKVE

SEQ ID NO: 2989 - protein, 2096 aa, synthetic construct; identical to SEQ ID NO: 2727

SEQ ID NO: 2990 - protein, 2096 aa, synthetic construct; identical to SEQ ID NO: 2764

SEQ ID NO: 2991 - protein, 2110 aa, synthetic construct; identical to SEQ ID NO: 2716

SEQ ID NO: 2992 - protein, 2115 aa, synthetic construct
MPAAKRVKLDGGDKKYSIGLDIGTNSVGWAVITDEYKVPSKKFKVLGNTDRHSIKKNLIGALLFDSGETAEATRLKRTARRRYTRRKNRICYLQEIFSNEMAKVDDSFFHRLEESFLVEEDKKHERHPIFGNIVDEVAYHEKYPTIYHLRKKLVDSTDKADLRLIYLALAHMIKFRGHFLIEGDLNPDNSDVDKLFIQLVQTYNQLFEENPINASGVDAKAILSARLSKSRRLENLIAQLPGEKKNGLFGNLIALSLGLTPNFKSNFDLAEDAKLQLSKDTYDDDLDNLLAQIGDQYADLFLAAKNLSDAILLSDILRVNTEITKAPLSASMIKRYDEHHQDLTLLKALVRQQLPEKYKEIFFDQSKNGYAGYIDGGASQEEFYKFIKPILEKMDGTEELLVKLNREDLLRKQRTFDNGSIPHQIHLGELHAILRRQEDFYPFLKDNREKIEKILTFRIPYYVGPLARGNSRFAWMTRKSEETITPWNFEEVVDKGASAQSFIERMTNFDKNLPNEKVLPKHSLLYEYFTVYNELTKVKYVTEGMRKPAFLSGEQKKAIVDLLFKTNRKVTVKQLKEDYFKKIECFDSVEISGVEDRFNASLGTYHDLLKIIKDKDFLDNEENEDILEDIVLTLTLFEDREMIEERLKTYAHLFDDKVMKQLKRRRYTGWGRLSRKLINGIRDKQSGKTILDFLKSDGFANRNFMQLIHDDSLTFKEDIQKAQVSGQGDSLHEHIANLAGSPAIKKGILQTVKVVDELVKVMGRHKPENIVIEMARENQTTQKGQKNSRERMKRIEEGIKELGSQILKEHPVENTQLQNEKLYLYYLQNGRDMYVDQELDINRLSDYDVDHIVPQSFLKDDSIDNKVLTRSDKARGKSDNVPSEEVVKKMKNYWRQLLNAKLITQRKFDNLTKAERGGLSELDKAGFIKRQLVETRQITKHVAQILDSRMNTKYDENDKLIREVKVITLKSKLVSDFRKDFQFYKVREINNYHHAHDAYLNAVVGTALIKKYPKLESEFVYGDYKVYDVRKMIAKSEQEIGKATAKYFFYSNIMNFFKTEITLANGEIRKRPLIETNGETGEIVWDKGRDFATVRKVLSMPQVNIVKKTEVQTGGFSKESILPKRNSDKLIARKKDWDPKKYGGFDSPTVAYSVLVVAKVEKGKSKKLKSVKELLGITIMERSSFEKNPIDFLEAKGYKEVKKDLIIKLPKYSLFELENGRKRMLASAGELQKGNELALPSKYVNFLYLASHYEKLKGSPEDNEQKQLFVEQHKHYLDEIIEQISEFSKRVILADANLDKVLSAYNKHRDKPIREQAENIIHLFTLTNLGAPAAFKYFDTTIDRKRYTSTKEVLDATLIHQSITGLYETRIDLSQLGGDGGEAAAKEAAAKEAAAKEAAAKEAAAKEAAAKGGTLNIEDEHRLHETSKEPDVSLGSTWLSDFPQAWAETGGMGLAVRQAPLIIPLKATSTPVSIKQYPMSQEARLGIKPHIQRLLDQGILVPCQSPWNTPLLPVKKPGTNDYRPVQDLREVNKRVEDIHPTVPNPYNLLSGLPPSHQWYTVLDLKDAFFCLRLHPTSQPLFAFEWRDPEMGISGQLTWTRLPQGFKNSPTLFNEALHRDLADFRIQHPDLILLQYVDDLLLAATSELDCQQGTRALLQTLGNLGYRASAKKAQICQKQVKYLGYLLKEGQRWLTEARKETVMGQPTPKTPRQLREFLGTAGFCRLWIPGFAEMAAPLYPLTKPGTLFNWGPDQQKAYQEIKQALLTAPALGLPDLTKPFELFVDEKQGYAKGVLTQKLGPWRRPVAYLSKKLDPVAAGWPPCLRMVAAIAVLTKDAGKLTMGQPLVILAPHAVEALVKQPPDRWLSNARMTHYQALLLDTDRVQFGPVVALNPATLLPLPEEGLQHNCLDILAEAHGTRPDLTDQPLPDADHTWYTDGSSLLQEGQRKAGAAVTTETEVIWAKALPAGTSAQRAELIALTQALKMAEGKKLNVYTDSRYAFATAHIHGEIYRRRGWLTSEGKEIKNKDEILALLKALFLPKRLSIIHCPGHQKGHSAEARGNRMADQAARKAAITETPDTSTLLAGKRTADGSEFEKRTADGSEFESPKKKAKVE

SEQ ID NO: 2993 - protein, 2094 aa, synthetic construct; identical to SEQ ID NO: 2766

SEQ ID NO: 2994 - protein, 2094 aa, synthetic construct; identical to SEQ ID NO: 2773

SEQ ID NO: 2995 - protein, 2097 aa, synthetic construct
MPAAKRVKLDGGDKKYSIGLDIGTNSVGWAVITDEYKVPSKKFKVLGNTDRHSIKKNLIGALLFDSGETAEATRLKRTARRRYTRRKNRICYLQEIFSNEMAKVDDSFFHRLEESFLVEEDKKHERHPIFGNIVDEVAYHEKYPTIYHLRKKLVDSTDKADLRLIYLALAHMIKFRGHFLIEGDLNPDNSDVDKLFIQLVQTYNQLFEENPINASGVDAKAILSARLSKSRRLENLIAQLPGEKKNGLFGNLIALSLGLTPNFKSNFDLAEDAKLQLSKDTYDDDLDNLLAQIGDQYADLFLAAKNLSDAILLSDILRVNTEITKAPLSASMIKRYDEHHQDLTLLKALVRQQLPEKYKEIFFDQSKNGYAGYIDGGASQEEFYKFIKPILEKMDGTEELLVKLNREDLLRKQRTFDNGSIPHQIHLGELHAILRRQEDFYPFLKDNREKIEKILTFRIPYYVGPLARGNSRFAWMTRKSEETITPWNFEEVVDKGASAQSFIERMTNFDKNLPNEKVLPKHSLLYEYFTVYNELTKVKYVTEGMRKPAFLSGEQKKAIVDLLFKTNRKVTVKQLKEDYFKKIECFDSVEISGVEDRFNASLGTYHDLLKIIKDKDFLDNEENEDILEDIVLTLTLFEDREMIEERLKTYAHLFDDKVMKQLKRRRYTGWGRLSRKLINGIRDKQSGKTILDFLKSDGFANRNFMQLIHDDSLTFKEDIQKAQVSGQGDSLHEHIANLAGSPAIKKGILQTVKVVDELVKVMGRHKPENIVIEMARENQTTQKGQKNSRERMKRIEEGIKELGSQILKEHPVENTQLQNEKLYLYYLQNGRDMYVDQELDINRLSDYDVDHIVPQSFLKDDSIDNKVLTRSDKARGKSDNVPSEEVVKKMKNYWRQLLNAKLITQRKFDNLTKAERGGLSELDKAGFIKRQLVETRQITKHVAQILDSRMNTKYDENDKLIREVKVITLKSKLVSDFRKDFQFYKVREINNYHHAHDAYLNAVVGTALIKKYPKLESEFVYGDYKVYDVRKMIAKSEQEIGKATAKYFFYSNIMNFFKTEITLANGEIRKRPLIETNGETGEIVWDKGRDFATVRKVLSMPQVNIVKKTEVQTGGFSKESILPKRNSDKLIARKKDWDPKKYGGFDSPTVAYSVLVVAKVEKGKSKKLKSVKELLGITIMERSSFEKNPIDFLEAKGYKEVKKDLIIKLPKYSLFELENGRKRMLASAGELQKGNELALPSKYVNFLYLASHYEKLKGSPEDNEQKQLFVEQHKHYLDEIIEQISEFSKRVILADANLDKVLSAYNKHRDKPIREQAENIIHLFTLTNLGAPAAFKYFDTTIDRKRYTSTKEVLDATLIHQSITGLYETRIDLSQLGGDGGGSAGSAAGSGEFGGTLNIEDEHRLHETSKEPDVSLGSTWLSDFPQAWAETGGMGLAVRQAPLIIPLKATSTPVSIKQYPMSQEARLGIKPHIQRLLDQGILVPCQSPWNTPLLPVKKPGTNDYRPVQDLREVNKRVEDIHPTVPNPYNLLSGLPPSHQWYTVLDLKDAFFCLRLHPTSQPLFAFEWRDPEMGISGQLTWTRLPQGFKNSPTLFNEALHRDLADFRIQHPDLILLQYVDDLLLAATSELDCQQGTRALLQTLGNLGYRASAKKAQICQKQVKYLGYLLKEGQRWLTEARKETVMGQPTPKTPRQLREFLGTAGFCRLWIPGFAEMAAPLYPLTKPGTLFNWGPDQQKAYQEIKQALLTAPALGLPDLTKPFELFVDEKQGYAKGVLTQKLGPWRRPVAYLSKKLDPVAAGWPPCLRMVAAIAVLTKDAGKLTMGQPLVILAPHAVEALVKQPPDRWLSNARMTHYQALLLDTDRVQFGPVVALNPATLLPLPEEGLQHNCLDILAEAHGTRPDLTDQPLPDADHTWYTDGSSLLQEGQRKAGAAVTTETEVIWAKALPAGTSAQRAELIALTQALKMAEGKKLNVYTDSRYAFATAHIHGEIYRRRGWLTSEGKEIKNKDEILALLKALFLPKRLSIIHCPGHQKGHSAEARGNRMADQAARKAAITETPDTSTLLAGKRTADGSEFEKRTADGSEFESPKKKAKVE

SEQ ID NO: 2996 - protein, 2091 aa, synthetic construct
MPAAKRVKLDGGDKKYSIGLDIGTNSVGWAVITDEYKVPSKKFKVLGNTDRHSIKKNLIGALLFDSGETAEATRLKRTARRRYTRRKNRICYLQEIFSNEMAKVDDSFFHRLEESFLVEEDKKHERHPIFGNIVDEVAYHEKYPTIYHLRKKLVDSTDKADLRLIYLALAHMIKFRGHFLIEGDLNPDNSDVDKLFIQLVQTYNQLFEENPINASGVDAKAILSARLSKSRRLENLIAQLPGEKKNGLFGNLIALSLGLTPNFKSNFDLAEDAKLQLSKDTYDDDLDNLLAQIGDQYADLFLAAKNLSDAILLSDILRVNTEITKAPLSASMIKRYDEHHQDLTLLKALVRQQLPEKYKEIFFDQSKNGYAGYIDGGASQEEFYKFIKPILEKMDGTEELLVKLNREDLLRKQRTFDNGSIPHQIHLGELHAILRRQEDFYPFLKDNREKIEKILTFRIPYYVGPLARGNSRFAWMTRKSEETITPWNFEEVVDKGASAQSFIERMTNFDKNLPNEKVLPKHSLLYEYFTVYNELTKVKYVTEGMRKPAFLSGEQKKAIVDLLFKTNRKVTVKQLKEDYFKKIECFDSVEISGVEDRFNASLGTYHDLLKIIKDKDFLDNEENEDILEDIVLTLTLFEDREMIEERLKTYAHLFDDKVMKQLKRRRYTGWGRLSRKLINGIRDKQSGKTILDFLKSDGFANRNFMQLIHDDSLTFKEDIQKAQVSGQGDSLHEHIANLAGSPAIKKGILQTVKVVDELVKVMGRHKPENIVIEMARENQTTQKGQKNSRERMKRIEEGIKELGSQILKEHPVENTQLQNEKLYLYYLQNGRDMYVDQELDINRLSDYDVDHIVPQSFLKDDSIDNKVLTRSDKARGKSDNVPSEEVVKKMKNYWRQLLNAKLITQRKFDNLTKAERGGLSELDKAGFIKRQLVETRQITKHVAQILDSRMNTKYDENDKLIREVKVITLKSKLVSDFRKDFQFYKVREINNYHHAHDAYLNAVVGTALIKKYPKLESEFVYGDYKVYDVRKMIAKSEQEIGKATAKYFFYSNIMNFFKTEITLANGEIRKRPLIETNGETGEIVWDKGRDFATVRKVLSMPQVNIVKKTEVQTGGFSKESILPKRNSDKLIARKKDWDPKKYGGFDSPTVAYSVLVVAKVEKGKSKKLKSVKELLGITIMERSSFEKNPIDFLEAKGYKEVKKDLIIKLPKYSLFELENGRKRMLASAGELQKGNELALPSKYVNFLYLASHYEKLKGSPEDNEQKQLFVEQHKHYLDEIIEQISEFSKRVILADANLDKVLSAYNKHRDKPIREQAENIIHLFTLTNLGAPAAFKYFDTTIDRKRYTSTKEVLDATLIHQSITGLYETRIDLSQLGGDGGPAPGSSGGTLNIEDEHRLHETSKEPDVSLGSTWLSDFPQAWAETGGMGLAVRQAPLIIPLKATSTPVSIKQYPMSQEARLGIKPHIQRLLDQGILVPCQSPWNTPLLPVKKPGTNDYRPVQDLREVNKRVEDIHPTVPNPYNLLSGLPPSHQWYTVLDLKDAFFCLRLHPTSQPLFAFEWRDPEMGISGQLTWTRLPQGFKNSPTLFNEALHRDLADFRIQHPDLILLQYVDDLLLAATSELDCQQGTRALLQTLGNLGYRASAKKAQICQKQVKYLGYLLKEGQRWLTEARKETVMGQPTPKTPRQLREFLGTAGFCRLWIPGFAEMAAPLYPLTKPGTLFNWGPDQQKAYQEIKQALLTAPALGLPDLTKPFELFVDEKQGYAKGVLTQKLGPWRRPVAYLSKKLDPVAAGWPPCLRMVAAIAVLTKDAGKLTMGQPLVILAPHAVEALVKQPPDRWLSNARMTHYQALLLDTDRVQFGPVVALNPATLLPLPEEGLQHNCLDILAEAHGTRPDLTDQPLPDADHTWYTDGSSLLQEGQRKAGAAVTTETEVIWAKALPAGTSAQRAELIALTQALKMAEGKKLNVYTDSRYAFATAHIHGEIYRRRGWLTSEGKEIKNKDEILALLKALFLPKRLSIIHCPGHQKGHSAEARGNRMADQAARKAAITETPDTSTLLAGKRTADGSEFEKRTADGSEFESPKKKAKVE

SEQ ID NO: 2997 - protein, 2096 aa, synthetic construct
MPAAKRVKLDGGDKKYSIGLDIGTNSVGWAVITDEYKVPSKKFKVLGNTDRHSIKKNLIGALLFDSGETAEATRLKRTARRRYTRRKNRICYLQEIFSNEMAKVDDSFFHRLEESFLVEEDKKHERHPIFGNIVDEVAYHEKYPTIYHLRKKLVDSTDKADLRLIYLALAHMIKFRGHFLIEGDLNPDNSDVDKLFIQLVQTYNQLFEENPINASGVDAKAILSARLSKSRRLENLIAQLPGEKKNGLFGNLIALSLGLTPNFKSNFDLAEDAKLQLSKDTYDDDLDNLLAQIGDQYADLFLAAKNLSDAILLSDILRVNTEITKAPLSASMIKRYDEHHQDLTLLKALVRQQLPEKYKEIFFDQSKNGYAGYIDGGASQEEFYKFIKPILEKMDGTEELLVKLNREDLLRKQRTFDNGSIPHQIHLGELHAILRRQEDFYPFLKDNREKIEKILTFRIPYYVGPLARGNSRFAWMTRKSEETITPWNFEEVVDKGASAQSFIERMTNFDKNLPNEKVLPKHSLLYEYFTVYNELTKVKYVTEGMRKPAFLSGEQKKAIVDLLFKTNRKVTVKQLKEDYFKKIECFDSVEISGVEDRFNASLGTYHDLLKIIKDKDFLDNEENEDILEDIVLTLTLFEDREMIEERLKTYAHLFDDKVMKQLKRRRYTGWGRLSRKLINGIRDKQSGKTILDFLKSDGFANRNFMQLIHDDSLTFKEDIQKAQVSGQGDSLHEHIANLAGSPAIKKGILQTVKVVDELVKVMGRHKPENIVIEMARENQTTQKGQKNSRERMKRIEEGIKELGSQILKEHPVENTQLQNEKLYLYYLQNGRDMYVDQELDINRLSDYDVDHIVPQSFLKDDSIDNKVLTRSDKARGKSDNVPSEEVVKKMKNYWRQLLNAKLITQRKFDNLTKAERGGLSELDKAGFIKRQLVETRQITKHVAQILDSRMNTKYDENDKLIREVKVITLKSKLVSDFRKDFQFYKVREINNYHHAHDAYLNAVVGTALIKKYPKLESEFVYGDYKVYDVRKMIAKSEQEIGKATAKYFFYSNIMNFFKTEITLANGEIRKRPLIETNGETGEIVWDKGRDFATVRKVLSMPQVNIVKKTEVQTGGFSKESILPKRNSDKLIARKKDWDPKKYGGFDSPTVAYSVLVVAKVEKGKSKKLKSVKELLGITIMERSSFEKNPIDFLEAKGYKEVKKDLIIKLPKYSLFELENGRKRMLASAGELQKGNELALPSKYVNFLYLASHYEKLKGSPEDNEQKQLFVEQHKHYLDEIIEQISEFSKRVILADANLDKVLSAYNKHRDKPIREQAENIIHLFTLTNLGAPAAFKYFDTTIDRKRYTSTKEVLDATLIHQSITGLYETRIDLSQLGGDGGEAAAKGGGGSSGGTLNIEDEHRLHETSKEPDVSLGSTWLSDFPQAWAETGGMGLAVRQAPLIIPLKATSTPVSIKQYPMSQEARLGIKPHIQRLLDQGILVPCQSPWNTPLLPVKKPGTNDYRPVQDLREVNKRVEDIHPTVPNPYNLLSGLPPSHQWYTVLDLKDAFFCLRLHPTSQPLFAFEWRDPEMGISGQLTWTRLPQGFKNSPTLFNEALHRDLADFRIQHPDLILLQYVDDLLLAATSELDCQQGTRALLQTLGNLGYRASAKKAQICQKQVKYLGYLLKEGQRWLTEARKETVMGQPTPKTPRQLREFLGTAGFCRLWIPGFAEMAAPLYPLTKPGTLFNWGPDQQKAYQEIKQALLTAPALGLPDLTKPFELFVDEKQGYAKGVLTQKLGPWRRPVAYLSKKLDPVAAGWPPCLRMVAAIAVLTKDAGKLTMGQPLVILAPHAVEALVKQPPDRWLSNARMTHYQALLLDTDRVQFGPVVALNPATLLPLPEEGLQHNCLDILAEAHGTRPDLTDQPLPDADHTWYTDGSSLLQEGQRKAGAAVTTETEVIWAKALPAGTSAQRAELIALTQALKMAEGKKLNVYTDSRYAFATAHIHGEIYRRRGWLTSEGKEIKNKDEILALLKALFLPKRLSIIHCPGHQKGHSAEARGNRMADQAARKAAITETPDTSTLLAGKRTADGSEFEKRTADGSEFESPKKKAKVE

SEQ ID NO: 2998 - protein, 2100 aa, synthetic construct
MPAAKRVKLDGGDKKYSIGLDIGTNSVGWAVITDEYKVPSKKFKVLGNTDRHSIKKNLIGALLFDSGETAEATRLKRTARRRYTRRKNRICYLQEIFSNEMAKVDDSFFHRLEESFLVEEDKKHERHPIFGNIVDEVAYHEKYPTIYHLRKKLVDSTDKADLRLIYLALAHMIKFRGHFLIEGDLNPDNSDVDKLFIQLVQTYNQLFEENPINASGVDAKAILSARLSKSRRLENLIAQLPGEKKNGLFGNLIALSLGLTPNFKSNFDLAEDAKLQLSKDTYDDDLDNLLAQIGDQYADLFLAAKNLSDAILLSDILRVNTEITKAPLSASMIKRYDEHHQDLTLLKALVRQQLPEKYKEIFFDQSKNGYAGYIDGGASQEEFYKFIKPILEKMDGTEELLVKLNREDLLRKQRTFDNGSIPHQIHLGELHAILRRQEDFYPFLKDNREKIEKILTFRIPYYVGPLARGNSRFAWMTRKSEETITPWNFEEVVDKGASAQSFIERMTNFDKNLPNEKVLPKHSLLYEYFTVYNELTKVKYVTEGMRKPAFLSGEQKKAIVDLLFKTNRKVTVKQLKEDYFKKIECFDSVEISGVEDRFNASLGTYHDLLKIIKDKDFLDNEENEDILEDIVLTLTLFEDREMIEERLKTYAHLFDDKVMKQLKRRRYTGWGRLSRKLINGIRDKQSGKTILDFLKSDGFANRNFMQLIHDDSLTFKEDIQKAQVSGQGDSLHEHIANLAGSPAIKKGILQTVKVVDELVKVMGRHKPENIVIEMARENQTTQKGQKNSRERMKRIEEGIKELGSQILKEHPVENTQLQNEKLYLYYLQNGRDMYVDQELDINRLSDYDVDHIVPQSFLKDDSIDNKVLTRSDKARGKSDNVPSEEVVKKMKNYWRQLLNAKLITQRKFDNLTKAERGGLSELDKAGFIKRQLVETRQITKHVAQILDSRMNTKYDENDKLIREVKVITLKSKLVSDFRKDFQFYKVREINNYHHAHDAYLNAVVGTALIKKYPKLESEFVYGDYKVYDVRKMIAKSEQEIGKATAKYFFYSNIMNFFKTEITLANGEIRKRPLIETNGETGEIVWDKGRDFATVRKVLSMPQVNIVKKTEVQTGGFSKESILPKRNSDKLIARKKDWDPKKYGGFDSPTVAYSVLVVAKVEKGKSKKLKSVKELLGITIMERSSFEKNPIDFLEAKGYKEVKKDLIIKLPKYSLFELENGRKRMLASAGELQKGNELALPSKYVNFLYLASHYEKLKGSPEDNEQKQLFVEQHKHYLDEIIEQISEFSKRVILADANLDKVLSAYNKHRDKPIREQAENIIHLFTLTNLGAPAAFKYFDTTIDRKRYTSTKEVLDATLIHQSITGLYETRIDLSQLGGDGGGSSGSSGSSGSSGSSGGTLNIEDEHRLHETSKEPDVSLGSTWLSDFPQAWAETGGMGLAVRQAPLIIPLKATSTPVSIKQYPMSQEARLGIKPHIQRLLDQGILVPCQSPWNTPLLPVKKPGTNDYRPVQDLREVNKRVEDIHPTVPNPYNLLSGLPPSHQWYTVLDLKDAFFCLRLHPTSQPLFAFEWRDPEMGISGQLTWTRLPQGFKNSPTLFNEALHRDLADFRIQHPDLILLQYVDDLLLAATSELDCQQGTRALLQTLGNLGYRASAKKAQICQKQVKYLGYLLKEGQRWLTEARKETVMGQPTPKTPRQLREFLGTAGFCRLWIPGFAEMAAPLYPLTKPGTLFNWGPDQQKAYQEIKQALLTAPALGLPDLTKPFELFVDEKQGYAKGVLTQKLGPWRRPVAYLSKKLDPVAAGWPPCLRMVAAIAVLTKDAGKLTMGQPLVILAPHAVEALVKQPPDRWLSNARMTHYQALLLDTDRVQFGPVVALNPATLLPLPEEGLQHNCLDILAEAHGTRPDLTDQPLPDADHTWYTDGSSLLQEGQRKAGAAVTTETEVIWAKALPAGTSAQRAELIALTQALKMAEGKKLNVYTDSRYAFATAHIHGEIYRRRGWLTSEGKEIKNKDEILALLKALFLPKRLSIIHCPGHQKGHSAEARGNRMADQAARKAAITETPDTSTLLAGKRTADGSEFEKRTADGSEFESPKKKAKVE

SEQ ID NO: 2999 - protein, 2096 aa, synthetic construct; identical to SEQ ID NO: 2719

SEQ ID NO: 3000 - protein, 2088 aa, synthetic construct
MPAAKRVKLDGGDKKYSIGLDIGTNSVGWAVITDEYKVPSKKFKVLGNTDRHSIKKNLIGALLFDSGETAEATRLKRTARRRYTRRKNRICYLQEIFSNEMAKVDDSFFHRLEESFLVEEDKKHERHPIFGNIVDEVAYHEKYPTIYHLRKKLVDSTDKADLRLIYLALAHMIKFRGHFLIEGDLNPDNSDVDKLFIQLVQTYNQLFEENPINASGVDAKAILSARLSKSRRLENLIAQLPGEKKNGLFGNLIALSLGLTPNFKSNFDLAEDAKLQLSKDTYDDDLDNLLAQIGDQYADLFLAAKNLSDAILLSDILRVNTEITKAPLSASMIKRYDEHHQDLTLLKALVRQQLPEKYKEIFFDQSKNGYAGYIDGGASQEEFYKFIKPILEKMDGTEELLVKLNREDLLRKQRTFDNGSIPHQIHLGELHAILRRQEDFYPFLKDNREKIEKILTFRIPYYVGPLARGNSRFAWMTRKSEETITPWNFEEVVDKGASAQSFIERMTNFDKNLPNEKVLPKHSLLYEYFTVYNELTKVKYVTEGMRKPAFLSGEQKKAIVDLLFKTNRKVTVKQLKEDYFKKIECFDSVEISGVEDRFNASLGTYHDLLKIIKDKDFLDNEENEDILEDIVLTLTLFEDREMIEERLKTYAHLFDDKVMKQLKRRRYTGWGRLSRKLINGIRDKQSGKTILDFLKSDGFANRNFMQLIHDDSLTFKEDIQKAQVSGQGDSLHEHIANLAGSPAIKKGILQTVKVVDELVKVMGRHKPENIVIEMARENQTTQKGQKNSRERMKRIEEGIKELGSQILKEHPVENTQLQNEKLYLYYLQNGRDMYVDQELDINRLSDYDVDHIVPQSFLKDDSIDNKVLTRSDKARGKSDNVPSEEVVKKMKNYWRQLLNAKLITQRKFDNLTKAERGGLSELDKAGFIKRQLVETRQITKHVAQILDSRMNTKYDENDKLIREVKVITLKSKLVSDFRKDFQFYKVREINNYHHAHDAYLNAVVGTALIKKYPKLESEFVYGDYKVYDVRKMIAKSEQEIGKATAKYFFYSNIMNFFKTEITLANGEIRKRPLIETNGETGEIVWDKGRDFATVRKVLSMPQVNIVKKTEVQTGGFSKESILPKRNSDKLIARKKDWDPKKYGGFDSPTVAYSVLVVAKVEKGKSKKLKSVKELLGITIMERSSFEKNPIDFLEAKGYKEVKKDLIIKLPKYSLFELENGRKRMLASAGELQKGNELALPSKYVNFLYLASHYEKLKGSPEDNEQKQLFVEQHKHYLDEIIEQISEFSKRVILADANLDKVLSAYNKHRDKPIREQAENIIHLFTLTNLGAPAAFKYFDTTIDRKRYTSTKEVLDATLIHQSITGLYETRIDLSQLGGDGGGGSGGTLNIEDEHRLHETSKEPDVSLGSTWLSDFPQAWAETGGMGLAVRQAPLIIPLKATSTPVSIKQYPMSQEARLGIKPHIQRLLDQGILVPCQSPWNTPLLPVKKPGTNDYRPVQDLREVNKRVEDIHPTVPNPYNLLSGLPPSHQWYTVLDLKDAFFCLRLHPTSQPLFAFEWRDPEMGISGQLTWTRLPQGFKNSPTLFNEALHRDLADFRIQHPDLILLQYVDDLLLAATSELDCQQGTRALLQTLGNLGYRASAKKAQICQKQVKYLGYLLKEGQRWLTEARKETVMGQPTPKTPRQLREFLGTAGFCRLWIPGFAEMAAPLYPLTKPGTLFNWGPDQQKAYQEIKQALLTAPALGLPDLTKPFELFVDEKQGYAKGVLTQKLGPWRRPVAYLSKKLDPVAAGWPPCLRMVAAIAVLTKDAGKLTMGQPLVILAPHAVEALVKQPPDRWLSNARMTHYQALLLDTDRVQFGPVVALNPATLLPLPEEGLQHNCLDILAEAHGTRPDLTDQPLPDADHTWYTDGSSLLQEGQRKAGAAVTTETEVIWAKALPAGTSAQRAELIALTQALKMAEGKKLNVYTDSRYAFATAHIHGEIYRRRGWLTSEGKEIKNKDEILALLKALFLPKRLSIIHCPGHQKGHSAEARGNRMADQAARKAAITETPDTSTLLAGKRTADGSEFEKRTADGSEFESPKKKAKVE

SEQ ID NO: 3001 - protein, 2100 aa, synthetic construct; identical to SEQ ID NO: 2725

SEQ ID NO: 3002 - protein, 2093 aa, synthetic construct; identical to SEQ ID NO: 2740

SEQ ID NO: 3003 - protein, 2094 aa, synthetic construct; identical to SEQ ID NO: 2752

SEQ ID NO: 3004 - protein, 2097 aa, synthetic construct; identical to SEQ ID NO: 2763

SEQ ID NO: 3005 - protein, 2096 aa, synthetic construct
MPAAKRVKLDGGDKKYSIGLDIGTNSVGWAVITDEYKVPSKKFKVLGNTDRHSIKKNLIGALLFDSGETAEATRLKRTARRRYTRRKNRICYLQEIFSNEMAKVDDSFFHRLEESFLVEEDKKHERHPIFGNIVDEVAYHEKYPTIYHLRKKLVDSTDKADLRLIYLALAHMIKFRGHFLIEGDLNPDNSDVDKLFIQLVQTYNQLFEENPINASGVDAKAILSARLSKSRRLENLIAQLPGEKKNGLFGNLIALSLGLTPNFKSNFDLAEDAKLQLSKDTYDDDLDNLLAQIGDQYADLFLAAKNLSDAILLSDILRVNTEITKAPLSASMIKRYDEHHQDLTLLKALVRQQLPEKYKEIFFDQSKNGYAGYIDGGASQEEFYKFIKPILEKMDGTEELLVKLNREDLLRKQRTFDNGSIPHQIHLGELHAILRRQEDFYPFLKDNREKIEKILTFRIPYYVGPLARGNSRFAWMTRKSEETITPWNFEEVVDKGASAQSFIERMTNFDKNLPNEKVLPKHSLLYEYFTVYNELTKVKYVTEGMRKPAFLSGEQKKAIVDLLFKTNRKVTVKQLKEDYFKKIECFDSVEISGVEDRFNASLGTYHDLLKIIKDKDFLDNEENEDILEDIVLTLTLFEDREMIEERLKTYAHLFDDKVMKQLKRRRYTGWGRLSRKLINGIRDKQSGKTILDFLKSDGFANRNFMQLIHDDSLTFKEDIQKAQVSGQGDSLHEHIANLAGSPAIKKGILQTVKVVDELVKVMGRHKPENIVIEMARENQTTQKGQKNSRERMKRIEEGIKELGSQILKEHPVENTQLQNEKLYLYYLQNGRDMYVDQELDINRLSDYDVDHIVPQSFLKDDSIDNKVLTRSDKARGKSDNVPSEEVVKKMKNYWRQLLNAKLITQRKFDNLTKAERGGLSELDKAGFIKRQLVETRQITKHVAQILDSRMNTKYDENDKLIREVKVITLKSKLVSDFRKDFQFYKVREINNYHHAHDAYLNAVVGTALIKKYPKLESEFVYGDYKVYDVRKMIAKSEQEIGKATAKYFFYSNIMNFFKTEITLANGEIRKRPLIETNGETGEIVWDKGRDFATVRKVLSMPQVNIVKKTEVQTGGFSKESILPKRNSDKLIARKKDWDPKKYGGFDSPTVAYSVLVVAKVEKGKSKKLKSVKELLGITIMERSSFEKNPIDFLEAKGYKEVKKDLIIKLPKYSLFELENGRKRMLASAGELQKGNELALPSKYVNFLYLASHYEKLKGSPEDNEQKQLFVEQHKHYLDEIIEQISEFSKRVILADANLDKVLSAYNKHRDKPIREQAENIIHLFTLTNLGAPAAFKYFDTTIDRKRYTSTKEVLDATLIHQSITGLYETRIDLSQLGGDGGEAAAKPAPGSSGGTLNIEDEHRLHETSKEPDVSLGSTWLSDFPQAWAETGGMGLAVRQAPLIIPLKATSTPVSIKQYPMSQEARLGIKPHIQRLLDQGILVPCQSPWNTPLLPVKKPGTNDYRPVQDLREVNKRVEDIHPTVPNPYNLLSGLPPSHQWYTVLDLKDAFFCLRLHPTSQPLFAFEWRDPEMGISGQLTWTRLPQGFKNSPTLFNEALHRDLADFRIQHPDLILLQYVDDLLLAATSELDCQQGTRALLQTLGNLGYRASAKKAQICQKQVKYLGYLLKEGQRWLTEARKETVMGQPTPKTPRQLREFLGTAGFCRLWIPGFAEMAAPLYPLTKPGTLFNWGPDQQKAYQEIKQALLTAPALGLPDLTKPFELFVDEKQGYAKGVLTQKLGPWRRPVAYLSKKLDPVAAGWPPCLRMVAAIAVLTKDAGKLTMGQPLVILAPHAVEALVKQPPDRWLSNARMTHYQALLLDTDRVQFGPVVALNPATLLPLPEEGLQHNCLDILAEAHGTRPDLTDQPLPDADHTWYTDGSSLLQEGQRKAGAAVTTETEVIWAKALPAGTSAQRAELIALTQALKMAEGKKLNVYTDSRYAFATAHIHGEIYRRRGWLTSEGKEIKNKDEILALLKALFLPKRLSIIHCPGHQKGHSAEARGNRMADQAARKAAITETPDTSTLLAGKRTADGSEFEKRTADGSEFESPKKKAKVE

SEQ ID NO: 3006 - protein, 2089 aa, synthetic construct
MPAAKRVKLDGGDKKYSIGLDIGTNSVGWAVITDEYKVPSKKFKVLGNTDRHSIKKNLIGALLFDSGETAEATRLKRTARRRYTRRKNRICYLQEIFSNEMAKVDDSFFHRLEESFLVEEDKKHERHPIFGNIVDEVAYHEKYPTIYHLRKKLVDSTDKADLRLIYLALAHMIKFRGHFLIEGDLNPDNSDVDKLFIQLVQTYNQLFEENPINASGVDAKAILSARLSKSRRLENLIAQLPGEKKNGLFGNLIALSLGLTPNFKSNFDLAEDAKLQLSKDTYDDDLDNLLAQIGDQYADLFLAAKNLSDAILLSDILRVNTEITKAPLSASMIKRYDEHHQDLTLLKALVRQQLPEKYKEIFFDQSKNGYAGYIDGGASQEEFYKFIKPILEKMDGTEELLVKLNREDLLRKQRTFDNGSIPHQIHLGELHAILRRQEDFYPFLKDNREKIEKILTFRIPYYVGPLARGNSRFAWMTRKSEETITPWNFEEVVDKGASAQSFIERMTNFDKNLPNEKVLPKHSLLYEYFTVYNELTKVKYVTEGMRKPAFLSGEQKKAIVDLLFKTNRKVTVKQLKEDYFKKIECFDSVEISGVEDRFNASLGTYHDLLKIIKDKDFLDNEENEDILEDIVLTLTLFEDREMIEERLKTYAHLFDDKVMKQLKRRRYTGWGRLSRKLINGIRDKQSGKTILDFLKSDGFANRNFMQLIHDDSLTFKEDIQKAQVSGQGDSLHEHIANLAGSPAIKKGILQTVKVVDELVKVMGRHKPENIVIEMARENQTTQKGQKNSRERMKRIEEGIKELGSQILKEHPVENTQLQNEKLYLYYLQNGRDMYVDQELDINRLSDYDVDHIVPQSFLKDDSIDNKVLTRSDKARGKSDNVPSEEVVKKMKNYWRQLLNAKLITQRKFDNLTKAERGGLSELDKAGFIKRQLVETRQITKHVAQILDSRMNTKYDENDKLIREVKVITLKSKLVSDFRKDFQFYKVREINNYHHAHDAYLNAVVGTALIKKYPKLESEFVYGDYKVYDVRKMIAKSEQEIGKATAKYFFYSNIMNFFKTEITLANGEIRKRPLIETNGETGEIVWDKGRDFATVRKVLSMPQVNIVKKTEVQTGGFSKESILPKRNSDKLIARKKDWDPKKYGGFDSPTVAYSVLVVAKVEKGKSKKLKSVKELLGITIMERSSFEKNPIDFLEAKGYKEVKKDLIIKLPKYSLFELENGRKRMLASAGELQKGNELALPSKYVNFLYLASHYEKLKGSPEDNEQKQLFVEQHKHYLDEIIEQISEFSKRVILADANLDKVLSAYNKHRDKPIREQAENIIHLFTLTNLGAPAAFKYFDTTIDRKRYTSTKEVLDATLIHQSITGLYETRIDLSQLGGDGGGGGGGGTLNIEDEHRLHETSKEPDVSLGSTWLSDFPQAWAETGGMGLAVRQAPLIIPLKATSTPVSIKQYPMSQEARLGIKPHIQRLLDQGILVPCQSPWNTPLLPVKKPGTNDYRPVQDLREVNKRVEDIHPTVPNPYNLLSGLPPSHQWYTVLDLKDAFFCLRLHPTSQPLFAFEWRDPEMGISGQLTWTRLPQGFKNSPTLFNEALHRDLADFRIQHPDLILLQYVDDLLLAATSELDCQQGTRALLQTLGNLGYRASAKKAQICQKQVKYLGYLLKEGQRWLTEARKETVMGQPTPKTPRQLREFLGTAGFCRLWIPGFAEMAAPLYPLTKPGTLFNWGPDQQKAYQEIKQALLTAPALGLPDLTKPFELFVDEKQGYAKGVLTQKLGPWRRPVAYLSKKLDPVAAGWPPCLRMVAAIAVLTKDAGKLTMGQPLVILAPHAVEALVKQPPDRWLSNARMTHYQALLLDTDRVQFGPVVALNPATLLPLPEEGLQHNCLDILAEAHGTRPDLTDQPLPDADHTWYTDGSSLLQEGQRKAGAAVTTETEVIWAKALPAGTSAQRAELIALTQALKMAEGKKLNVYTDSRYAFATAHIHGEIYRRRGWLTSEGKEIKNKDEILALLKALFLPKRLSIIHCPGHQKGHSAEARGNRMADQAARKAAITETPDTSTLLAGKRTADGSEFEKRTADGSEFESPKKKAKVE

SEQ ID NO: 3007 - protein, 2096 aa, synthetic construct; identical to SEQ ID NO: 2748

SEQ ID NO: 3008 - protein, 2090 aa, synthetic construct; identical to SEQ ID NO: 2730

SEQ ID NO: 3009 - protein, 2096 aa, synthetic construct
MPAAKRVKLDGGDKKYSIGLDIGTNSVGWAVITDEYKVPSKKFKVLGNTDRHSIKKNLIGALLFDSGETAEATRLKRTARRRYTRRKNRICYLQEIFSNEMAKVDDSFFHRLEESFLVEEDKKHERHPIFGNIVDEVAYHEKYPTIYHLRKKLVDSTDKADLRLIYLALAHMIKFRGHFLIEGDLNPDNSDVDKLFIQLVQTYNQLFEENPINASGVDAKAILSARLSKSRRLENLIAQLPGEKKNGLFGNLIALSLGLTPNFKSNFDLAEDAKLQLSKDTYDDDLDNLLAQIGDQYADLFLAAKNLSDAILLSDILRVNTEITKAPLSASMIKRYDEHHQDLTLLKALVRQQLPEKYKEIFFDQSKNGYAGYIDGGASQEEFYKFIKPILEKMDGTEELLVKLNREDLLRKQRTFDNGSIPHQIHLGELHAILRRQEDFYPFLKDNREKIEKILTFRIPYYVGPLARGNSRFAWMTRKSEETITPWNFEEVVDKGASAQSFIERMTNFDKNLPNEKVLPKHSLLYEYFTVYNELTKVKYVTEGMRKPAFLSGEQKKAIVDLLFKTNRKVTVKQLKEDYFKKIECFDSVEISGVEDRFNASLGTYHDLLKIIKDKDFLDNEENEDILEDIVLTLTLFEDREMIEERLKTYAHLFDDKVMKQLKRRRYTGWGRLSRKLINGIRDKQSGKTILDFLKSDGFANRNFMQLIHDDSLTFKEDIQKAQVSGQGDSLHEHIANLAGSPAIKKGILQTVKVVDELVKVMGRHKPENIVIEMARENQTTQKGQKNSRERMKRIEEGIKELGSQILKEHPVENTQLQNEKLYLYYLQNGRDMYVDQELDINRLSDYDVDHIVPQSFLKDDSIDNKVLTRSDKARGKSDNVPSEEVVKKMKNYWRQLLNAKLITQRKFDNLTKAERGGLSELDKAGFIKRQLVETRQITKHVAQILDSRMNTKYDENDKLIREVKVITLKSKLVSDFRKDFQFYKVREINNYHHAHDAYLNAVVGTALIKKYPKLESEFVYGDYKVYDVRKMIAKSEQEIGKATAKYFFYSNIMNFFKTEITLANGEIRKRPLIETNGETGEIVWDKGRDFATVRKVLSMPQVNIVKKTEVQTGGFSKESILPKRNSDKLIARKKDWDPKKYGGFDSPTVAYSVLVVAKVEKGKSKKLKSVKELLGITIMERSSFEKNPIDFLEAKGYKEVKKDLIIKLPKYSLFELENGRKRMLASAGELQKGNELALPSKYVNFLYLASHYEKLKGSPEDNEQKQLFVEQHKHYLDEIIEQISEFSKRVILADANLDKVLSAYNKHRDKPIREQAENIIHLFTLTNLGAPAAFKYFDTTIDRKRYTSTKEVLDATLIHQSITGLYETRIDLSQLGGDGGPAPEAAAKGGGGGTLNIEDEHRLHETSKEPDVSLGSTWLSDFPQAWAETGGMGLAVRQAPLIIPLKATSTPVSIKQYPMSQEARLGIKPHIQRLLDQGILVPCQSPWNTPLLPVKKPGTNDYRPVQDLREVNKRVEDIHPTVPNPYNLLSGLPPSHQWYTVLDLKDAFFCLRLHPTSQPLFAFEWRDPEMGISGQLTWTRLPQGFKNSPTLFNEALHRDLADFRIQHPDLILLQYVDDLLLAATSELDCQQGTRALLQTLGNLGYRASAKKAQICQKQVKYLGYLLKEGQRWLTEARKETVMGQPTPKTPRQLREFLGTAGFCRLWIPGFAEMAAPLYPLTKPGTLFNWGPDQQKAYQEIKQALLTAPALGLPDLTKPFELFVDEKQGYAKGVLTQKLGPWRRPVAYLSKKLDPVAAGWPPCLRMVAAIAVLTKDAGKLTMGQPLVILAPHAVEALVKQPPDRWLSNARMTHYQALLLDTDRVQFGPVVALNPATLLPLPEEGLQHNCLDILAEAHGTRPDLTDQPLPDADHTWYTDGSSLLQEGQRKAGAAVTTETEVIWAKALPAGTSAQRAELIALTQALKMAEGKKLNVYTDSRYAFATAHIHGEIYRRRGWLTSEGKEIKNKDEILALLKALFLPKRLSIIHCPGHQKGHSAEARGNRMADQAARKAAITETPDTSTLLAGKRTADGSEFEKRTADGSEFESPKKKAKVE

SEQ ID NO: 3010 - protein, 2101 aa, synthetic construct
MPAAKRVKLDGGDKKYSIGLDIGTNSVGWAVITDEYKVPSKKFKVLGNTDRHSIKKNLIGALLFDSGETAEATRLKRTARRRYTRRKNRICYLQEIFSNEMAKVDDSFFHRLEESFLVEEDKKHERHPIFGNIVDEVAYHEKYPTIYHLRKKLVDSTDKADLRLIYLALAHMIKFRGHFLIEGDLNPDNSDVDKLFIQLVQTYNQLFEENPINASGVDAKAILSARLSKSRRLENLIAQLPGEKKNGLFGNLIALSLGLTPNFKSNFDLAEDAKLQLSKDTYDDDLDNLLAQIGDQYADLFLAAKNLSDAILLSDILRVNTEITKAPLSASMIKRYDEHHQDLTLLKALVRQQLPEKYKEIFFDQSKNGYAGYIDGGASQEEFYKFIKPILEKMDGTEELLVKLNREDLLRKQRTFDNGSIPHQIHLGELHAILRRQEDFYPFLKDNREKIEKILTFRIPYYVGPLARGNSRFAWMTRKSEETITPWNFEEVVDKGASAQSFIERMTNFDKNLPNEKVLPKHSLLYEYFTVYNELTKVKYVTEGMRKPAFLSGEQKKAIVDLLFKTNRKVTVKQLKEDYFKKIECFDSVEISGVEDRFNASLGTYHDLLKIIKDKDFLDNEENEDILEDIVLTLTLFEDREMIEERLKTYAHLFDDKVMKQLKRRRYTGWGRLSRKLINGIRDKQSGKTILDFLKSDGFANRNFMQLIHDDSLTFKEDIQKAQVSGQGDSLHEHIANLAGSPAIKKGILQTVKVVDELVKVMGRHKPENIVIEMARENQTTQKGQKNSRERMKRIEEGIKELGSQILKEHPVENTQLQNEKLYLYYLQNGRDMYVDQELDINRLSDYDVDHIVPQSFLKDDSIDNKVLTRSDKARGKSDNVPSEEVVKKMKNYWRQLLNAKLITQRKFDNLTKAERGGLSELDKAGFIKRQLVETRQITKHVAQILDSRMNTKYDENDKLIREVKVITLKSKLVSDFRKDFQFYKVREINNYHHAHDAYLNAVVGTALIKKYPKLESEFVYGDYKVYDVRKMIAKSEQEIGKATAKYFFYSNIMNFFKTEITLANGEIRKRPLIETNGETGEIVWDKGRDFATVRKVLSMPQVNIVKKTEVQTGGFSKESILPKRNSDKLIARKKDWDPKKYGGFDSPTVAYSVLVVAKVEKGKSKKLKSVKELLGITIMERSSFEKNPIDFLEAKGYKEVKKDLIIKLPKYSLFELENGRKRMLASAGELQKGNELALPSKYVNFLYLASHYEKLKGSPEDNEQKQLFVEQHKHYLDEIIEQISEFSKRVILADANLDKVLSAYNKHRDKPIREQAENIIHLFTLTNLGAPAAFKYFDTTIDRKRYTSTKEVLDATLIHQSITGLYETRIDLSQLGGDGGSGSETPGTSESATPESGGTLNIEDEHRLHETSKEPDVSLGSTWLSDFPQAWAETGGMGLAVRQAPLIIPLKATSTPVSIKQYPMSQEARLGIKPHIQRLLDQGILVPCQSPWNTPLLPVKKPGTNDYRPVQDLREVNKRVEDIHPTVPNPYNLLSGLPPSHQWYTVLDLKDAFFCLRLHPTSQPLFAFEWRDPEMGISGQLTWTRLPQGFKNSPTLFNEALHRDLADFRIQHPDLILLQYVDDLLLAATSELDCQQGTRALLQTLGNLGYRASAKKAQICQKQVKYLGYLLKEGQRWLTEARKETVMGQPTPKTPRQLREFLGTAGFCRLWIPGFAEMAAPLYPLTKPGTLFNWGPDQQKAYQEIKQALLTAPALGLPDLTKPFELFVDEKQGYAKGVLTQKLGPWRRPVAYLSKKLDPVAAGWPPCLRMVAAIAVLTKDAGKLTMGQPLVILAPHAVEALVKQPPDRWLSNARMTHYQALLLDTDRVQFGPVVALNPATLLPLPEEGLQHNCLDILAEAHGTRPDLTDQPLPDADHTWYTDGSSLLQEGQRKAGAAVTTETEVIWAKALPAGTSAQRAELIALTQALKMAEGKKLNVYTDSRYAFATAHIHGEIYRRRGWLTSEGKEIKNKDEILALLKALFLPKRLSIIHCPGHQKGHSAEARGNRMADQAARKAAITETPDTSTLLAGKRTADGSEFEKRTADGSEFESPKKKAKVE

SEQ ID NO: 3011 - protein, 2091 aa, synthetic construct
MPAAKRVKLDGGDKKYSIGLDIGTNSVGWAVITDEYKVPSKKFKVLGNTDRHSIKKNLIGALLFDSGETAEATRLKRTARRRYTRRKNRICYLQEIFSNEMAKVDDSFFHRLEESFLVEEDKKHERHPIFGNIVDEVAYHEKYPTIYHLRKKLVDSTDKADLRLIYLALAHMIKFRGHFLIEGDLNPDNSDVDKLFIQLVQTYNQLFEENPINASGVDAKAILSARLSKSRRLENLIAQLPGEKKNGLFGNLIALSLGLTPNFKSNFDLAEDAKLQLSKDTYDDDLDNLLAQIGDQYADLFLAAKNLSDAILLSDILRVNTEITKAPLSASMIKRYDEHHQDLTLLKALVRQQLPEKYKEIFFDQSKNGYAGYIDGGASQEEFYKFIKPILEKMDGTEELLVKLNREDLLRKQRTFDNGSIPHQIHLGELHAILRRQEDFYPFLKDNREKIEKILTFRIPYYVGPLARGNSRFAWMTRKSEETITPWNFEEVVDKGASAQSFIERMTNFDKNLPNEKVLPKHSLLYEYFTVYNELTKVKYVTEGMRKPAFLSGEQKKAIVDLLFKTNRKVTVKQLKEDYFKKIECFDSVEISGVEDRFNASLGTYHDLLKIIKDKDFLDNEENEDILEDIVLTLTLFEDREMIEERLKTYAHLFDDKVMKQLKRRRYTGWGRLSRKLINGIRDKQSGKTILDFLKSDGFANRNFMQLIHDDSLTFKEDIQKAQVSGQGDSLHEHIANLAGSPAIKKGILQTVKVVDELVKVMGRHKPENIVIEMARENQTTQKGQKNSRERMKRIEEGIKELGSQILKEHPVENTQLQNEKLYLYYLQNGRDMYVDQELDINRLSDYDVDHIVPQSFLKDDSIDNKVLTRSDKARGKSDNVPSEEVVKKMKNYWRQLLNAKLITQRKFDNLTKAERGGLSELDKAGFIKRQLVETRQITKHVAQILDSRMNTKYDENDKLIREVKVITLKSKLVSDFRKDFQFYKVREINNYHHAHDAYLNAVVGTALIKKYPKLESEFVYGDYKVYDVRKMIAKSEQEIGKATAKYFFYSNIMNFFKTEITLANGEIRKRPLIETNGETGEIVWDKGRDFATVRKVLSMPQVNIVKKTEVQTGGFSKESILPKRNSDKLIARKKDWDPKKYGGFDSPTVAYSVLVVAKVEKGKSKKLKSVKELLGITIMERSSFEKNPIDFLEAKGYKEVKKDLIIKLPKYSLFELENGRKRMLASAGELQKGNELALPSKYVNFLYLASHYEKLKGSPEDNEQKQLFVEQHKHYLDEIIEQISEFSKRVILADANLDKVLSAYNKHRDKPIREQAENIIHLFTLTNLGAPAAFKYFDTTIDRKRYTSTKEVLDATLIHQSITGLYETRIDLSQLGGDGGGGSGSSGGTLNIEDEHRLHETSKEPDVSLGSTWLSDFPQAWAETGGMGLAVRQAPLIIPLKATSTPVSIKQYPMSQEARLGIKPHIQRLLDQGILVPCQSPWNTPLLPVKKPGTNDYRPVQDLREVNKRVEDIHPTVPNPYNLLSGLPPSHQWYTVLDLKDAFFCLRLHPTSQPLFAFEWRDPEMGISGQLTWTRLPQGFKNSPTLFNEALHRDLADFRIQHPDLILLQYVDDLLLAATSELDCQQGTRALLQTLGNLGYRASAKKAQICQKQVKYLGYLLKEGQRWLTEARKETVMGQPTPKTPRQLREFLGTAGFCRLWIPGFAEMAAPLYPLTKPGTLFNWGPDQQKAYQEIKQALLTAPALGLPDLTKPFELFVDEKQGYAKGVLTQKLGPWRRPVAYLSKKLDPVAAGWPPCLRMVAAIAVLTKDAGKLTMGQPLVILAPHAVEALVKQPPDRWLSNARMTHYQALLLDTDRVQFGPVVALNPATLLPLPEEGLQHNCLDILAEAHGTRPDLTDQPLPDADHTWYTDGSSLLQEGQRKAGAAVTTETEVIWAKALPAGTSAQRAELIALTQALKMAEGKKLNVYTDSRYAFATAHIHGEIYRRRGWLTSEGKEIKNKDEILALLKALFLPKRLSIIHCPGHQKGHSAEARGNRMADQAARKAAITETPDTSTLLAGKRTADGSEFEKRTADGSEFESPKKKAKVE

SEQ ID NO: 3012 - protein, 2096 aa, synthetic construct; identical to SEQ ID NO: 2758

SEQ ID NO: 3013 - protein, 2094 aa, synthetic construct
MPAAKRVKLDGGDKKYSIGLDIGTNSVGWAVITDEYKVPSKKFKVLGNTDRHSIKKNLIGALLFDSGETAEATRLKRTARRRYTRRKNRICYLQEIFSNEMAKVDDSFFHRLEESFLVEEDKKHERHPIFGNIVDEVAYHEKYPTIYHLRKKLVDSTDKADLRLIYLALAHMIKFRGHFLIEGDLNPDNSDVDKLFIQLVQTYNQLFEENPINASGVDAKAILSARLSKSRRLENLIAQLPGEKKNGLFGNLIALSLGLTPNFKSNFDLAEDAKLQLSKDTYDDDLDNLLAQIGDQYADLFLAAKNLSDAILLSDILRVNTEITKAPLSASMIKRYDEHHQDLTLLKALVRQQLPEKYKEIFFDQSKNGYAGYIDGGASQEEFYKFIKPILEKMDGTEELLVKLNREDLLRKQRTFDNGSIPHQIHLGELHAILRRQEDFYPFLKDNREKIEKILTFRIPYYVGPLARGNSRFAWMTRKSEETITPWNFEEVVDKGASAQSFIERMTNFDKNLPNEKVLPKHSLLYEYFTVYNELTKVKYVTEGMRKPAFLSGEQKKAIVDLLFKTNRKVTVKQLKEDYFKKIECFDSVEISGVEDRFNASLGTYHDLLKIIKDKDFLDNEENEDILEDIVLTLTLFEDREMIEERLKTYAHLFDDKVMKQLKRRRYTGWGRLSRKLINGIRDKQSGKTILDFLKSDGFANRNFMQLIHDDSLTFKEDIQKAQVSGQGDSLHEHIANLAGSPAIKKGILQTVKVVDELVKVMGRHKPENIVIEMARENQTTQKGQKNSRERMKRIEEGIKELGSQILKEHPVENTQLQNEKLYLYYLQNGRDMYVDQELDINRLSDYDVDHIVPQSFLKDDSIDNKVLTRSDKARGKSDNVPSEEVVKKMKNYWRQLLNAKLITQRKFDNLTKAERGGLSELDKAGFIKRQLVETRQITKHVAQILDSRMNTKYDENDKLIREVKVITLKSKLVSDFRKDFQFYKVREINNYHHAHDAYLNAVVGTALIKKYPKLESEFVYGDYKVYDVRKMIAKSEQEIGKATAKYFFYSNIMNFFKTEITLANGEIRKRPLIETNGETGEIVWDKGRDFATVRKVLSMPQVNIVKKTEVQTGGFSKESILPKRNSDKLIARKKDWDPKKYGGFDSPTVAYSVLVVAKVEKGKSKKLKSVKELLGITIMERSSFEKNPIDFLEAKGYKEVKKDLIIKLPKYSLFELENGRKRMLASAGELQKGNELALPSKYVNFLYLASHYEKLKGSPEDNEQKQLFVEQHKHYLDEIIEQISEFSKRVILADANLDKVLSAYNKHRDKPIREQAENIIHLFTLTNLGAPAAFKYFDTTIDRKRYTSTKEVLDATLIHQSITGLYETRIDLSQLGGDGGPAPGGSGGGGGTLNIEDEHRLHETSKEPDVSLGSTWLSDFPQAWAETGGMGLAVRQAPLIIPLKATSTPVSIKQYPMSQEARLGIKPHIQRLLDQGILVPCQSPWNTPLLPVKKPGTNDYRPVQDLREVNKRVEDIHPTVPNPYNLLSGLPPSHQWYTVLDLKDAFFCLRLHPTSQPLFAFEWRDPEMGISGQLTWTRLPQGFKNSPTLFNEALHRDLADFRIQHPDLILLQYVDDLLLAATSELDCQQGTRALLQTLGNLGYRASAKKAQICQKQVKYLGYLLKEGQRWLTEARKETVMGQPTPKTPRQLREFLGTAGFCRLWIPGFAEMAAPLYPLTKPGTLFNWGPDQQKAYQEIKQALLTAPALGLPDLTKPFELFVDEKQGYAKGVLTQKLGPWRRPVAYLSKKLDPVAAGWPPCLRMVAAIAVLTKDAGKLTMGQPLVILAPHAVEALVKQPPDRWLSNARMTHYQALLLDTDRVQFGPVVALNPATLLPLPEEGLQHNCLDILAEAHGTRPDLTDQPLPDADHTWYTDGSSLLQEGQRKAGAAVTTETEVIWAKALPAGTSAQRAELIALTQALKMAEGKKLNVYTDSRYAFATAHIHGEIYRRRGWLTSEGKEIKNKDEILALLKALFLPKRLSIIHCPGHQKGHSAEARGNRMADQAARKAAITETPDTSTLLAGKRTADGSEFEKRTADGSEFESPKKKAKVE

SEQ ID NO: 3014 - protein, 2096 aa, synthetic construct; identical to SEQ ID NO: 2714

SEQ ID NO: 3015 - protein, 2093 aa, synthetic construct; identical to SEQ ID NO: 2718

SEQ ID NO: 3016 - protein, 2094 aa, synthetic construct; identical to SEQ ID NO: 2762

SEQ ID NO: 3017 - protein, 2095 aa, synthetic construct; identical to SEQ ID NO: 2749

SEQ ID NO: 3018 - protein, 2096 aa, synthetic construct; identical to SEQ ID NO: 2721

SEQ ID NO: 3019 - protein, 2096 aa, synthetic construct; identical to SEQ ID NO: 2747

SEQ ID NO: 3020 - protein, 2096 aa, synthetic construct; identical to SEQ ID NO: 2755

SEQ ID NO: 3021 - protein, 2096 aa, synthetic construct
MPAAKRVKLDGGDKKYSIGLDIGTNSVGWAVITDEYKVPSKKFKVLGNTDRHSIKKNLIGALLFDSGETAEATRLKRTARRRYTRRKNRICYLQEIFSNEMAKVDDSFFHRLEESFLVEEDKKHERHPIFGNIVDEVAYHEKYPTIYHLRKKLVDSTDKADLRLIYLALAHMIKFRGHFLIEGDLNPDNSDVDKLFIQLVQTYNQLFEENPINASGVDAKAILSARLSKSRRLENLIAQLPGEKKNGLFGNLIALSLGLTPNFKSNFDLAEDAKLQLSKDTYDDDLDNLLAQIGDQYADLFLAAKNLSDAILLSDILRVNTEITKAPLSASMIKRYDEHHQDLTLLKALVRQQLPEKYKEIFFDQSKNGYAGYIDGGASQEEFYKFIKPILEKMDGTEELLVKLNREDLLRKQRTFDNGSIPHQIHLGELHAILRRQEDFYPFLKDNREKIEKILTFRIPYYVGPLARGNSRFAWMTRKSEETITPWNFEEVVDKGASAQSFIERMTNFDKNLPNEKVLPKHSLLYEYFTVYNELTKVKYVTEGMRKPAFLSGEQKKAIVDLLFKTNRKVTVKQLKEDYFKKIECFDSVEISGVEDRFNASLGTYHDLLKIIKDKDFLDNEENEDILEDIVLTLTLFEDREMIEERLKTYAHLFDDKVMKQLKRRRYTGWGRLSRKLINGIRDKQSGKTILDFLKSDGFANRNFMQLIHDDSLTFKEDIQKAQVSGQGDSLHEHIANLAGSPAIKKGILQTVKVVDELVKVMGRHKPENIVIEMARENQTTQKGQKNSRERMKRIEEGIKELGSQILKEHPVENTQLQNEKLYLYYLQNGRDMYVDQELDINRLSDYDVDHIVPQSFLKDDSIDNKVLTRSDKARGKSDNVPSEEVVKKMKNYWRQLLNAKLITQRKFDNLTKAERGGLSELDKAGFIKRQLVETRQITKHVAQILDSRMNTKYDENDKLIREVKVITLKSKLVSDFRKDFQFYKVREINNYHHAHDAYLNAVVGTALIKKYPKLESEFVYGDYKVYDVRKMIAKSEQEIGKATAKYFFYSNIMNFFKTEITLANGEIRKRPLIETNGETGEIVWDKGRDFATVRKVLSMPQVNIVKKTEVQTGGFSKESILPKRNSDKLIARKKDWDPKKYGGFDSPTVAYSVLVVAKVEKGKSKKLKSVKELLGITIMERSSFEKNPIDFLEAKGYKEVKKDLIIKLPKYSLFELENGRKRMLASAGELQKGNELALPSKYVNFLYLASHYEKLKGSPEDNEQKQLFVEQHKHYLDEIIEQISEFSKRVILADANLDKVLSAYNKHRDKPIREQAENIIHLFTLTNLGAPAAFKYFDTTIDRKRYTSTKEVLDATLIHQSITGLYETRIDLSQLGGDGGEAAAKGSSGGSGGTLNIEDEHRLHETSKEPDVSLGSTWLSDFPQAWAETGGMGLAVRQAPLIIPLKATSTPVSIKQYPMSQEARLGIKPHIQRLLDQGILVPCQSPWNTPLLPVKKPGTNDYRPVQDLREVNKRVEDIHPTVPNPYNLLSGLPPSHQWYTVLDLKDAFFCLRLHPTSQPLFAFEWRDPEMGISGQLTWTRLPQGFKNSPTLFNEALHRDLADFRIQHPDLILLQYVDDLLLAATSELDCQQGTRALLQTLGNLGYRASAKKAQICQKQVKYLGYLLKEGQRWLTEARKETVMGQPTPKTPRQLREFLGTAGFCRLWIPGFAEMAAPLYPLTKPGTLFNWGPDQQKAYQEIKQALLTAPALGLPDLTKPFELFVDEKQGYAKGVLTQKLGPWRRPVAYLSKKLDPVAAGWPPCLRMVAAIAVLTKDAGKLTMGQPLVILAPHAVEALVKQPPDRWLSNARMTHYQALLLDTDRVQFGPVVALNPATLLPLPEEGLQHNCLDILAEAHGTRPDLTDQPLPDADHTWYTDGSSLLQEGQRKAGAAVTTETEVIWAKALPAGTSAQRAELIALTQALKMAEGKKLNVYTDSRYAFATAHIHGEIYRRRGWLTSEGKEIKNKDEILALLKALFLPKRLSIIHCPGHQKGHSAEARGNRMADQAARKAAITETPDTSTLLAGKRTADGSEFEKRTADGSEFESPKKKAKVE

SEQ ID NO: 3022 - protein, 2094 aa, synthetic construct
MPAAKRVKLDGGDKKYSIGLDIGTNSVGWAVITDEYKVPSKKFKVLGNTDRHSIKKNLIGALLFDSGETAEATRLKRTARRRYTRRKNRICYLQEIFSNEMAKVDDSFFHRLEESFLVEEDKKHERHPIFGNIVDEVAYHEKYPTIYHLRKKLVDSTDKADLRLIYLALAHMIKFRGHFLIEGDLNPDNSDVDKLFIQLVQTYNQLFEENPINASGVDAKAILSARLSKSRRLENLIAQLPGEKKNGLFGNLIALSLGLTPNFKSNFDLAEDAKLQLSKDTYDDDLDNLLAQIGDQYADLFLAAKNLSDAILLSDILRVNTEITKAPLSASMIKRYDEHHQDLTLLKALVRQQLPEKYKEIFFDQSKNGYAGYIDGGASQEEFYKFIKPILEKMDGTEELLVKLNREDLLRKQRTFDNGSIPHQIHLGELHAILRRQEDFYPFLKDNREKIEKILTFRIPYYVGPLARGNSRFAWMTRKSEETITPWNFEEVVDKGASAQSFIERMTNFDKNLPNEKVLPKHSLLYEYFTVYNELTKVKYVTEGMRKPAFLSGEQKKAIVDLLFKTNRKVTVKQLKEDYFKKIECFDSVEISGVEDRFNASLGTYHDLLKIIKDKDFLDNEENEDILEDIVLTLTLFEDREMIEERLKTYAHLFDDKVMKQLKRRRYTGWGRLSRKLINGIRDKQSGKTILDFLKSDGFANRNFMQLIHDDSLTFKEDIQKAQVSGQGDSLHEHIANLAGSPAIKKGILQTVKVVDELVKVMGRHKPENIVIEMARENQTTQKGQKNSRERMKRIEEGIKELGSQILKEHPVENTQLQNEKLYLYYLQNGRDMYVDQELDINRLSDYDVDHIVPQSFLKDDSIDNKVLTRSDKARGKSDNVPSEEVVKKMKNYWRQLLNAKLITQRKFDNLTKAERGGLSELDKAGFIKRQLVETRQITKHVAQILDSRMNTKYDENDKLIREVKVITLKSKLVSDFRKDFQFYKVREINNYHHAHDAYLNAVVGTALIKKYPKLESEFVYGDYKVYDVRKMIAKSEQEIGKATAKYFFYSNIMNFFKTEITLANGEIRKRPLIETNGETGEIVWDKGRDFATVRKVLSMPQVNIVKKTEVQTGGFSKESILPKRNSDKLIARKKDWDPKKYGGFDSPTVAYSVLVVAKVEKGKSKKLKSVKELLGITIMERSSFEKNPIDFLEAKGYKEVKKDLIIKLPKYSLFELENGRKRMLASAGELQKGNELALPSKYVNFLYLASHYEKLKGSPEDNEQKQLFVEQHKHYLDEIIEQISEFSKRVILADANLDKVLSAYNKHRDKPIREQAENIIHLFTLTNLGAPAAFKYFDTTIDRKRYTSTKEVLDATLIHQSITGLYETRIDLSQLGGDGGGGGGSSGGSGGTLNIEDEHRLHETSKEPDVSLGSTWLSDFPQAWAETGGMGLAVRQAPLIIPLKATSTPVSIKQYPMSQEARLGIKPHIQRLLDQGILVPCQSPWNTPLLPVKKPGTNDYRPVQDLREVNKRVEDIHPTVPNPYNLLSGLPPSHQWYTVLDLKDAFFCLRLHPTSQPLFAFEWRDPEMGISGQLTWTRLPQGFKNSPTLFNEALHRDLADFRIQHPDLILLQYVDDLLLAATSELDCQQGTRALLQTLGNLGYRASAKKAQICQKQVKYLGYLLKEGQRWLTEARKETVMGQPTPKTPRQLREFLGTAGFCRLWIPGFAEMAAPLYPLTKPGTLFNWGPDQQKAYQEIKQALLTAPALGLPDLTKPFELFVDEKQGYAKGVLTQKLGPWRRPVAYLSKKLDPVAAGWPPCLRMVAAIAVLTKDAGKLTMGQPLVILAPHAVEALVKQPPDRWLSNARMTHYQALLLDTDRVQFGPVVALNPATLLPLPEEGLQHNCLDILAEAHGTRPDLTDQPLPDADHTWYTDGSSLLQEGQRKAGAAVTTETEVIWAKALPAGTSAQRAELIALTQALKMAEGKKLNVYTDSRYAFATAHIHGEIYRRRGWLTSEGKEIKNKDEILALLKALFLPKRLSIIHCPGHQKGHSAEARGNRMADQAARKAAITETPDTSTLLAGKRTADGSEFEKRTADGSEFESPKKKAKVE

SEQ ID NO: 3023 - protein, 2096 aa, synthetic construct; identical to SEQ ID NO: 2759

SEQ ID NO: 3024 - protein, 2092 aa, synthetic construct
MPAAKRVKLDGGDKKYSIGLDIGTNSVGWAVITDEYKVPSKKFKVLGNTDRHSIKKNLIGALLFDSGETAEATRLKRTARRRYTRRKNRICYLQEIFSNEMAKVDDSFFHRLEESFLVEEDKKHERHPIFGNIVDEVAYHEKYPTIYHLRKKLVDSTDKADLRLIYLALAHMIKFRGHFLIEGDLNPDNSDVDKLFIQLVQTYNQLFEENPINASGVDAKAILSARLSKSRRLENLIAQLPGEKKNGLFGNLIALSLGLTPNFKSNFDLAEDAKLQLSKDTYDDDLDNLLAQIGDQYADLFLAAKNLSDAILLSDILRVNTEITKAPLSASMIKRYDEHHQDLTLLKALVRQQLPEKYKEIFFDQSKNGYAGYIDGGASQEEFYKFIKPILEKMDGTEELLVKLNREDLLRKQRTFDNGSIPHQIHLGELHAILRRQEDFYPFLKDNREKIEKILTFRIPYYVGPLARGNSRFAWMTRKSEETITPWNFEEVVDKGASAQSFIERMTNFDKNLPNEKVLPKHSLLYEYFTVYNELTKVKYVTEGMRKPAFLSGEQKKAIVDLLFKTNRKVTVKQLKEDYFKKIECFDSVEISGVEDRFNASLGTYHDLLKIIKDKDFLDNEENEDILEDIVLTLTLFEDREMIEERLKTYAHLFDDKVMKQLKRRRYTGWGRLSRKLINGIRDKQSGKTILDFLKSDGFANRNFMQLIHDDSLTFKEDIQKAQVSGQGDSLHEHIANLAGSPAIKKGILQTVKVVDELVKVMGRHKPENIVIEMARENQTTQKGQKNSRERMKRIEEGIKELGSQILKEHPVENTQLQNEKLYLYYLQNGRDMYVDQELDINRLSDYDVDHIVPQSFLKDDSIDNKVLTRSDKARGKSDNVPSEEVVKKMKNYWRQLLNAKLITQRKFDNLTKAERGGLSELDKAGFIKRQLVETRQITKHVAQILDSRMNTKYDENDKLIREVKVITLKSKLVSDFRKDFQFYKVREINNYHHAHDAYLNAVVGTALIKKYPKLESEFVYGDYKVYDVRKMIAKSEQEIGKATAKYFFYSNIMNFFKTEITLANGEIRKRPLIETNGETGEIVWDKGRDFATVRKVLSMPQVNIVKKTEVQTGGFSKESILPKRNSDKLIARKKDWDPKKYGGFDSPTVAYSVLVVAKVEKGKSKKLKSVKELLGITIMERSSFEKNPIDFLEAKGYKEVKKDLIIKLPKYSLFELENGRKRMLASAGELQKGNELALPSKYVNFLYLASHYEKLKGSPEDNEQKQLFVEQHKHYLDEIIEQISEFSKRVILADANLDKVLSAYNKHRDKPIREQAENIIHLFTLTNLGAPAAFKYFDTTIDRKRYTSTKEVLDATLIHQSITGLYETRIDLSQLGGDGGGGGGGGGGGTLNIEDEHRLHETSKEPDVSLGSTWLSDFPQAWAETGGMGLAVRQAPLIIPLKATSTPVSIKQYPMSQEARLGIKPHIQRLLDQGILVPCQSPWNTPLLPVKKPGTNDYRPVQDLREVNKRVEDIHPTVPNPYNLLSGLPPSHQWYTVLDLKDAFFCLRLHPTSQPLFAFEWRDPEMGISGQLTWTRLPQGFKNSPTLFNEALHRDLADFRIQHPDLILLQYVDDLLLAATSELDCQQGTRALLQTLGNLGYRASAKKAQICQKQVKYLGYLLKEGQRWLTEARKETVMGQPTPKTPRQLREFLGTAGFCRLWIPGFAEMAAPLYPLTKPGTLFNWGPDQQKAYQEIKQALLTAPALGLPDLTKPFELFVDEKQGYAKGVLTQKLGPWRRPVAYLSKKLDPVAAGWPPCLRMVAAIAVLTKDAGKLTMGQPLVILAPHAVEALVKQPPDRWLSNARMTHYQALLLDTDRVQFGPVVALNPATLLPLPEEGLQHNCLDILAEAHGTRPDLTDQPLPDADHTWYTDGSSLLQEGQRKAGAAVTTETEVIWAKALPAGTSAQRAELIALTQALKMAEGKKLNVYTDSRYAFATAHIHGEIYRRRGWLTSEGKEIKNKDEILALLKALFLPKRLSIIHCPGHQKGHSAEARGNRMADQAARKAAITETPDTSTLLAGKRTADGSEFEKRTADGSEFESPKKKAKVE

SEQ ID NO: 3025 - protein, 2094 aa, synthetic construct; identical to SEQ ID NO: 2742

SEQ ID NO: 3026 - protein, 2094 aa, synthetic construct; identical to SEQ ID NO: 2715

SEQ ID NO: 3027 - protein, 2097 aa, synthetic construct; identical to SEQ ID NO: 2728

SEQ ID NO: 3028 - protein, 2091 aa, synthetic construct; identical to SEQ ID NO: 2743

SEQ ID NO: 3029 - protein, 2090 aa, synthetic construct
MPAAKRVKLDGGDKKYSIGLDIGTNSVGWAVITDEYKVPSKKFKVLGNTDRHSIKKNLIGALLFDSGETAEATRLKRTARRRYTRRKNRICYLQEIFSNEMAKVDDSFFHRLEESFLVEEDKKHERHPIFGNIVDEVAYHEKYPTIYHLRKKLVDSTDKADLRLIYLALAHMIKFRGHFLIEGDLNPDNSDVDKLFIQLVQTYNQLFEENPINASGVDAKAILSARLSKSRRLENLIAQLPGEKKNGLFGNLIALSLGLTPNFKSNFDLAEDAKLQLSKDTYDDDLDNLLAQIGDQYADLFLAAKNLSDAILLSDILRVNTEITKAPLSASMIKRYDEHHQDLTLLKALVRQQLPEKYKEIFFDQSKNGYAGYIDGGASQEEFYKFIKPILEKMDGTEELLVKLNREDLLRKQRTFDNGSIPHQIHLGELHAILRRQEDFYPFLKDNREKIEKILTFRIPYYVGPLARGNSRFAWMTRKSEETITPWNFEEVVDKGASAQSFIERMTNFDKNLPNEKVLPKHSLLYEYFTVYNELTKVKYVTEGMRKPAFLSGEQKKAIVDLLFKTNRKVTVKQLKEDYFKKIECFDSVEISGVEDRFNASLGTYHDLLKIIKDKDFLDNEENEDILEDIVLTLTLFEDREMIEERLKTYAHLFDDKVMKQLKRRRYTGWGRLSRKLINGIRDKQSGKTILDFLKSDGFANRNFMQLIHDDSLTFKEDIQKAQVSGQGDSLHEHIANLAGSPAIKKGILQTVKVVDELVKVMGRHKPENIVIEMARENQTTQKGQKNSRERMKRIEEGIKELGSQILKEHPVENTQLQNEKLYLYYLQNGRDMYVDQELDINRLSDYDVDHIVPQSFLKDDSIDNKVLTRSDKARGKSDNVPSEEVVKKMKNYWRQLLNAKLITQRKFDNLTKAERGGLSELDKAGFIKRQLVETRQITKHVAQILDSRMNTKYDENDKLIREVKVITLKSKLVSDFRKDFQFYKVREINNYHHAHDAYLNAVVGTALIKKYPKLESEFVYGDYKVYDVRKMIAKSEQEIGKATAKYFFYSNIMNFFKTEITLANGEIRKRPLIETNGETGEIVWDKGRDFATVRKVLSMPQVNIVKKTEVQTGGFSKESILPKRNSDKLIARKKDWDPKKYGGFDSPTVAYSVLVVAKVEKGKSKKLKSVKELLGITIMERSSFEKNPIDFLEAKGYKEVKKDLIIKLPKYSLFELENGRKRMLASAGELQKGNELALPSKYVNFLYLASHYEKLKGSPEDNEQKQLFVEQHKHYLDEIIEQISEFSKRVILADANLDKVLSAYNKHRDKPIREQAENIIHLFTLTNLGAPAAFKYFDTTIDRKRYTSTKEVLDATLIHQSITGLYETRIDLSQLGGDGGPAPAPGGTLNIEDEHRLHETSKEPDVSLGSTWLSDFPQAWAETGGMGLAVRQAPLIIPLKATSTPVSIKQYPMSQEARLGIKPHIQRLLDQGILVPCQSPWNTPLLPVKKPGTNDYRPVQDLREVNKRVEDIHPTVPNPYNLLSGLPPSHQWYTVLDLKDAFFCLRLHPTSQPLFAFEWRDPEMGISGQLTWTRLPQGFKNSPTLFNEALHRDLADFRIQHPDLILLQYVDDLLLAATSELDCQQGTRALLQTLGNLGYRASAKKAQICQKQVKYLGYLLKEGQRWLTEARKETVMGQPTPKTPRQLREFLGTAGFCRLWIPGFAEMAAPLYPLTKPGTLFNWGPDQQKAYQEIKQALLTAPALGLPDLTKPFELFVDEKQGYAKGVLTQKLGPWRRPVAYLSKKLDPVAAGWPPCLRMVAAIAVLTKDAGKLTMGQPLVILAPHAVEALVKQPPDRWLSNARMTHYQALLLDTDRVQFGPVVALNPATLLPLPEEGLQHNCLDILAEAHGTRPDLTDQPLPDADHTWYTDGSSLLQEGQRKAGAAVTTETEVIWAKALPAGTSAQRAELIALTQALKMAEGKKLNVYTDSRYAFATAHIHGEIYRRRGWLTSEGKEIKNKDEILALLKALFLPKRLSIIHCPGHQKGHSAEARGNRMADQAARKAAITETPDTSTLLAGKRTADGSEFEKRTADGSEFESPKKKAKVE

SEQ ID NO: 3030 - protein, 2091 aa, synthetic construct; identical to SEQ ID NO: 2750

SEQ ID NO: 3031 - protein, 2094 aa, synthetic construct; identical to SEQ ID NO: 2768

SEQ ID NO: 3032 - protein, 2094 aa, synthetic construct; identical to SEQ ID NO: 2770

SEQ ID NO: 3033 - protein, 2091 aa, synthetic construct; identical to SEQ ID NO: 2779

SEQ ID NO: 3034 - protein, 2093 aa, synthetic construct; identical to SEQ ID NO: 2774

SEQ ID NO: 3035 - protein, 2103 aa, synthetic construct
MPAAKRVKLDGGDKKYSIGLDIGTNSVGWAVITDEYKVPSKKFKVLGNTDRHSIKKNLIGALLFDSGETAEATRLKRTARRRYTRRKNRICYLQEIFSNEMAKVDDSFFHRLEESFLVEEDKKHERHPIFGNIVDEVAYHEKYPTIYHLRKKLVDSTDKADLRLIYLALAHMIKFRGHFLIEGDLNPDNSDVDKLFIQLVQTYNQLFEENPINASGVDAKAILSARLSKSRRLENLIAQLPGEKKNGLFGNLIALSLGLTPNFKSNFDLAEDAKLQLSKDTYDDDLDNLLAQIGDQYADLFLAAKNLSDAILLSDILRVNTEITKAPLSASMIKRYDEHHQDLTLLKALVRQQLPEKYKEIFFDQSKNGYAGYIDGGASQEEFYKFIKPILEKMDGTEELLVKLNREDLLRKQRTFDNGSIPHQIHLGELHAILRRQEDFYPFLKDNREKIEKILTFRIPYYVGPLARGNSRFAWMTRKSEETITPWNFEEVVDKGASAQSFIERMTNFDKNLPNEKVLPKHSLLYEYFTVYNELTKVKYVTEGMRKPAFLSGEQKKAIVDLLFKTNRKVTVKQLKEDYFKKIECFDSVEISGVEDRFNASLGTYHDLLKIIKDKDFLDNEENEDILEDIVLTLTLFEDREMIEERLKTYAHLFDDKVMKQLKRRRYTGWGRLSRKLINGIRDKQSGKTILDFLKSDGFANRNFMQLIHDDSLTFKEDIQKAQVSGQGDSLHEHIANLAGSPAIKKGILQTVKVVDELVKVMGRHKPENIVIEMARENQTTQKGQKNSRERMKRIEEGIKELGSQILKEHPVENTQLQNEKLYLYYLQNGRDMYVDQELDINRLSDYDVDHIVPQSFLKDDSIDNKVLTRSDKARGKSDNVPSEEVVKKMKNYWRQLLNAKLITQRKFDNLTKAERGGLSELDKAGFIKRQLVETRQITKHVAQILDSRMNTKYDENDKLIREVKVITLKSKLVSDFRKDFQFYKVREINNYHHAHDAYLNAVVGTALIKKYPKLESEFVYGDYKVYDVRKMIAKSEQEIGKATAKYFFYSNIMNFFKTEITLANGEIRKRPLIETNGETGEIVWDKGRDFATVRKVLSMPQVNIVKKTEVQTGGFSKESILPKRNSDKLIARKKDWDPKKYGGFDSPTVAYSVLVVAKVEKGKSKKLKSVKELLGITIMERSSFEKNPIDFLEAKGYKEVKKDLIIKLPKYSLFELENGRKRMLASAGELQKGNELALPSKYVNFLYLASHYEKLKGSPEDNEQKQLFVEQHKHYLDEIIEQISEFSKRVILADANLDKVLSAYNKHRDKPIREQAENIIHLFTLTNLGAPAAFKYFDTTIDRKRYTSTKEVLDATLIHQSITGLYETRIDLSQLGGDGGGGSGGSGGSGGSGGSGGSGGTLNIEDEHRLHETSKEPDVSLGSTWLSDFPQAWAETGGMGLAVRQAPLIIPLKATSTPVSIKQYPMSQEARLGIKPHIQRLLDQGILVPCQSPWNTPLLPVKKPGTNDYRPVQDLREVNKRVEDIHPTVPNPYNLLSGLPPSHQWYTVLDLKDAFFCLRLHPTSQPLFAFEWRDPEMGISGQLTWTRLPQGFKNSPTLFNEALHRDLADFRIQHPDLILLQYVDDLLLAATSELDCQQGTRALLQTLGNLGYRASAKKAQICQKQVKYLGYLLKEGQRWLTEARKETVMGQPTPKTPRQLREFLGKAGFCRLFIPGFAEMAAPLYPLTKPGTLFNWGPDQQKAYQEIKQALLTAPALGLPDLTKPFELFVDEKQGYAKGVLTQKLGPWRRPVAYLSKKLDPVAAGWPPCLRMVAAIAVLTKDAGKLTMGQPLVILAPHAVEALVKQPPDRWLSNARMTHYQALLLDTDRVQFGPVVALNPATLLPLPEEGLQHNCLDILAEAHGTRPDLTDQPLPDADHTWYTDGSSLLQEGQRKAGAAVTTETEVIWAKALPAGTSAQRAELIALTQALKMAEGKKLNVYTDSRYAFATAHIHGEIYRRRGWLTSEGKEIKNKDEILALLKALFLPKRLSIIHCPGHQKGHSAEARGNRMADQAARKAAITETPDTSTLLAGKRTADGSEFEKRTADGSEFESPKKKAKVE

SEQ ID NO: 3036 - protein, 2105 aa, synthetic construct; identical to SEQ ID NO: 2844

SEQ ID NO: 3037 - protein, 2088 aa, synthetic construct; identical to SEQ ID NO: 2812

SEQ ID NO: 3038 - protein, 2103 aa, synthetic construct; identical to SEQ ID NO: 2816

SEQ ID NO: 3039 - protein, 2097 aa, synthetic construct; identical to SEQ ID NO: 2795

SEQ ID NO: 3040 - protein, 2096 aa, synthetic construct; identical to SEQ ID NO: 2831

SEQ ID NO: 3041 - protein, 2095 aa, synthetic construct; identical to SEQ ID NO: 2845

SEQ ID NO: 3042 - protein, 2094 aa, synthetic construct; identical to SEQ ID NO: 2818

SEQ ID NO: 3043 - protein, 2110 aa, synthetic construct; identical to SEQ ID NO: 2803

SEQ ID NO: 3044 - protein, 2091 aa, synthetic construct
MPAAKRVKLDGGDKKYSIGLDIGTNSVGWAVITDEYKVPSKKFKVLGNTDRHSIKKNLIGALLFDSGETAEATRLKRTARRRYTRRKNRICYLQEIFSNEMAKVDDSFFHRLEESFLVEEDKKHERHPIFGNIVDEVAYHEKYPTIYHLRKKLVDSTDKADLRLIYLALAHMIKFRGHFLIEGDLNPDNSDVDKLFIQLVQTYNQLFEENPINASGVDAKAILSARLSKSRRLENLIAQLPGEKKNGLFGNLIALSLGLTPNFKSNFDLAEDAKLQLSKDTYDDDLDNLLAQIGDQYADLFLAAKNLSDAILLSDILRVNTEITKAPLSASMIKRYDEHHQDLTLLKALVRQQLPEKYKEIFFDQSKNGYAGYIDGGASQEEFYKFIKPILEKMDGTEELLVKLNREDLLRKQRTFDNGSIPHQIHLGELHAILRRQEDFYPFLKDNREKIEKILTFRIPYYVGPLARGNSRFAWMTRKSEETITPWNFEEVVDKGASAQSFIERMTNFDKNLPNEKVLPKHSLLYEYFTVYNELTKVKYVTEGMRKPAFLSGEQKKAIVDLLFKTNRKVTVKQLKEDYFKKIECFDSVEISGVEDRFNASLGTYHDLLKIIKDKDFLDNEENEDILEDIVLTLTLFEDREMIEERLKTYAHLFDDKVMKQLKRRRYTGWGRLSRKLINGIRDKQSGKTILDFLKSDGFANRNFMQLIHDDSLTFKEDIQKAQVSGQGDSLHEHIANLAGSPAIKKGILQTVKVVDELVKVMGRHKPENIVIEMARENQTTQKGQKNSRERMKRIEEGIKELGSQILKEHPVENTQLQNEKLYLYYLQNGRDMYVDQELDINRLSDYDVDHIVPQSFLKDDSIDNKVLTRSDKARGKSDNVPSEEVVKKMKNYWRQLLNAKLITQRKFDNLTKAERGGLSELDKAGFIKRQLVETRQITKHVAQILDSRMNTKYDENDKLIREVKVITLKSKLVSDFRKDFQFYKVREINNYHHAHDAYLNAVVGTALIKKYPKLESEFVYGDYKVYDVRKMIAKSEQEIGKATAKYFFYSNIMNFFKTEITLANGEIRKRPLIETNGETGEIVWDKGRDFATVRKVLSMPQVNIVKKTEVQTGGFSKESILPKRNSDKLIARKKDWDPKKYGGFDSPTVAYSVLVVAKVEKGKSKKLKSVKELLGITIMERSSFEKNPIDFLEAKGYKEVKKDLIIKLPKYSLFELENGRKRMLASAGELQKGNELALPSKYVNFLYLASHYEKLKGSPEDNEQKQLFVEQHKHYLDEIIEQISEFSKRVILADANLDKVLSAYNKHRDKPIREQAENIIHLFTLTNLGAPAAFKYFDTTIDRKRYTSTKEVLDATLIHQSITGLYETRIDLSQLGGDGGGGGGGGGGTLNIEDEHRLHETSKEPDVSLGSTWLSDFPQAWAETGGMGLAVRQAPLIIPLKATSTPVSIKQYPMSQEARLGIKPHIQRLLDQGILVPCQSPWNTPLLPVKKPGTNDYRPVQDLREVNKRVEDIHPTVPNPYNLLSGLPPSHQWYTVLDLKDAFFCLRLHPTSQPLFAFEWRDPEMGISGQLTWTRLPQGFKNSPTLFNEALHRDLADFRIQHPDLILLQYVDDLLLAATSELDCQQGTRALLQTLGNLGYRASAKKAQICQKQVKYLGYLLKEGQRWLTEARKETVMGQPTPKTPRQLREFLGKAGFCRLFIPGFAEMAAPLYPLTKPGTLFNWGPDQQKAYQEIKQALLTAPALGLPDLTKPFELFVDEKQGYAKGVLTQKLGPWRRPVAYLSKKLDPVAAGWPPCLRMVAAIAVLTKDAGKLTMGQPLVILAPHAVEALVKQPPDRWLSNARMTHYQALLLDTDRVQFGPVVALNPATLLPLPEEGLQHNCLDILAEAHGTRPDLTDQPLPDADHTWYTDGSSLLQEGQRKAGAAVTTETEVIWAKALPAGTSAQRAELIALTQALKMAEGKKLNVYTDSRYAFATAHIHGEIYRRRGWLTSEGKEIKNKDEILALLKALFLPKRLSIIHCPGHQKGHSAEARGNRMADQAARKAAITETPDTSTLLAGKRTADGSEFEKRTADGSEFESPKKKAKVE

SEQ ID NO: 3045 - protein, 2096 aa, synthetic construct
MPAAKRVKLDGGDKKYSIGLDIGTNSVGWAVITDEYKVPSKKFKVLGNTDRHSIKKNLIGALLFDSGETAEATRLKRTARRRYTRRKNRICYLQEIFSNEMAKVDDSFFHRLEESFLVEEDKKHERHPIFGNIVDEVAYHEKYPTIYHLRKKLVDSTDKADLRLIYLALAHMIKFRGHFLIEGDLNPDNSDVDKLFIQLVQTYNQLFEENPINASGVDAKAILSARLSKSRRLENLIAQLPGEKKNGLFGNLIALSLGLTPNFKSNFDLAEDAKLQLSKDTYDDDLDNLLAQIGDQYADLFLAAKNLSDAILLSDILRVNTEITKAPLSASMIKRYDEHHQDLTLLKALVRQQLPEKYKEIFFDQSKNGYAGYIDGGASQEEFYKFIKPILEKMDGTEELLVKLNREDLLRKQRTFDNGSIPHQIHLGELHAILRRQEDFYPFLKDNREKIEKILTFRIPYYVGPLARGNSRFAWMTRKSEETITPWNFEEVVDKGASAQSFIERMTNFDKNLPNEKVLPKHSLLYEYFTVYNELTKVKYVTEGMRKPAFLSGEQKKAIVDLLFKTNRKVTVKQLKEDYFKKIECFDSVEISGVEDRFNASLGTYHDLLKIIKDKDFLDNEENEDILEDIVLTLTLFEDREMIEERLKTYAHLFDDKVMKQLKRRRYTGWGRLSRKLINGIRDKQSGKTILDFLKSDGFANRNFMQLIHDDSLTFKEDIQKAQVSGQGDSLHEHIANLAGSPAIKKGILQTVKVVDELVKVMGRHKPENIVIEMARENQTTQKGQKNSRERMKRIEEGIKELGSQILKEHPVENTQLQNEKLYLYYLQNGRDMYVDQELDINRLSDYDVDHIVPQSFLKDDSIDNKVLTRSDKARGKSDNVPSEEVVKKMKNYWRQLLNAKLITQRKFDNLTKAERGGLSELDKAGFIKRQLVETRQITKHVAQILDSRMNTKYDENDKLIREVKVITLKSKLVSDFRKDFQFYKVREINNYHHAHDAYLNAVVGTALIKKYPKLESEFVYGDYKVYDVRKMIAKSEQEIGKATAKYFFYSNIMNFFKTEITLANGEIRKRPLIETNGETGEIVWDKGRDFATVRKVLSMPQVNIVKKTEVQTGGFSKESILPKRNSDKLIARKKDWDPKKYGGFDSPTVAYSVLVVAKVEKGKSKKLKSVKELLGITIMERSSFEKNPIDFLEAKGYKEVKKDLIIKLPKYSLFELENGRKRMLASAGELQKGNELALPSKYVNFLYLASHYEKLKGSPEDNEQKQLFVEQHKHYLDEIIEQISEFSKRVILADANLDKVLSAYNKHRDKPIREQAENIIHLFTLTNLGAPAAFKYFDTTIDRKRYTSTKEVLDATLIHQSITGLYETRIDLSQLGGDGGGGGEAAAKGGSGGTLNIEDEHRLHETSKEPDVSLGSTWLSDFPQAWAETGGMGLAVRQAPLIIPLKATSTPVSIKQYPMSQEARLGIKPHIQRLLDQGILVPCQSPWNTPLLPVKKPGTNDYRPVQDLREVNKRVEDIHPTVPNPYNLLSGLPPSHQWYTVLDLKDAFFCLRLHPTSQPLFAFEWRDPEMGISGQLTWTRLPQGFKNSPTLFNEALHRDLADFRIQHPDLILLQYVDDLLLAATSELDCQQGTRALLQTLGNLGYRASAKKAQICQKQVKYLGYLLKEGQRWLTEARKETVMGQPTPKTPRQLREFLGKAGFCRLFIPGFAEMAAPLYPLTKPGTLFNWGPDQQKAYQEIKQALLTAPALGLPDLTKPFELFVDEKQGYAKGVLTQKLGPWRRPVAYLSKKLDPVAAGWPPCLRMVAAIAVLTKDAGKLTMGQPLVILAPHAVEALVKQPPDRWLSNARMTHYQALLLDTDRVQFGPVVALNPATLLPLPEEGLQHNCLDILAEAHGTRPDLTDQPLPDADHTWYTDGSSLLQEGQRKAGAAVTTETEVIWAKALPAGTSAQRAELIALTQALKMAEGKKLNVYTDSRYAFATAHIHGEIYRRRGWLTSEGKEIKNKDEILALLKALFLPKRLSIIHCPGHQKGHSAEARGNRMADQAARKAAITETPDTSTLLAGKRTADGSEFEKRTADGSEFESPKKKAKVE

SEQ ID NO: 3046 - protein, 2096 aa, synthetic construct; identical to SEQ ID NO: 2829

SEQ ID NO: 3047 - protein, 2094 aa, synthetic construct
MPAAKRVKLDGGDKKYSIGLDIGTNSVGWAVITDEYKVPSKKFKVLGNTDRHSIKKNLIGALLFDSGETAEATRLKRTARRRYTRRKNRICYLQEIFSNEMAKVDDSFFHRLEESFLVEEDKKHERHPIFGNIVDEVAYHEKYPTIYHLRKKLVDSTDKADLRLIYLALAHMIKFRGHFLIEGDLNPDNSDVDKLFIQLVQTYNQLFEENPINASGVDAKAILSARLSKSRRLENLIAQLPGEKKNGLFGNLIALSLGLTPNFKSNFDLAEDAKLQLSKDTYDDDLDNLLAQIGDQYADLFLAAKNLSDAILLSDILRVNTEITKAPLSASMIKRYDEHHQDLTLLKALVRQQLPEKYKEIFFDQSKNGYAGYIDGGASQEEFYKFIKPILEKMDGTEELLVKLNREDLLRKQRTFDNGSIPHQIHLGELHAILRRQEDFYPFLKDNREKIEKILTFRIPYYVGPLARGNSRFAWMTRKSEETITPWNFEEVVDKGASAQSFIERMTNFDKNLPNEKVLPKHSLLYEYFTVYNELTKVKYVTEGMRKPAFLSGEQKKAIVDLLFKTNRKVTVKQLKEDYFKKIECFDSVEISGVEDRFNASLGTYHDLLKIIKDKDFLDNEENEDILEDIVLTLTLFEDREMIEERLKTYAHLFDDKVMKQLKRRRYTGWGRLSRKLINGIRDKQSGKTILDFLKSDGFANRNFMQLIHDDSLTFKEDIQKAQVSGQGDSLHEHIANLAGSPAIKKGILQTVKVVDELVKVMGRHKPENIVIEMARENQTTQKGQKNSRERMKRIEEGIKELGSQILKEHPVENTQLQNEKLYLYYLQNGRDMYVDQELDINRLSDYDVDHIVPQSFLKDDSIDNKVLTRSDKARGKSDNVPSEEVVKKMKNYWRQLLNAKLITQRKFDNLTKAERGGLSELDKAGFIKRQLVETRQITKHVAQILDSRMNTKYDENDKLIREVKVITLKSKLVSDFRKDFQFYKVREINNYHHAHDAYLNAVVGTALIKKYPKLESEFVYGDYKVYDVRKMIAKSEQEIGKATAKYFFYSNIMNFFKTEITLANGEIRKRPLIETNGETGEIVWDKGRDFATVRKVLSMPQVNIVKKTEVQTGGFSKESILPKRNSDKLIARKKDWDPKKYGGFDSPTVAYSVLVVAKVEKGKSKKLKSVKELLGITIMERSSFEKNPIDFLEAKGYKEVKKDLIIKLPKYSLFELENGRKRMLASAGELQKGNELALPSKYVNFLYLASHYEKLKGSPEDNEQKQLFVEQHKHYLDEIIEQISEFSKRVILADANLDKVLSAYNKHRDKPIREQAENIIHLFTLTNLGAPAAFKYFDTTIDRKRYTSTKEVLDATLIHQSITGLYETRIDLSQLGGDGGGSSGGGGGSGGTLNIEDEHRLHETSKEPDVSLGSTWLSDFPQAWAETGGMGLAVRQAPLIIPLKATSTPVSIKQYPMSQEARLGIKPHIQRLLDQGILVPCQSPWNTPLLPVKKPGTNDYRPVQDLREVNKRVEDIHPTVPNPYNLLSGLPPSHQWYTVLDLKDAFFCLRLHPTSQPLFAFEWRDPEMGISGQLTWTRLPQGFKNSPTLFNEALHRDLADFRIQHPDLILLQYVDDLLLAATSELDCQQGTRALLQTLGNLGYRASAKKAQICQKQVKYLGYLLKEGQRWLTEARKETVMGQPTPKTPRQLREFLGKAGFCRLFIPGFAEMAAPLYPLTKPGTLFNWGPDQQKAYQEIKQALLTAPALGLPDLTKPFELFVDEKQGYAKGVLTQKLGPWRRPVAYLSKKLDPVAAGWPPCLRMVAAIAVLTKDAGKLTMGQPLVILAPHAVEALVKQPPDRWLSNARMTHYQALLLDTDRVQFGPVVALNPATLLPLPEEGLQHNCLDILAEAHGTRPDLTDQPLPDADHTWYTDGSSLLQEGQRKAGAAVTTETEVIWAKALPAGTSAQRAELIALTQALKMAEGKKLNVYTDSRYAFATAHIHGEIYRRRGWLTSEGKEIKNKDEILALLKALFLPKRLSIIHCPGHQKGHSAEARGNRMADQAARKAAITETPDTSTLLAGKRTADGSEFEKRTADGSEFESPKKKAKVE

SEQ ID NO: 3048 - protein, 2094 aa, synthetic construct; identical to SEQ ID NO: 2852

SEQ ID NO: 3049 - protein, 2097 aa, synthetic construct; identical to SEQ ID NO: 2814

SEQ ID NO: 3050 - protein, 2096 aa, synthetic construct
MPAAKRVKLDGGDKKYSIGLDIGTNSVGWAVITDEYKVPSKKFKVLGNTDRHSIKKNLIGALLFDSGETAEATRLKRTARRRYTRRKNRICYLQEIFSNEMAKVDDSFFHRLEESFLVEEDKKHERHPIFGNIVDEVAYHEKYPTIYHLRKKLVDSTDKADLRLIYLALAHMIKFRGHFLIEGDLNPDNSDVDKLFIQLVQTYNQLFEENPINASGVDAKAILSARLSKSRRLENLIAQLPGEKKNGLFGNLIALSLGLTPNFKSNFDLAEDAKLQLSKDTYDDDLDNLLAQIGDQYADLFLAAKNLSDAILLSDILRVNTEITKAPLSASMIKRYDEHHQDLTLLKALVRQQLPEKYKEIFFDQSKNGYAGYIDGGASQEEFYKFIKPILEKMDGTEELLVKLNREDLLRKQRTFDNGSIPHQIHLGELHAILRRQEDFYPFLKDNREKIEKILTFRIPYYVGPLARGNSRFAWMTRKSEETITPWNFEEVVDKGASAQSFIERMTNFDKNLPNEKVLPKHSLLYEYFTVYNELTKVKYVTEGMRKPAFLSGEQKKAIVDLLFKTNRKVTVKQLKEDYFKKIECFDSVEISGVEDRFNASLGTYHDLLKIIKDKDFLDNEENEDILEDIVLTLTLFEDREMIEERLKTYAHLFDDKVMKQLKRRRYTGWGRLSRKLINGIRDKQSGKTILDFLKSDGFANRNFMQLIHDDSLTFKEDIQKAQVSGQGDSLHEHIANLAGSPAIKKGILQTVKVVDELVKVMGRHKPENIVIEMARENQTTQKGQKNSRERMKRIEEGIKELGSQILKEHPVENTQLQNEKLYLYYLQNGRDMYVDQELDINRLSDYDVDHIVPQSFLKDDSIDNKVLTRSDKARGKSDNVPSEEVVKKMKNYWRQLLNAKLITQRKFDNLTKAERGGLSELDKAGFIKRQLVETRQITKHVAQILDSRMNTKYDENDKLIREVKVITLKSKLVSDFRKDFQFYKVREINNYHHAHDAYLNAVVGTALIKKYPKLESEFVYGDYKVYDVRKMIAKSEQEIGKATAKYFFYSNIMNFFKTEITLANGEIRKRPLIETNGETGEIVWDKGRDFATVRKVLSMPQVNIVKKTEVQTGGFSKESILPKRNSDKLIARKKDWDPKKYGGFDSPTVAYSVLVVAKVEKGKSKKLKSVKELLGITIMERSSFEKNPIDFLEAKGYKEVKKDLIIKLPKYSLFELENGRKRMLASAGELQKGNELALPSKYVNFLYLASHYEKLKGSPEDNEQKQLFVEQHKHYLDEIIEQISEFSKRVILADANLDKVLSAYNKHRDKPIREQAENIIHLFTLTNLGAPAAFKYFDTTIDRKRYTSTKEVLDATLIHQSITGLYETRIDLSQLGGDGGGGGEAAAKGSSGGTLNIEDEHRLHETSKEPDVSLGSTWLSDFPQAWAETGGMGLAVRQAPLIIPLKATSTPVSIKQYPMSQEARLGIKPHIQRLLDQGILVPCQSPWNTPLLPVKKPGTNDYRPVQDLREVNKRVEDIHPTVPNPYNLLSGLPPSHQWYTVLDLKDAFFCLRLHPTSQPLFAFEWRDPEMGISGQLTWTRLPQGFKNSPTLFNEALHRDLADFRIQHPDLILLQYVDDLLLAATSELDCQQGTRALLQTLGNLGYRASAKKAQICQKQVKYLGYLLKEGQRWLTEARKETVMGQPTPKTPRQLREFLGKAGFCRLFIPGFAEMAAPLYPLTKPGTLFNWGPDQQKAYQEIKQALLTAPALGLPDLTKPFELFVDEKQGYAKGVLTQKLGPWRRPVAYLSKKLDPVAAGWPPCLRMVAAIAVLTKDAGKLTMGQPLVILAPHAVEALVKQPPDRWLSNARMTHYQALLLDTDRVQFGPVVALNPATLLPLPEEGLQHNCLDILAEAHGTRPDLTDQPLPDADHTWYTDGSSLLQEGQRKAGAAVTTETEVIWAKALPAGTSAQRAELIALTQALKMAEGKKLNVYTDSRYAFATAHIHGEIYRRRGWLTSEGKEIKNKDEILALLKALFLPKRLSIIHCPGHQKGHSAEARGNRMADQAARKAAITETPDTSTLLAGKRTADGSEFEKRTADGSEFESPKKKAKVE

SEQ ID NO: 3051 - protein, 2096 aa, synthetic construct; identical to SEQ ID NO: 2785

SEQ ID NO: 3052 - protein, 2096 aa, synthetic construct; identical to SEQ ID NO: 2822

SEQ ID NO: 3053 - protein, 2096 aa, synthetic construct; identical to SEQ ID NO: 2817

SEQ ID NO: 3054 - protein, 2096 aa, synthetic construct; identical to SEQ ID NO: 2851

SEQ ID NO: 3055 - protein, 2091 aa, synthetic construct
MPAAKRVKLDGGDKKYSIGLDIGTNSVGWAVITDEYKVPSKKFKVLGNTDRHSIKKNLIGALLFDSGETAEATRLKRTARRRYTRRKNRICYLQEIFSNEMAKVDDSFFHRLEESFLVEEDKKHERHPIFGNIVDEVAYHEKYPTIYHLRKKLVDSTDKADLRLIYLALAHMIKFRGHFLIEGDLNPDNSDVDKLFIQLVQTYNQLFEENPINASGVDAKAILSARLSKSRRLENLIAQLPGEKKNGLFGNLIALSLGLTPNFKSNFDLAEDAKLQLSKDTYDDDLDNLLAQIGDQYADLFLAAKNLSDAILLSDILRVNTEITKAPLSASMIKRYDEHHQDLTLLKALVRQQLPEKYKEIFFDQSKNGYAGYIDGGASQEEFYKFIKPILEKMDGTEELLVKLNREDLLRKQRTFDNGSIPHQIHLGELHAILRRQEDFYPFLKDNREKIEKILTFRIPYYVGPLARGNSRFAWMTRKSEETITPWNFEEVVDKGASAQSFIERMTNFDKNLPNEKVLPKHSLLYEYFTVYNELTKVKYVTEGMRKPAFLSGEQKKAIVDLLFKTNRKVTVKQLKEDYFKKIECFDSVEISGVEDRFNASLGTYHDLLKIIKDKDFLDNEENEDILEDIVLTLTLFEDREMIEERLKTYAHLFDDKVMKQLKRRRYTGWGRLSRKLINGIRDKQSGKTILDFLKSDGFANRNFMQLIHDDSLTFKEDIQKAQVSGQGDSLHEHIANLAGSPAIKKGILQTVKVVDELVKVMGRHKPENIVIEMARENQTTQKGQKNSRERMKRIEEGIKELGSQILKEHPVENTQLQNEKLYLYYLQNGRDMYVDQELDINRLSDYDVDHIVPQSFLKDDSIDNKVLTRSDKARGKSDNVPSEEVVKKMKNYWRQLLNAKLITQRKFDNLTKAERGGLSELDKAGFIKRQLVETRQITKHVAQILDSRMNTKYDENDKLIREVKVITLKSKLVSDFRKDFQFYKVREINNYHHAHDAYLNAVVGTALIKKYPKLESEFVYGDYKVYDVRKMIAKSEQEIGKATAKYFFYSNIMNFFKTEITLANGEIRKRPLIETNGETGEIVWDKGRDFATVRKVLSMPQVNIVKKTEVQTGGFSKESILPKRNSDKLIARKKDWDPKKYGGFDSPTVAYSVLVVAKVEKGKSKKLKSVKELLGITIMERSSFEKNPIDFLEAKGYKEVKKDLIIKLPKYSLFELENGRKRMLASAGELQKGNELALPSKYVNFLYLASHYEKLKGSPEDNEQKQLFVEQHKHYLDEIIEQISEFSKRVILADANLDKVLSAYNKHRDKPIREQAENIIHLFTLTNLGAPAAFKYFDTTIDRKRYTSTKEVLDATLIHQSITGLYETRIDLSQLGGDGGGSSPAPGGTLNIEDEHRLHETSKEPDVSLGSTWLSDFPQAWAETGGMGLAVRQAPLIIPLKATSTPVSIKQYPMSQEARLGIKPHIQRLLDQGILVPCQSPWNTPLLPVKKPGTNDYRPVQDLREVNKRVEDIHPTVPNPYNLLSGLPPSHQWYTVLDLKDAFFCLRLHPTSQPLFAFEWRDPEMGISGQLTWTRLPQGFKNSPTLFNEALHRDLADFRIQHPDLILLQYVDDLLLAATSELDCQQGTRALLQTLGNLGYRASAKKAQICQKQVKYLGYLLKEGQRWLTEARKETVMGQPTPKTPRQLREFLGKAGFCRLFIPGFAEMAAPLYPLTKPGTLFNWGPDQQKAYQEIKQALLTAPALGLPDLTKPFELFVDEKQGYAKGVLTQKLGPWRRPVAYLSKKLDPVAAGWPPCLRMVAAIAVLTKDAGKLTMGQPLVILAPHAVEALVKQPPDRWLSNARMTHYQALLLDTDRVQFGPVVALNPATLLPLPEEGLQHNCLDILAEAHGTRPDLTDQPLPDADHTWYTDGSSLLQEGQRKAGAAVTTETEVIWAKALPAGTSAQRAELIALTQALKMAEGKKLNVYTDSRYAFATAHIHGEIYRRRGWLTSEGKEIKNKDEILALLKALFLPKRLSIIHCPGHQKGHSAEARGNRMADQAARKAAITETPDTSTLLAGKRTADGSEFEKRTADGSEFESPKKKAKVE

SEQ ID NO: 3056 - protein, 2094 aa, synthetic construct
MPAAKRVKLDGGDKKYSIGLDIGTNSVGWAVITDEYKVPSKKFKVLGNTDRHSIKKNLIGALLFDSGETAEATRLKRTARRRYTRRKNRICYLQEIFSNEMAKVDDSFFHRLEESFLVEEDKKHERHPIFGNIVDEVAYHEKYPTIYHLRKKLVDSTDKADLRLIYLALAHMIKFRGHFLIEGDLNPDNSDVDKLFIQLVQTYNQLFEENPINASGVDAKAILSARLSKSRRLENLIAQLPGEKKNGLFGNLIALSLGLTPNFKSNFDLAEDAKLQLSKDTYDDDLDNLLAQIGDQYADLFLAAKNLSDAILLSDILRVNTEITKAPLSASMIKRYDEHHQDLTLLKALVRQQLPEKYKEIFFDQSKNGYAGYIDGGASQEEFYKFIKPILEKMDGTEELLVKLNREDLLRKQRTFDNGSIPHQIHLGELHAILRRQEDFYPFLKDNREKIEKILTFRIPYYVGPLARGNSRFAWMTRKSEETITPWNFEEVVDKGASAQSFIERMTNFDKNLPNEKVLPKHSLLYEYFTVYNELTKVKYVTEGMRKPAFLSGEQKKAIVDLLFKTNRKVTVKQLKEDYFKKIECFDSVEISGVEDRFNASLGTYHDLLKIIKDKDFLDNEENEDILEDIVLTLTLFEDREMIEERLKTYAHLFDDKVMKQLKRRRYTGWGRLSRKLINGIRDKQSGKTILDFLKSDGFANRNFMQLIHDDSLTFKEDIQKAQVSGQGDSLHEHIANLAGSPAIKKGILQTVKVVDELVKVMGRHKPENIVIEMARENQTTQKGQKNSRERMKRIEEGIKELGSQILKEHPVENTQLQNEKLYLYYLQNGRDMYVDQELDINRLSDYDVDHIVPQSFLKDDSIDNKVLTRSDKARGKSDNVPSEEVVKKMKNYWRQLLNAKLITQRKFDNLTKAERGGLSELDKAGFIKRQLVETRQITKHVAQILDSRMNTKYDENDKLIREVKVITLKSKLVSDFRKDFQFYKVREINNYHHAHDAYLNAVVGTALIKKYPKLESEFVYGDYKVYDVRKMIAKSEQEIGKATAKYFFYSNIMNFFKTEITLANGEIRKRPLIETNGETGEIVWDKGRDFATVRKVLSMPQVNIVKKTEVQTGGFSKESILPKRNSDKLIARKKDWDPKKYGGFDSPTVAYSVLVVAKVEKGKSKKLKSVKELLGITIMERSSFEKNPIDFLEAKGYKEVKKDLIIKLPKYSLFELENGRKRMLASAGELQKGNELALPSKYVNFLYLASHYEKLKGSPEDNEQKQLFVEQHKHYLDEIIEQISEFSKRVILADANLDKVLSAYNKHRDKPIREQAENIIHLFTLTNLGAPAAFKYFDTTIDRKRYTSTKEVLDATLIHQSITGLYETRIDLSQLGGDGGGSSGGGPAPGGTLNIEDEHRLHETSKEPDVSLGSTWLSDFPQAWAETGGMGLAVRQAPLIIPLKATSTPVSIKQYPMSQEARLGIKPHIQRLLDQGILVPCQSPWNTPLLPVKKPGTNDYRPVQDLREVNKRVEDIHPTVPNPYNLLSGLPPSHQWYTVLDLKDAFFCLRLHPTSQPLFAFEWRDPEMGISGQLTWTRLPQGFKNSPTLFNEALHRDLADFRIQHPDLILLQYVDDLLLAATSELDCQQGTRALLQTLGNLGYRASAKKAQICQKQVKYLGYLLKEGQRWLTEARKETVMGQPTPKTPRQLREFLGKAGFCRLFIPGFAEMAAPLYPLTKPGTLFNWGPDQQKAYQEIKQALLTAPALGLPDLTKPFELFVDEKQGYAKGVLTQKLGPWRRPVAYLSKKLDPVAAGWPPCLRMVAAIAVLTKDAGKLTMGQPLVILAPHAVEALVKQPPDRWLSNARMTHYQALLLDTDRVQFGPVVALNPATLLPLPEEGLQHNCLDILAEAHGTRPDLTDQPLPDADHTWYTDGSSLLQEGQRKAGAAVTTETEVIWAKALPAGTSAQRAELIALTQALKMAEGKKLNVYTDSRYAFATAHIHGEIYRRRGWLTSEGKEIKNKDEILALLKALFLPKRLSIIHCPGHQKGHSAEARGNRMADQAARKAAITETPDTSTLLAGKRTADGSEFEKRTADGSEFESPKKKAKVE

SEQ ID NO: 3057 - protein, 2096 aa, synthetic construct; identical to SEQ ID NO: 2810

SEQ ID NO: 3058 - protein, 2091 aa, synthetic construct
MPAAKRVKLDGGDKKYSIGLDIGTNSVGWAVITDEYKVPSKKFKVLGNTDRHSIKKNLIGALLFDSGETAEATRLKRTARRRYTRRKNRICYLQEIFSNEMAKVDDSFFHRLEESFLVEEDKKHERHPIFGNIVDEVAYHEKYPTIYHLRKKLVDSTDKADLRLIYLALAHMIKFRGHFLIEGDLNPDNSDVDKLFIQLVQTYNQLFEENPINASGVDAKAILSARLSKSRRLENLIAQLPGEKKNGLFGNLIALSLGLTPNFKSNFDLAEDAKLQLSKDTYDDDLDNLLAQIGDQYADLFLAAKNLSDAILLSDILRVNTEITKAPLSASMIKRYDEHHQDLTLLKALVRQQLPEKYKEIFFDQSKNGYAGYIDGGASQEEFYKFIKPILEKMDGTEELLVKLNREDLLRKQRTFDNGSIPHQIHLGELHAILRRQEDFYPFLKDNREKIEKILTFRIPYYVGPLARGNSRFAWMTRKSEETITPWNFEEVVDKGASAQSFIERMTNFDKNLPNEKVLPKHSLLYEYFTVYNELTKVKYVTEGMRKPAFLSGEQKKAIVDLLFKTNRKVTVKQLKEDYFKKIECFDSVEISGVEDRFNASLGTYHDLLKIIKDKDFLDNEENEDILEDIVLTLTLFEDREMIEERLKTYAHLFDDKVMKQLKRRRYTGWGRLSRKLINGIRDKQSGKTILDFLKSDGFANRNFMQLIHDDSLTFKEDIQKAQVSGQGDSLHEHIANLAGSPAIKKGILQTVKVVDELVKVMGRHKPENIVIEMARENQTTQKGQKNSRERMKRIEEGIKELGSQILKEHPVENTQLQNEKLYLYYLQNGRDMYVDQELDINRLSDYDVDHIVPQSFLKDDSIDNKVLTRSDKARGKSDNVPSEEVVKKMKNYWRQLLNAKLITQRKFDNLTKAERGGLSELDKAGFIKRQLVETRQITKHVAQILDSRMNTKYDENDKLIREVKVITLKSKLVSDFRKDFQFYKVREINNYHHAHDAYLNAVVGTALIKKYPKLESEFVYGDYKVYDVRKMIAKSEQEIGKATAKYFFYSNIMNFFKTEITLANGEIRKRPLIETNGETGEIVWDKGRDFATVRKVLSMPQVNIVKKTEVQTGGFSKESILPKRNSDKLIARKKDWDPKKYGGFDSPTVAYSVLVVAKVEKGKSKKLKSVKELLGITIMERSSFEKNPIDFLEAKGYKEVKKDLIIKLPKYSLFELENGRKRMLASAGELQKGNELALPSKYVNFLYLASHYEKLKGSPEDNEQKQLFVEQHKHYLDEIIEQISEFSKRVILADANLDKVLSAYNKHRDKPIREQAENIIHLFTLTNLGAPAAFKYFDTTIDRKRYTSTKEVLDATLIHQSITGLYETRIDLSQLGGDGGGSSGGGGGTLNIEDEHRLHETSKEPDVSLGSTWLSDFPQAWAETGGMGLAVRQAPLIIPLKATSTPVSIKQYPMSQEARLGIKPHIQRLLDQGILVPCQSPWNTPLLPVKKPGTNDYRPVQDLREVNKRVEDIHPTVPNPYNLLSGLPPSHQWYTVLDLKDAFFCLRLHPTSQPLFAFEWRDPEMGISGQLTWTRLPQGFKNSPTLFNEALHRDLADFRIQHPDLILLQYVDDLLLAATSELDCQQGTRALLQTLGNLGYRASAKKAQICQKQVKYLGYLLKEGQRWLTEARKETVMGQPTPKTPRQLREFLGKAGFCRLFIPGFAEMAAPLYPLTKPGTLFNWGPDQQKAYQEIKQALLTAPALGLPDLTKPFELFVDEKQGYAKGVLTQKLGPWRRPVAYLSKKLDPVAAGWPPCLRMVAAIAVLTKDAGKLTMGQPLVILAPHAVEALVKQPPDRWLSNARMTHYQALLLDTDRVQFGPVVALNPATLLPLPEEGLQHNCLDILAEAHGTRPDLTDQPLPDADHTWYTDGSSLLQEGQRKAGAAVTTETEVIWAKALPAGTSAQRAELIALTQALKMAEGKKLNVYTDSRYAFATAHIHGEIYRRRGWLTSEGKEIKNKDEILALLKALFLPKRLSIIHCPGHQKGHSAEARGNRMADQAARKAAITETPDTSTLLAGKRTADGSEFEKRTADGSEFESPKKKAKVE

SEQ ID NO: 3059 - protein, 2094 aa, synthetic construct; identical to SEQ ID NO: 2804

SEQ ID NO: 3060 - protein, 2091 aa, synthetic construct
MPAAKRVKLDGGDKKYSIGLDIGTNSVGWAVITDEYKVPSKKFKVLGNTDRHSIKKNLIGALLFDSGETAEATRLKRTARRRYTRRKNRICYLQEIFSNEMAKVDDSFFHRLEESFLVEEDKKHERHPIFGNIVDEVAYHEKYPTIYHLRKKLVDSTDKADLRLIYLALAHMIKFRGHFLIEGDLNPDNSDVDKLFIQLVQTYNQLFEENPINASGVDAKAILSARLSKSRRLENLIAQLPGEKKNGLFGNLIALSLGLTPNFKSNFDLAEDAKLQLSKDTYDDDLDNLLAQIGDQYADLFLAAKNLSDAILLSDILRVNTEITKAPLSASMIKRYDEHHQDLTLLKALVRQQLPEKYKEIFFDQSKNGYAGYIDGGASQEEFYKFIKPILEKMDGTEELLVKLNREDLLRKQRTFDNGSIPHQIHLGELHAILRRQEDFYPFLKDNREKIEKILTFRIPYYVGPLARGNSRFAWMTRKSEETITPWNFEEVVDKGASAQSFIERMTNFDKNLPNEKVLPKHSLLYEYFTVYNELTKVKYVTEGMRKPAFLSGEQKKAIVDLLFKTNRKVTVKQLKEDYFKKIECFDSVEISGVEDRFNASLGTYHDLLKIIKDKDFLDNEENEDILEDIVLTLTLFEDREMIEERLKTYAHLFDDKVMKQLKRRRYTGWGRLSRKLINGIRDKQSGKTILDFLKSDGFANRNFMQLIHDDSLTFKEDIQKAQVSGQGDSLHEHIANLAGSPAIKKGILQTVKVVDELVKVMGRHKPENIVIEMARENQTTQKGQKNSRERMKRIEEGIKELGSQILKEHPVENTQLQNEKLYLYYLQNGRDMYVDQELDINRLSDYDVDHIVPQSFLKDDSIDNKVLTRSDKARGKSDNVPSEEVVKKMKNYWRQLLNAKLITQRKFDNLTKAERGGLSELDKAGFIKRQLVETRQITKHVAQILDSRMNTKYDENDKLIREVKVITLKSKLVSDFRKDFQFYKVREINNYHHAHDAYLNAVVGTALIKKYPKLESEFVYGDYKVYDVRKMIAKSEQEIGKATAKYFFYSNIMNFFKTEITLANGEIRKRPLIETNGETGEIVWDKGRDFATVRKVLSMPQVNIVKKTEVQTGGFSKESILPKRNSDKLIARKKDWDPKKYGGFDSPTVAYSVLVVAKVEKGKSKKLKSVKELLGITIMERSSFEKNPIDFLEAKGYKEVKKDLIIKLPKYSLFELENGRKRMLASAGELQKGNELALPSKYVNFLYLASHYEKLKGSPEDNEQKQLFVEQHKHYLDEIIEQISEFSKRVILADANLDKVLSAYNKHRDKPIREQAENIIHLFTLTNLGAPAAFKYFDTTIDRKRYTSTKEVLDATLIHQSITGLYETRIDLSQLGGDGGPAPGGSGGTLNIEDEHRLHETSKEPDVSLGSTWLSDFPQAWAETGGMGLAVRQAPLIIPLKATSTPVSIKQYPMSQEARLGIKPHIQRLLDQGILVPCQSPWNTPLLPVKKPGTNDYRPVQDLREVNKRVEDIHPTVPNPYNLLSGLPPSHQWYTVLDLKDAFFCLRLHPTSQPLFAFEWRDPEMGISGQLTWTRLPQGFKNSPTLFNEALHRDLADFRIQHPDLILLQYVDDLLLAATSELDCQQGTRALLQTLGNLGYRASAKKAQICQKQVKYLGYLLKEGQRWLTEARKETVMGQPTPKTPRQLREFLGKAGFCRLFIPGFAEMAAPLYPLTKPGTLFNWGPDQQKAYQEIKQALLTAPALGLPDLTKPFELFVDEKQGYAKGVLTQKLGPWRRPVAYLSKKLDPVAAGWPPCLRMVAAIAVLTKDAGKLTMGQPLVILAPHAVEALVKQPPDRWLSNARMTHYQALLLDTDRVQFGPVVALNPATLLPLPEEGLQHNCLDILAEAHGTRPDLTDQPLPDADHTWYTDGSSLLQEGQRKAGAAVTTETEVIWAKALPAGTSAQRAELIALTQALKMAEGKKLNVYTDSRYAFATAHIHGEIYRRRGWLTSEGKEIKNKDEILALLKALFLPKRLSIIHCPGHQKGHSAEARGNRMADQAARKAAITETPDTSTLLAGKRTADGSEFEKRTADGSEFESPKKKAKVE

SEQ ID NO: 3061 - protein, 2093 aa, synthetic construct
MPAAKRVKLDGGDKKYSIGLDIGTNSVGWAVITDEYKVPSKKFKVLGNTDRHSIKKNLIGALLFDSGETAEATRLKRTARRRYTRRKNRICYLQEIFSNEMAKVDDSFFHRLEESFLVEEDKKHERHPIFGNIVDEVAYHEKYPTIYHLRKKLVDSTDKADLRLIYLALAHMIKFRGHFLIEGDLNPDNSDVDKLFIQLVQTYNQLFEENPINASGVDAKAILSARLSKSRRLENLIAQLPGEKKNGLFGNLIALSLGLTPNFKSNFDLAEDAKLQLSKDTYDDDLDNLLAQIGDQYADLFLAAKNLSDAILLSDILRVNTEITKAPLSASMIKRYDEHHQDLTLLKALVRQQLPEKYKEIFFDQSKNGYAGYIDGGASQEEFYKFIKPILEKMDGTEELLVKLNREDLLRKQRTFDNGSIPHQIHLGELHAILRRQEDFYPFLKDNREKIEKILTFRIPYYVGPLARGNSRFAWMTRKSEETITPWNFEEVVDKGASAQSFIERMTNFDKNLPNEKVLPKHSLLYEYFTVYNELTKVKYVTEGMRKPAFLSGEQKKAIVDLLFKTNRKVTVKQLKEDYFKKIECFDSVEISGVEDRFNASLGTYHDLLKIIKDKDFLDNEENEDILEDIVLTLTLFEDREMIEERLKTYAHLFDDKVMKQLKRRRYTGWGRLSRKLINGIRDKQSGKTILDFLKSDGFANRNFMQLIHDDSLTFKEDIQKAQVSGQGDSLHEHIANLAGSPAIKKGILQTVKVVDELVKVMGRHKPENIVIEMARENQTTQKGQKNSRERMKRIEEGIKELGSQILKEHPVENTQLQNEKLYLYYLQNGRDMYVDQELDINRLSDYDVDHIVPQSFLKDDSIDNKVLTRSDKARGKSDNVPSEEVVKKMKNYWRQLLNAKLITQRKFDNLTKAERGGLSELDKAGFIKRQLVETRQITKHVAQILDSRMNTKYDENDKLIREVKVITLKSKLVSDFRKDFQFYKVREINNYHHAHDAYLNAVVGTALIKKYPKLESEFVYGDYKVYDVRKMIAKSEQEIGKATAKYFFYSNIMNFFKTEITLANGEIRKRPLIETNGETGEIVWDKGRDFATVRKVLSMPQVNIVKKTEVQTGGFSKESILPKRNSDKLIARKKDWDPKKYGGFDSPTVAYSVLVVAKVEKGKSKKLKSVKELLGITIMERSSFEKNPIDFLEAKGYKEVKKDLIIKLPKYSLFELENGRKRMLASAGELQKGNELALPSKYVNFLYLASHYEKLKGSPEDNEQKQLFVEQHKHYLDEIIEQISEFSKRVILADANLDKVLSAYNKHRDKPIREQAENIIHLFTLTNLGAPAAFKYFDTTIDRKRYTSTKEVLDATLIHQSITGLYETRIDLSQLGGDGGPAPEAAAKGGTLNIEDEHRLHETSKEPDVSLGSTWLSDFPQAWAETGGMGLAVRQAPLIIPLKATSTPVSIKQYPMSQEARLGIKPHIQRLLDQGILVPCQSPWNTPLLPVKKPGTNDYRPVQDLREVNKRVEDIHPTVPNPYNLLSGLPPSHQWYTVLDLKDAFFCLRLHPTSQPLFAFEWRDPEMGISGQLTWTRLPQGFKNSPTLFNEALHRDLADFRIQHPDLILLQYVDDLLLAATSELDCQQGTRALLQTLGNLGYRASAKKAQICQKQVKYLGYLLKEGQRWLTEARKETVMGQPTPKTPRQLREFLGKAGFCRLFIPGFAEMAAPLYPLTKPGTLFNWGPDQQKAYQEIKQALLTAPALGLPDLTKPFELFVDEKQGYAKGVLTQKLGPWRRPVAYLSKKLDPVAAGWPPCLRMVAAIAVLTKDAGKLTMGQPLVILAPHAVEALVKQPPDRWLSNARMTHYQALLLDTDRVQFGPVVALNPATLLPLPEEGLQHNCLDILAEAHGTRPDLTDQPLPDADHTWYTDGSSLLQEGQRKAGAAVTTETEVIWAKALPAGTSAQRAELIALTQALKMAEGKKLNVYTDSRYAFATAHIHGEIYRRRGWLTSEGKEIKNKDEILALLKALFLPKRLSIIHCPGHQKGHSAEARGNRMADQAARKAAITETPDTSTLLAGKRTADGSEFEKRTADGSEFESPKKKAKVE

SEQ ID NO: 3062 - protein, 2093 aa, synthetic construct; identical to SEQ ID NO: 2828

SEQ ID NO: 3063 - protein, 2105 aa, synthetic construct
MPAAKRVKLDGGDKKYSIGLDIGTNSVGWAVITDEYKVPSKKFKVLGNTDRHSIKKNLIGALLFDSGETAEATRLKRTARRRYTRRKNRICYLQEIFSNEMAKVDDSFFHRLEESFLVEEDKKHERHPIFGNIVDEVAYHEKYPTIYHLRKKLVDSTDKADLRLIYLALAHMIKFRGHFLIEGDLNPDNSDVDKLFIQLVQTYNQLFEENPINASGVDAKAILSARLSKSRRLENLIAQLPGEKKNGLFGNLIALSLGLTPNFKSNFDLAEDAKLQLSKDTYDDDLDNLLAQIGDQYADLFLAAKNLSDAILLSDILRVNTEITKAPLSASMIKRYDEHHQDLTLLKALVRQQLPEKYKEIFFDQSKNGYAGYIDGGASQEEFYKFIKPILEKMDGTEELLVKLNREDLLRKQRTFDNGSIPHQIHLGELHAILRRQEDFYPFLKDNREKIEKILTFRIPYYVGPLARGNSRFAWMTRKSEETITPWNFEEVVDKGASAQSFIERMTNFDKNLPNEKVLPKHSLLYEYFTVYNELTKVKYVTEGMRKPAFLSGEQKKAIVDLLFKTNRKVTVKQLKEDYFKKIECFDSVEISGVEDRFNASLGTYHDLLKIIKDKDFLDNEENEDILEDIVLTLTLFEDREMIEERLKTYAHLFDDKVMKQLKRRRYTGWGRLSRKLINGIRDKQSGKTILDFLKSDGFANRNFMQLIHDDSLTFKEDIQKAQVSGQGDSLHEHIANLAGSPAIKKGILQTVKVVDELVKVMGRHKPENIVIEMARENQTTQKGQKNSRERMKRIEEGIKELGSQILKEHPVENTQLQNEKLYLYYLQNGRDMYVDQELDINRLSDYDVDHIVPQSFLKDDSIDNKVLTRSDKARGKSDNVPSEEVVKKMKNYWRQLLNAKLITQRKFDNLTKAERGGLSELDKAGFIKRQLVETRQITKHVAQILDSRMNTKYDENDKLIREVKVITLKSKLVSDFRKDFQFYKVREINNYHHAHDAYLNAVVGTALIKKYPKLESEFVYGDYKVYDVRKMIAKSEQEIGKATAKYFFYSNIMNFFKTEITLANGEIRKRPLIETNGETGEIVWDKGRDFATVRKVLSMPQVNIVKKTEVQTGGFSKESILPKRNSDKLIARKKDWDPKKYGGFDSPTVAYSVLVVAKVEKGKSKKLKSVKELLGITIMERSSFEKNPIDFLEAKGYKEVKKDLIIKLPKYSLFELENGRKRMLASAGELQKGNELALPSKYVNFLYLASHYEKLKGSPEDNEQKQLFVEQHKHYLDEIIEQISEFSKRVILADANLDKVLSAYNKHRDKPIREQAENIIHLFTLTNLGAPAAFKYFDTTIDRKRYTSTKEVLDATLIHQSITGLYETRIDLSQLGGDGGGGGGSGGGGSGGGGSGGGGSGGTLNIEDEHRLHETSKEPDVSLGSTWLSDFPQAWAETGGMGLAVRQAPLIIPLKATSTPVSIKQYPMSQEARLGIKPHIQRLLDQGILVPCQSPWNTPLLPVKKPGTNDYRPVQDLREVNKRVEDIHPTVPNPYNLLSGLPPSHQWYTVLDLKDAFFCLRLHPTSQPLFAFEWRDPEMGISGQLTWTRLPQGFKNSPTLFNEALHRDLADFRIQHPDLILLQYVDDLLLAATSELDCQQGTRALLQTLGNLGYRASAKKAQICQKQVKYLGYLLKEGQRWLTEARKETVMGQPTPKTPRQLREFLGKAGFCRLFIPGFAEMAAPLYPLTKPGTLFNWGPDQQKAYQEIKQALLTAPALGLPDLTKPFELFVDEKQGYAKGVLTQKLGPWRRPVAYLSKKLDPVAAGWPPCLRMVAAIAVLTKDAGKLTMGQPLVILAPHAVEALVKQPPDRWLSNARMTHYQALLLDTDRVQFGPVVALNPATLLPLPEEGLQHNCLDILAEAHGTRPDLTDQPLPDADHTWYTDGSSLLQEGQRKAGAAVTTETEVIWAKALPAGTSAQRAELIALTQALKMAEGKKLNVYTDSRYAFATAHIHGEIYRRRGWLTSEGKEIKNKDEILALLKALFLPKRLSIIHCPGHQKGHSAEARGNRMADQAARKAAITETPDTSTLLAGKRTADGSEFEKRTADGSEFESPKKKAKVE

SEQ ID NO: 3064 - protein, 2094 aa, synthetic construct
MPAAKRVKLDGGDKKYSIGLDIGTNSVGWAVITDEYKVPSKKFKVLGNTDRHSIKKNLIGALLFDSGETAEATRLKRTARRRYTRRKNRICYLQEIFSNEMAKVDDSFFHRLEESFLVEEDKKHERHPIFGNIVDEVAYHEKYPTIYHLRKKLVDSTDKADLRLIYLALAHMIKFRGHFLIEGDLNPDNSDVDKLFIQLVQTYNQLFEENPINASGVDAKAILSARLSKSRRLENLIAQLPGEKKNGLFGNLIALSLGLTPNFKSNFDLAEDAKLQLSKDTYDDDLDNLLAQIGDQYADLFLAAKNLSDAILLSDILRVNTEITKAPLSASMIKRYDEHHQDLTLLKALVRQQLPEKYKEIFFDQSKNGYAGYIDGGASQEEFYKFIKPILEKMDGTEELLVKLNREDLLRKQRTFDNGSIPHQIHLGELHAILRRQEDFYPFLKDNREKIEKILTFRIPYYVGPLARGNSRFAWMTRKSEETITPWNFEEVVDKGASAQSFIERMTNFDKNLPNEKVLPKHSLLYEYFTVYNELTKVKYVTEGMRKPAFLSGEQKKAIVDLLFKTNRKVTVKQLKEDYFKKIECFDSVEISGVEDRFNASLGTYHDLLKIIKDKDFLDNEENEDILEDIVLTLTLFEDREMIEERLKTYAHLFDDKVMKQLKRRRYTGWGRLSRKLINGIRDKQSGKTILDFLKSDGFANRNFMQLIHDDSLTFKEDIQKAQVSGQGDSLHEHIANLAGSPAIKKGILQTVKVVDELVKVMGRHKPENIVIEMARENQTTQKGQKNSRERMKRIEEGIKELGSQILKEHPVENTQLQNEKLYLYYLQNGRDMYVDQELDINRLSDYDVDHIVPQSFLKDDSIDNKVLTRSDKARGKSDNVPSEEVVKKMKNYWRQLLNAKLITQRKFDNLTKAERGGLSELDKAGFIKRQLVETRQITKHVAQILDSRMNTKYDENDKLIREVKVITLKSKLVSDFRKDFQFYKVREINNYHHAHDAYLNAVVGTALIKKYPKLESEFVYGDYKVYDVRKMIAKSEQEIGKATAKYFFYSNIMNFFKTEITLANGEIRKRPLIETNGETGEIVWDKGRDFATVRKVLSMPQVNIVKKTEVQTGGFSKESILPKRNSDKLIARKKDWDPKKYGGFDSPTVAYSVLVVAKVEKGKSKKLKSVKELLGITIMERSSFEKNPIDFLEAKGYKEVKKDLIIKLPKYSLFELENGRKRMLASAGELQKGNELALPSKYVNFLYLASHYEKLKGSPEDNEQKQLFVEQHKHYLDEIIEQISEFSKRVILADANLDKVLSAYNKHRDKPIREQAENIIHLFTLTNLGAPAAFKYFDTTIDRKRYTSTKEVLDATLIHQSITGLYETRIDLSQLGGDGGPAPGGSGSSGGTLNIEDEHRLHETSKEPDVSLGSTWLSDFPQAWAETGGMGLAVRQAPLIIPLKATSTPVSIKQYPMSQEARLGIKPHIQRLLDQGILVPCQSPWNTPLLPVKKPGTNDYRPVQDLREVNKRVEDIHPTVPNPYNLLSGLPPSHQWYTVLDLKDAFFCLRLHPTSQPLFAFEWRDPEMGISGQLTWTRLPQGFKNSPTLFNEALHRDLADFRIQHPDLILLQYVDDLLLAATSELDCQQGTRALLQTLGNLGYRASAKKAQICQKQVKYLGYLLKEGQRWLTEARKETVMGQPTPKTPRQLREFLGKAGFCRLFIPGFAEMAAPLYPLTKPGTLFNWGPDQQKAYQEIKQALLTAPALGLPDLTKPFELFVDEKQGYAKGVLTQKLGPWRRPVAYLSKKLDPVAAGWPPCLRMVAAIAVLTKDAGKLTMGQPLVILAPHAVEALVKQPPDRWLSNARMTHYQALLLDTDRVQFGPVVALNPATLLPLPEEGLQHNCLDILAEAHGTRPDLTDQPLPDADHTWYTDGSSLLQEGQRKAGAAVTTETEVIWAKALPAGTSAQRAELIALTQALKMAEGKKLNVYTDSRYAFATAHIHGEIYRRRGWLTSEGKEIKNKDEILALLKALFLPKRLSIIHCPGHQKGHSAEARGNRMADQAARKAAITETPDTSTLLAGKRTADGSEFEKRTADGSEFESPKKKAKVE

SEQ ID NO: 3065 - protein, 2090 aa, synthetic construct; identical to SEQ ID NO: 2825

SEQ ID NO: 3066 - protein, 2090 aa, synthetic construct
MPAAKRVKLDGGDKKYSIGLDIGTNSVGWAVITDEYKVPSKKFKVLGNTDRHSIKKNLIGALLFDSGETAEATRLKRTARRRYTRRKNRICYLQEIFSNEMAKVDDSFFHRLEESFLVEEDKKHERHPIFGNIVDEVAYHEKYPTIYHLRKKLVDSTDKADLRLIYLALAHMIKFRGHFLIEGDLNPDNSDVDKLFIQLVQTYNQLFEENPINASGVDAKAILSARLSKSRRLENLIAQLPGEKKNGLFGNLIALSLGLTPNFKSNFDLAEDAKLQLSKDTYDDDLDNLLAQIGDQYADLFLAAKNLSDAILLSDILRVNTEITKAPLSASMIKRYDEHHQDLTLLKALVRQQLPEKYKEIFFDQSKNGYAGYIDGGASQEEFYKFIKPILEKMDGTEELLVKLNREDLLRKQRTFDNGSIPHQIHLGELHAILRRQEDFYPFLKDNREKIEKILTFRIPYYVGPLARGNSRFAWMTRKSEETITPWNFEEVVDKGASAQSFIERMTNFDKNLPNEKVLPKHSLLYEYFTVYNELTKVKYVTEGMRKPAFLSGEQKKAIVDLLFKTNRKVTVKQLKEDYFKKIECFDSVEISGVEDRFNASLGTYHDLLKIIKDKDFLDNEENEDILEDIVLTLTLFEDREMIEERLKTYAHLFDDKVMKQLKRRRYTGWGRLSRKLINGIRDKQSGKTILDFLKSDGFANRNFMQLIHDDSLTFKEDIQKAQVSGQGDSLHEHIANLAGSPAIKKGILQTVKVVDELVKVMGRHKPENIVIEMARENQTTQKGQKNSRERMKRIEEGIKELGSQILKEHPVENTQLQNEKLYLYYLQNGRDMYVDQELDINRLSDYDVDHIVPQSFLKDDSIDNKVLTRSDKARGKSDNVPSEEVVKKMKNYWRQLLNAKLITQRKFDNLTKAERGGLSELDKAGFIKRQLVETRQITKHVAQILDSRMNTKYDENDKLIREVKVITLKSKLVSDFRKDFQFYKVREINNYHHAHDAYLNAVVGTALIKKYPKLESEFVYGDYKVYDVRKMIAKSEQEIGKATAKYFFYSNIMNFFKTEITLANGEIRKRPLIETNGETGEIVWDKGRDFATVRKVLSMPQVNIVKKTEVQTGGFSKESILPKRNSDKLIARKKDWDPKKYGGFDSPTVAYSVLVVAKVEKGKSKKLKSVKELLGITIMERSSFEKNPIDFLEAKGYKEVKKDLIIKLPKYSLFELENGRKRMLASAGELQKGNELALPSKYVNFLYLASHYEKLKGSPEDNEQKQLFVEQHKHYLDEIIEQISEFSKRVILADANLDKVLSAYNKHRDKPIREQAENIIHLFTLTNLGAPAAFKYFDTTIDRKRYTSTKEVLDATLIHQSITGLYETRIDLSQLGGDGGPAPAPGGTLNIEDEHRLHETSKEPDVSLGSTWLSDFPQAWAETGGMGLAVRQAPLIIPLKATSTPVSIKQYPMSQEARLGIKPHIQRLLDQGILVPCQSPWNTPLLPVKKPGTNDYRPVQDLREVNKRVEDIHPTVPNPYNLLSGLPPSHQWYTVLDLKDAFFCLRLHPTSQPLFAFEWRDPEMGISGQLTWTRLPQGFKNSPTLFNEALHRDLADFRIQHPDLILLQYVDDLLLAATSELDCQQGTRALLQTLGNLGYRASAKKAQICQKQVKYLGYLLKEGQRWLTEARKETVMGQPTPKTPRQLREFLGKAGFCRLFIPGFAEMAAPLYPLTKPGTLFNWGPDQQKAYQEIKQALLTAPALGLPDLTKPFELFVDEKQGYAKGVLTQKLGPWRRPVAYLSKKLDPVAAGWPPCLRMVAAIAVLTKDAGKLTMGQPLVILAPHAVEALVKQPPDRWLSNARMTHYQALLLDTDRVQFGPVVALNPATLLPLPEEGLQHNCLDILAEAHGTRPDLTDQPLPDADHTWYTDGSSLLQEGQRKAGAAVTTETEVIWAKALPAGTSAQRAELIALTQALKMAEGKKLNVYTDSRYAFATAHIHGEIYRRRGWLTSEGKEIKNKDEILALLKALFLPKRLSIIHCPGHQKGHSAEARGNRMADQAARKAAITETPDTSTLLAGKRTADGSEFEKRTADGSEFESPKKKAKVE

SEQ ID NO: 3067 - protein, 2096 aa, synthetic construct; identical to SEQ ID NO: 2787

SEQ ID NO: 3068 - protein, 2096 aa, synthetic construct
MPAAKRVKLDGGDKKYSIGLDIGTNSVGWAVITDEYKVPSKKFKVLGNTDRHSIKKNLIGALLFDSGETAEATRLKRTARRRYTRRKNRICYLQEIFSNEMAKVDDSFFHRLEESFLVEEDKKHERHPIFGNIVDEVAYHEKYPTIYHLRKKLVDSTDKADLRLIYLALAHMIKFRGHFLIEGDLNPDNSDVDKLFIQLVQTYNQLFEENPINASGVDAKAILSARLSKSRRLENLIAQLPGEKKNGLFGNLIALSLGLTPNFKSNFDLAEDAKLQLSKDTYDDDLDNLLAQIGDQYADLFLAAKNLSDAILLSDILRVNTEITKAPLSASMIKRYDEHHQDLTLLKALVRQQLPEKYKEIFFDQSKNGYAGYIDGGASQEEFYKFIKPILEKMDGTEELLVKLNREDLLRKQRTFDNGSIPHQIHLGELHAILRRQEDFYPFLKDNREKIEKILTFRIPYYVGPLARGNSRFAWMTRKSEETITPWNFEEVVDKGASAQSFIERMTNFDKNLPNEKVLPKHSLLYEYFTVYNELTKVKYVTEGMRKPAFLSGEQKKAIVDLLFKTNRKVTVKQLKEDYFKKIECFDSVEISGVEDRFNASLGTYHDLLKIIKDKDFLDNEENEDILEDIVLTLTLFEDREMIEERLKTYAHLFDDKVMKQLKRRRYTGWGRLSRKLINGIRDKQSGKTILDFLKSDGFANRNFMQLIHDDSLTFKEDIQKAQVSGQGDSLHEHIANLAGSPAIKKGILQTVKVVDELVKVMGRHKPENIVIEMARENQTTQKGQKNSRERMKRIEEGIKELGSQILKEHPVENTQLQNEKLYLYYLQNGRDMYVDQELDINRLSDYDVDHIVPQSFLKDDSIDNKVLTRSDKARGKSDNVPSEEVVKKMKNYWRQLLNAKLITQRKFDNLTKAERGGLSELDKAGFIKRQLVETRQITKHVAQILDSRMNTKYDENDKLIREVKVITLKSKLVSDFRKDFQFYKVREINNYHHAHDAYLNAVVGTALIKKYPKLESEFVYGDYKVYDVRKMIAKSEQEIGKATAKYFFYSNIMNFFKTEITLANGEIRKRPLIETNGETGEIVWDKGRDFATVRKVLSMPQVNIVKKTEVQTGGFSKESILPKRNSDKLIARKKDWDPKKYGGFDSPTVAYSVLVVAKVEKGKSKKLKSVKELLGITIMERSSFEKNPIDFLEAKGYKEVKKDLIIKLPKYSLFELENGRKRMLASAGELQKGNELALPSKYVNFLYLASHYEKLKGSPEDNEQKQLFVEQHKHYLDEIIEQISEFSKRVILADANLDKVLSAYNKHRDKPIREQAENIIHLFTLTNLGAPAAFKYFDTTIDRKRYTSTKEVLDATLIHQSITGLYETRIDLSQLGGDGGPAPEAAAKGGGGGTLNIEDEHRLHETSKEPDVSLGSTWLSDFPQAWAETGGMGLAVRQAPLIIPLKATSTPVSIKQYPMSQEARLGIKPHIQRLLDQGILVPCQSPWNTPLLPVKKPGTNDYRPVQDLREVNKRVEDIHPTVPNPYNLLSGLPPSHQWYTVLDLKDAFFCLRLHPTSQPLFAFEWRDPEMGISGQLTWTRLPQGFKNSPTLFNEALHRDLADFRIQHPDLILLQYVDDLLLAATSELDCQQGTRALLQTLGNLGYRASAKKAQICQKQVKYLGYLLKEGQRWLTEARKETVMGQPTPKTPRQLREFLGKAGFCRLFIPGFAEMAAPLYPLTKPGTLFNWGPDQQKAYQEIKQALLTAPALGLPDLTKPFELFVDEKQGYAKGVLTQKLGPWRRPVAYLSKKLDPVAAGWPPCLRMVAAIAVLTKDAGKLTMGQPLVILAPHAVEALVKQPPDRWLSNARMTHYQALLLDTDRVQFGPVVALNPATLLPLPEEGLQHNCLDILAEAHGTRPDLTDQPLPDADHTWYTDGSSLLQEGQRKAGAAVTTETEVIWAKALPAGTSAQRAELIALTQALKMAEGKKLNVYTDSRYAFATAHIHGEIYRRRGWLTSEGKEIKNKDEILALLKALFLPKRLSIIHCPGHQKGHSAEARGNRMADQAARKAAITETPDTSTLLAGKRTADGSEFEKRTADGSEFESPKKKAKVE

SEQ ID NO: 3069 - protein, 2088 aa, synthetic construct
MPAAKRVKLDGGDKKYSIGLDIGTNSVGWAVITDEYKVPSKKFKVLGNTDRHSIKKNLIGALLFDSGETAEATRLKRTARRRYTRRKNRICYLQEIFSNEMAKVDDSFFHRLEESFLVEEDKKHERHPIFGNIVDEVAYHEKYPTIYHLRKKLVDSTDKADLRLIYLALAHMIKFRGHFLIEGDLNPDNSDVDKLFIQLVQTYNQLFEENPINASGVDAKAILSARLSKSRRLENLIAQLPGEKKNGLFGNLIALSLGLTPNFKSNFDLAEDAKLQLSKDTYDDDLDNLLAQIGDQYADLFLAAKNLSDAILLSDILRVNTEITKAPLSASMIKRYDEHHQDLTLLKALVRQQLPEKYKEIFFDQSKNGYAGYIDGGASQEEFYKFIKPILEKMDGTEELLVKLNREDLLRKQRTFDNGSIPHQIHLGELHAILRRQEDFYPFLKDNREKIEKILTFRIPYYVGPLARGNSRFAWMTRKSEETITPWNFEEVVDKGASAQSFIERMTNFDKNLPNEKVLPKHSLLYEYFTVYNELTKVKYVTEGMRKPAFLSGEQKKAIVDLLFKTNRKVTVKQLKEDYFKKIECFDSVEISGVEDRFNASLGTYHDLLKIIKDKDFLDNEENEDILEDIVLTLTLFEDREMIEERLKTYAHLFDDKVMKQLKRRRYTGWGRLSRKLINGIRDKQSGKTILDFLKSDGFANRNFMQLIHDDSLTFKEDIQKAQVSGQGDSLHEHIANLAGSPAIKKGILQTVKVVDELVKVMGRHKPENIVIEMARENQTTQKGQKNSRERMKRIEEGIKELGSQILKEHPVENTQLQNEKLYLYYLQNGRDMYVDQELDINRLSDYDVDHIVPQSFLKDDSIDNKVLTRSDKARGKSDNVPSEEVVKKMKNYWRQLLNAKLITQRKFDNLTKAERGGLSELDKAGFIKRQLVETRQITKHVAQILDSRMNTKYDENDKLIREVKVITLKSKLVSDFRKDFQFYKVREINNYHHAHDAYLNAVVGTALIKKYPKLESEFVYGDYKVYDVRKMIAKSEQEIGKATAKYFFYSNIMNFFKTEITLANGEIRKRPLIETNGETGEIVWDKGRDFATVRKVLSMPQVNIVKKTEVQTGGFSKESILPKRNSDKLIARKKDWDPKKYGGFDSPTVAYSVLVVAKVEKGKSKKLKSVKELLGITIMERSSFEKNPIDFLEAKGYKEVKKDLIIKLPKYSLFELENGRKRMLASAGELQKGNELALPSKYVNFLYLASHYEKLKGSPEDNEQKQLFVEQHKHYLDEIIEQISEFSKRVILADANLDKVLSAYNKHRDKPIREQAENIIHLFTLTNLGAPAAFKYFDTTIDRKRYTSTKEVLDATLIHQSITGLYETRIDLSQLGGDGGGSSGGTLNIEDEHRLHETSKEPDVSLGSTWLSDFPQAWAETGGMGLAVRQAPLIIPLKATSTPVSIKQYPMSQEARLGIKPHIQRLLDQGILVPCQSPWNTPLLPVKKPGTNDYRPVQDLREVNKRVEDIHPTVPNPYNLLSGLPPSHQWYTVLDLKDAFFCLRLHPTSQPLFAFEWRDPEMGISGQLTWTRLPQGFKNSPTLFNEALHRDLADFRIQHPDLILLQYVDDLLLAATSELDCQQGTRALLQTLGNLGYRASAKKAQICQKQVKYLGYLLKEGQRWLTEARKETVMGQPTPKTPRQLREFLGKAGFCRLFIPGFAEMAAPLYPLTKPGTLFNWGPDQQKAYQEIKQALLTAPALGLPDLTKPFELFVDEKQGYAKGVLTQKLGPWRRPVAYLSKKLDPVAAGWPPCLRMVAAIAVLTKDAGKLTMGQPLVILAPHAVEALVKQPPDRWLSNARMTHYQALLLDTDRVQFGPVVALNPATLLPLPEEGLQHNCLDILAEAHGTRPDLTDQPLPDADHTWYTDGSSLLQEGQRKAGAAVTTETEVIWAKALPAGTSAQRAELIALTQALKMAEGKKLNVYTDSRYAFATAHIHGEIYRRRGWLTSEGKEIKNKDEILALLKALFLPKRLSIIHCPGHQKGHSAEARGNRMADQAARKAAITETPDTSTLLAGKRTADGSEFEKRTADGSEFESPKKKAKVE

SEQ ID NO: 3070 - protein, 2094 aa, synthetic construct; identical to SEQ ID NO: 2809

SEQ ID NO: 3071 - protein, 2097 aa, synthetic construct; identical to SEQ ID NO: 2806

SEQ ID NO: 3072 - protein, 2096 aa, synthetic construct
MPAAKRVKLDGGDKKYSIGLDIGTNSVGWAVITDEYKVPSKKFKVLGNTDRHSIKKNLIGALLFDSGETAEATRLKRTARRRYTRRKNRICYLQEIFSNEMAKVDDSFFHRLEESFLVEEDKKHERHPIFGNIVDEVAYHEKYPTIYHLRKKLVDSTDKADLRLIYLALAHMIKFRGHFLIEGDLNPDNSDVDKLFIQLVQTYNQLFEENPINASGVDAKAILSARLSKSRRLENLIAQLPGEKKNGLFGNLIALSLGLTPNFKSNFDLAEDAKLQLSKDTYDDDLDNLLAQIGDQYADLFLAAKNLSDAILLSDILRVNTEITKAPLSASMIKRYDEHHQDLTLLKALVRQQLPEKYKEIFFDQSKNGYAGYIDGGASQEEFYKFIKPILEKMDGTEELLVKLNREDLLRKQRTFDNGSIPHQIHLGELHAILRRQEDFYPFLKDNREKIEKILTFRIPYYVGPLARGNSRFAWMTRKSEETITPWNFEEVVDKGASAQSFIERMTNFDKNLPNEKVLPKHSLLYEYFTVYNELTKVKYVTEGMRKPAFLSGEQKKAIVDLLFKTNRKVTVKQLKEDYFKKIECFDSVEISGVEDRFNASLGTYHDLLKIIKDKDFLDNEENEDILEDIVLTLTLFEDREMIEERLKTYAHLFDDKVMKQLKRRRYTGWGRLSRKLINGIRDKQSGKTILDFLKSDGFANRNFMQLIHDDSLTFKEDIQKAQVSGQGDSLHEHIANLAGSPAIKKGILQTVKVVDELVKVMGRHKPENIVIEMARENQTTQKGQKNSRERMKRIEEGIKELGSQILKEHPVENTQLQNEKLYLYYLQNGRDMYVDQELDINRLSDYDVDHIVPQSFLKDDSIDNKVLTRSDKARGKSDNVPSEEVVKKMKNYWRQLLNAKLITQRKFDNLTKAERGGLSELDKAGFIKRQLVETRQITKHVAQILDSRMNTKYDENDKLIREVKVITLKSKLVSDFRKDFQFYKVREINNYHHAHDAYLNAVVGTALIKKYPKLESEFVYGDYKVYDVRKMIAKSEQEIGKATAKYFFYSNIMNFFKTEITLANGEIRKRPLIETNGETGEIVWDKGRDFATVRKVLSMPQVNIVKKTEVQTGGFSKESILPKRNSDKLIARKKDWDPKKYGGFDSPTVAYSVLVVAKVEKGKSKKLKSVKELLGITIMERSSFEKNPIDFLEAKGYKEVKKDLIIKLPKYSLFELENGRKRMLASAGELQKGNELALPSKYVNFLYLASHYEKLKGSPEDNEQKQLFVEQHKHYLDEIIEQISEFSKRVILADANLDKVLSAYNKHRDKPIREQAENIIHLFTLTNLGAPAAFKYFDTTIDRKRYTSTKEVLDATLIHQSITGLYETRIDLSQLGGDGGGSSEAAAKGGGGGTLNIEDEHRLHETSKEPDVSLGSTWLSDFPQAWAETGGMGLAVRQAPLIIPLKATSTPVSIKQYPMSQEARLGIKPHIQRLLDQGILVPCQSPWNTPLLPVKKPGTNDYRPVQDLREVNKRVEDIHPTVPNPYNLLSGLPPSHQWYTVLDLKDAFFCLRLHPTSQPLFAFEWRDPEMGISGQLTWTRLPQGFKNSPTLFNEALHRDLADFRIQHPDLILLQYVDDLLLAATSELDCQQGTRALLQTLGNLGYRASAKKAQICQKQVKYLGYLLKEGQRWLTEARKETVMGQPTPKTPRQLREFLGKAGFCRLFIPGFAEMAAPLYPLTKPGTLFNWGPDQQKAYQEIKQALLTAPALGLPDLTKPFELFVDEKQGYAKGVLTQKLGPWRRPVAYLSKKLDPVAAGWPPCLRMVAAIAVLTKDAGKLTMGQPLVILAPHAVEALVKQPPDRWLSNARMTHYQALLLDTDRVQFGPVVALNPATLLPLPEEGLQHNCLDILAEAHGTRPDLTDQPLPDADHTWYTDGSSLLQEGQRKAGAAVTTETEVIWAKALPAGTSAQRAELIALTQALKMAEGKKLNVYTDSRYAFATAHIHGEIYRRRGWLTSEGKEIKNKDEILALLKALFLPKRLSIIHCPGHQKGHSAEARGNRMADQAARKAAITETPDTSTLLAGKRTADGSEFEKRTADGSEFESPKKKAKVE

SEQ ID NO: 3073 - protein, 2091 aa, synthetic construct
MPAAKRVKLDGGDKKYSIGLDIGTNSVGWAVITDEYKVPSKKFKVLGNTDRHSIKKNLIGALLFDSGETAEATRLKRTARRRYTRRKNRICYLQEIFSNEMAKVDDSFFHRLEESFLVEEDKKHERHPIFGNIVDEVAYHEKYPTIYHLRKKLVDSTDKADLRLIYLALAHMIKFRGHFLIEGDLNPDNSDVDKLFIQLVQTYNQLFEENPINASGVDAKAILSARLSKSRRLENLIAQLPGEKKNGLFGNLIALSLGLTPNFKSNFDLAEDAKLQLSKDTYDDDLDNLLAQIGDQYADLFLAAKNLSDAILLSDILRVNTEITKAPLSASMIKRYDEHHQDLTLLKALVRQQLPEKYKEIFFDQSKNGYAGYIDGGASQEEFYKFIKPILEKMDGTEELLVKLNREDLLRKQRTFDNGSIPHQIHLGELHAILRRQEDFYPFLKDNREKIEKILTFRIPYYVGPLARGNSRFAWMTRKSEETITPWNFEEVVDKGASAQSFIERMTNFDKNLPNEKVLPKHSLLYEYFTVYNELTKVKYVTEGMRKPAFLSGEQKKAIVDLLFKTNRKVTVKQLKEDYFKKIECFDSVEISGVEDRFNASLGTYHDLLKIIKDKDFLDNEENEDILEDIVLTLTLFEDREMIEERLKTYAHLFDDKVMKQLKRRRYTGWGRLSRKLINGIRDKQSGKTILDFLKSDGFANRNFMQLIHDDSLTFKEDIQKAQVSGQGDSLHEHIANLAGSPAIKKGILQTVKVVDELVKVMGRHKPENIVIEMARENQTTQKGQKNSRERMKRIEEGIKELGSQILKEHPVENTQLQNEKLYLYYLQNGRDMYVDQELDINRLSDYDVDHIVPQSFLKDDSIDNKVLTRSDKARGKSDNVPSEEVVKKMKNYWRQLLNAKLITQRKFDNLTKAERGGLSELDKAGFIKRQLVETRQITKHVAQILDSRMNTKYDENDKLIREVKVITLKSKLVSDFRKDFQFYKVREINNYHHAHDAYLNAVVGTALIKKYPKLESEFVYGDYKVYDVRKMIAKSEQEIGKATAKYFFYSNIMNFFKTEITLANGEIRKRPLIETNGETGEIVWDKGRDFATVRKVLSMPQVNIVKKTEVQTGGFSKESILPKRNSDKLIARKKDWDPKKYGGFDSPTVAYSVLVVAKVEKGKSKKLKSVKELLGITIMERSSFEKNPIDFLEAKGYKEVKKDLIIKLPKYSLFELENGRKRMLASAGELQKGNELALPSKYVNFLYLASHYEKLKGSPEDNEQKQLFVEQHKHYLDEIIEQISEFSKRVILADANLDKVLSAYNKHRDKPIREQAENIIHLFTLTNLGAPAAFKYFDTTIDRKRYTSTKEVLDATLIHQSITGLYETRIDLSQLGGDGGGGGPAPGGTLNIEDEHRLHETSKEPDVSLGSTWLSDFPQAWAETGGMGLAVRQAPLIIPLKATSTPVSIKQYPMSQEARLGIKPHIQRLLDQGILVPCQSPWNTPLLPVKKPGTNDYRPVQDLREVNKRVEDIHPTVPNPYNLLSGLPPSHQWYTVLDLKDAFFCLRLHPTSQPLFAFEWRDPEMGISGQLTWTRLPQGFKNSPTLFNEALHRDLADFRIQHPDLILLQYVDDLLLAATSELDCQQGTRALLQTLGNLGYRASAKKAQICQKQVKYLGYLLKEGQRWLTEARKETVMGQPTPKTPRQLREFLGKAGFCRLFIPGFAEMAAPLYPLTKPGTLFNWGPDQQKAYQEIKQALLTAPALGLPDLTKPFELFVDEKQGYAKGVLTQKLGPWRRPVAYLSKKLDPVAAGWPPCLRMVAAIAVLTKDAGKLTMGQPLVILAPHAVEALVKQPPDRWLSNARMTHYQALLLDTDRVQFGPVVALNPATLLPLPEEGLQHNCLDILAEAHGTRPDLTDQPLPDADHTWYTDGSSLLQEGQRKAGAAVTTETEVIWAKALPAGTSAQRAELIALTQALKMAEGKKLNVYTDSRYAFATAHIHGEIYRRRGWLTSEGKEIKNKDEILALLKALFLPKRLSIIHCPGHQKGHSAEARGNRMADQAARKAAITETPDTSTLLAGKRTADGSEFEKRTADGSEFESPKKKAKVE

SEQ ID NO: 3074 - protein, 2091 aa, synthetic construct; identical to SEQ ID NO: 2853

SEQ ID NO: 3075 - protein, 2094 aa, synthetic construct
MPAAKRVKLDGGDKKYSIGLDIGTNSVGWAVITDEYKVPSKKFKVLGNTDRHSIKKNLIGALLFDSGETAEATRLKRTARRRYTRRKNRICYLQEIFSNEMAKVDDSFFHRLEESFLVEEDKKHERHPIFGNIVDEVAYHEKYPTIYHLRKKLVDSTDKADLRLIYLALAHMIKFRGHFLIEGDLNPDNSDVDKLFIQLVQTYNQLFEENPINASGVDAKAILSARLSKSRRLENLIAQLPGEKKNGLFGNLIALSLGLTPNFKSNFDLAEDAKLQLSKDTYDDDLDNLLAQIGDQYADLFLAAKNLSDAILLSDILRVNTEITKAPLSASMIKRYDEHHQDLTLLKALVRQQLPEKYKEIFFDQSKNGYAGYIDGGASQEEFYKFIKPILEKMDGTEELLVKLNREDLLRKQRTFDNGSIPHQIHLGELHAILRRQEDFYPFLKDNREKIEKILTFRIPYYVGPLARGNSRFAWMTRKSEETITPWNFEEVVDKGASAQSFIERMTNFDKNLPNEKVLPKHSLLYEYFTVYNELTKVKYVTEGMRKPAFLSGEQKKAIVDLLFKTNRKVTVKQLKEDYFKKIECFDSVEISGVEDRFNASLGTYHDLLKIIKDKDFLDNEENEDILEDIVLTLTLFEDREMIEERLKTYAHLFDDKVMKQLKRRRYTGWGRLSRKLINGIRDKQSGKTILDFLKSDGFANRNFMQLIHDDSLTFKEDIQKAQVSGQGDSLHEHIANLAGSPAIKKGILQTVKVVDELVKVMGRHKPENIVIEMARENQTTQKGQKNSRERMKRIEEGIKELGSQILKEHPVENTQLQNEKLYLYYLQNGRDMYVDQELDINRLSDYDVDHIVPQSFLKDDSIDNKVLTRSDKARGKSDNVPSEEVVKKMKNYWRQLLNAKLITQRKFDNLTKAERGGLSELDKAGFIKRQLVETRQITKHVAQILDSRMNTKYDENDKLIREVKVITLKSKLVSDFRKDFQFYKVREINNYHHAHDAYLNAVVGTALIKKYPKLESEFVYGDYKVYDVRKMIAKSEQEIGKATAKYFFYSNIMNFFKTEITLANGEIRKRPLIETNGETGEIVWDKGRDFATVRKVLSMPQVNIVKKTEVQTGGFSKESILPKRNSDKLIARKKDWDPKKYGGFDSPTVAYSVLVVAKVEKGKSKKLKSVKELLGITIMERSSFEKNPIDFLEAKGYKEVKKDLIIKLPKYSLFELENGRKRMLASAGELQKGNELALPSKYVNFLYLASHYEKLKGSPEDNEQKQLFVEQHKHYLDEIIEQISEFSKRVILADANLDKVLSAYNKHRDKPIREQAENIIHLFTLTNLGAPAAFKYFDTTIDRKRYTSTKEVLDATLIHQSITGLYETRIDLSQLGGDGGGSSGGSPAPGGTLNIEDEHRLHETSKEPDVSLGSTWLSDFPQAWAETGGMGLAVRQAPLIIPLKATSTPVSIKQYPMSQEARLGIKPHIQRLLDQGILVPCQSPWNTPLLPVKKPGTNDYRPVQDLREVNKRVEDIHPTVPNPYNLLSGLPPSHQWYTVLDLKDAFFCLRLHPTSQPLFAFEWRDPEMGISGQLTWTRLPQGFKNSPTLFNEALHRDLADFRIQHPDLILLQYVDDLLLAATSELDCQQGTRALLQTLGNLGYRASAKKAQICQKQVKYLGYLLKEGQRWLTEARKETVMGQPTPKTPRQLREFLGKAGFCRLFIPGFAEMAAPLYPLTKPGTLFNWGPDQQKAYQEIKQALLTAPALGLPDLTKPFELFVDEKQGYAKGVLTQKLGPWRRPVAYLSKKLDPVAAGWPPCLRMVAAIAVLTKDAGKLTMGQPLVILAPHAVEALVKQPPDRWLSNARMTHYQALLLDTDRVQFGPVVALNPATLLPLPEEGLQHNCLDILAEAHGTRPDLTDQPLPDADHTWYTDGSSLLQEGQRKAGAAVTTETEVIWAKALPAGTSAQRAELIALTQALKMAEGKKLNVYTDSRYAFATAHIHGEIYRRRGWLTSEGKEIKNKDEILALLKALFLPKRLSIIHCPGHQKGHSAEARGNRMADQAARKAAITETPDTSTLLAGKRTADGSEFEKRTADGSEFESPKKKAKVE

SEQ ID NO: 3076 - protein, 2091 aa, synthetic construct; identical to SEQ ID NO: 2780

SEQ ID NO: 3077 - protein, 2101 aa, synthetic construct; identical to SEQ ID NO: 2858

SEQ ID NO: 3078 - protein, 2093 aa, synthetic construct; identical to SEQ ID NO: 2821

SEQ ID NO: 3079 - protein, 2100 aa, synthetic construct; identical to SEQ ID NO: 2788

SEQ ID NO: 3080 - protein, 2096 aa, synthetic construct
MPAAKRVKLDGGDKKYSIGLDIGTNSVGWAVITDEYKVPSKKFKVLGNTDRHSIKKNLIGALLFDSGETAEATRLKRTARRRYTRRKNRICYLQEIFSNEMAKVDDSFFHRLEESFLVEEDKKHERHPIFGNIVDEVAYHEKYPTIYHLRKKLVDSTDKADLRLIYLALAHMIKFRGHFLIEGDLNPDNSDVDKLFIQLVQTYNQLFEENPINASGVDAKAILSARLSKSRRLENLIAQLPGEKKNGLFGNLIALSLGLTPNFKSNFDLAEDAKLQLSKDTYDDDLDNLLAQIGDQYADLFLAAKNLSDAILLSDILRVNTEITKAPLSASMIKRYDEHHQDLTLLKALVRQQLPEKYKEIFFDQSKNGYAGYIDGGASQEEFYKFIKPILEKMDGTEELLVKLNREDLLRKQRTFDNGSIPHQIHLGELHAILRRQEDFYPFLKDNREKIEKILTFRIPYYVGPLARGNSRFAWMTRKSEETITPWNFEEVVDKGASAQSFIERMTNFDKNLPNEKVLPKHSLLYEYFTVYNELTKVKYVTEGMRKPAFLSGEQKKAIVDLLFKTNRKVTVKQLKEDYFKKIECFDSVEISGVEDRFNASLGTYHDLLKIIKDKDFLDNEENEDILEDIVLTLTLFEDREMIEERLKTYAHLFDDKVMKQLKRRRYTGWGRLSRKLINGIRDKQSGKTILDFLKSDGFANRNFMQLIHDDSLTFKEDIQKAQVSGQGDSLHEHIANLAGSPAIKKGILQTVKVVDELVKVMGRHKPENIVIEMARENQTTQKGQKNSRERMKRIEEGIKELGSQILKEHPVENTQLQNEKLYLYYLQNGRDMYVDQELDINRLSDYDVDHIVPQSFLKDDSIDNKVLTRSDKARGKSDNVPSEEVVKKMKNYWRQLLNAKLITQRKFDNLTKAERGGLSELDKAGFIKRQLVETRQITKHVAQILDSRMNTKYDENDKLIREVKVITLKSKLVSDFRKDFQFYKVREINNYHHAHDAYLNAVVGTALIKKYPKLESEFVYGDYKVYDVRKMIAKSEQEIGKATAKYFFYSNIMNFFKTEITLANGEIRKRPLIETNGETGEIVWDKGRDFATVRKVLSMPQVNIVKKTEVQTGGFSKESILPKRNSDKLIARKKDWDPKKYGGFDSPTVAYSVLVVAKVEKGKSKKLKSVKELLGITIMERSSFEKNPIDFLEAKGYKEVKKDLIIKLPKYSLFELENGRKRMLASAGELQKGNELALPSKYVNFLYLASHYEKLKGSPEDNEQKQLFVEQHKHYLDEIIEQISEFSKRVILADANLDKVLSAYNKHRDKPIREQAENIIHLFTLTNLGAPAAFKYFDTTIDRKRYTSTKEVLDATLIHQSITGLYETRIDLSQLGGDGGEAAAKPAPGGSGGTLNIEDEHRLHETSKEPDVSLGSTWLSDFPQAWAETGGMGLAVRQAPLIIPLKATSTPVSIKQYPMSQEARLGIKPHIQRLLDQGILVPCQSPWNTPLLPVKKPGTNDYRPVQDLREVNKRVEDIHPTVPNPYNLLSGLPPSHQWYTVLDLKDAFFCLRLHPTSQPLFAFEWRDPEMGISGQLTWTRLPQGFKNSPTLFNEALHRDLADFRIQHPDLILLQYVDDLLLAATSELDCQQGTRALLQTLGNLGYRASAKKAQICQKQVKYLGYLLKEGQRWLTEARKETVMGQPTPKTPRQLREFLGKAGFCRLFIPGFAEMAAPLYPLTKPGTLFNWGPDQQKAYQEIKQALLTAPALGLPDLTKPFELFVDEKQGYAKGVLTQKLGPWRRPVAYLSKKLDPVAAGWPPCLRMVAAIAVLTKDAGKLTMGQPLVILAPHAVEALVKQPPDRWLSNARMTHYQALLLDTDRVQFGPVVALNPATLLPLPEEGLQHNCLDILAEAHGTRPDLTDQPLPDADHTWYTDGSSLLQEGQRKAGAAVTTETEVIWAKALPAGTSAQRAELIALTQALKMAEGKKLNVYTDSRYAFATAHIHGEIYRRRGWLTSEGKEIKNKDEILALLKALFLPKRLSIIHCPGHQKGHSAEARGNRMADQAARKAAITETPDTSTLLAGKRTADGSEFEKRTADGSEFESPKKKAKVE

SEQ ID NO: 3081 - protein, 2115 aa, synthetic construct; identical to SEQ ID NO: 2827

SEQ ID NO: 3082 - protein, 2093 aa, synthetic construct; identical to SEQ ID NO: 2856

SEQ ID NO: 3083 - protein, 2096 aa, synthetic construct; identical to SEQ ID NO: 2786

SEQ ID NO: 3084 - protein, 2098 aa, synthetic construct; identical to SEQ ID NO: 2797

SEQ ID NO: 3085 - protein, 2096 aa, synthetic construct; identical to SEQ ID NO: 2830

SEQ ID NO: 3086 - protein, 2094 aa, synthetic construct
MPAAKRVKLDGGDKKYSIGLDIGTNSVGWAVITDEYKVPSKKFKVLGNTDRHSIKKNLIGALLFDSGETAEATRLKRTARRRYTRRKNRICYLQEIFSNEMAKVDDSFFHRLEESFLVEEDKKHERHPIFGNIVDEVAYHEKYPTIYHLRKKLVDSTDKADLRLIYLALAHMIKFRGHFLIEGDLNPDNSDVDKLFIQLVQTYNQLFEENPINASGVDAKAILSARLSKSRRLENLIAQLPGEKKNGLFGNLIALSLGLTPNFKSNFDLAEDAKLQLSKDTYDDDLDNLLAQIGDQYADLFLAAKNLSDAILLSDILRVNTEITKAPLSASMIKRYDEHHQDLTLLKALVRQQLPEKYKEIFFDQSKNGYAGYIDGGASQEEFYKFIKPILEKMDGTEELLVKLNREDLLRKQRTFDNGSIPHQIHLGELHAILRRQEDFYPFLKDNREKIEKILTFRIPYYVGPLARGNSRFAWMTRKSEETITPWNFEEVVDKGASAQSFIERMTNFDKNLPNEKVLPKHSLLYEYFTVYNELTKVKYVTEGMRKPAFLSGEQKKAIVDLLFKTNRKVTVKQLKEDYFKKIECFDSVEISGVEDRFNASLGTYHDLLKIIKDKDFLDNEENEDILEDIVLTLTLFEDREMIEERLKTYAHLFDDKVMKQLKRRRYTGWGRLSRKLINGIRDKQSGKTILDFLKSDGFANRNFMQLIHDDSLTFKEDIQKAQVSGQGDSLHEHIANLAGSPAIKKGILQTVKVVDELVKVMGRHKPENIVIEMARENQTTQKGQKNSRERMKRIEEGIKELGSQILKEHPVENTQLQNEKLYLYYLQNGRDMYVDQELDINRLSDYDVDHIVPQSFLKDDSIDNKVLTRSDKARGKSDNVPSEEVVKKMKNYWRQLLNAKLITQRKFDNLTKAERGGLSELDKAGFIKRQLVETRQITKHVAQILDSRMNTKYDENDKLIREVKVITLKSKLVSDFRKDFQFYKVREINNYHHAHDAYLNAVVGTALIKKYPKLESEFVYGDYKVYDVRKMIAKSEQEIGKATAKYFFYSNIMNFFKTEITLANGEIRKRPLIETNGETGEIVWDKGRDFATVRKVLSMPQVNIVKKTEVQTGGFSKESILPKRNSDKLIARKKDWDPKKYGGFDSPTVAYSVLVVAKVEKGKSKKLKSVKELLGITIMERSSFEKNPIDFLEAKGYKEVKKDLIIKLPKYSLFELENGRKRMLASAGELQKGNELALPSKYVNFLYLASHYEKLKGSPEDNEQKQLFVEQHKHYLDEIIEQISEFSKRVILADANLDKVLSAYNKHRDKPIREQAENIIHLFTLTNLGAPAAFKYFDTTIDRKRYTSTKEVLDATLIHQSITGLYETRIDLSQLGGDGGPAPAPAPAPGGTLNIEDEHRLHETSKEPDVSLGSTWLSDFPQAWAETGGMGLAVRQAPLIIPLKATSTPVSIKQYPMSQEARLGIKPHIQRLLDQGILVPCQSPWNTPLLPVKKPGTNDYRPVQDLREVNKRVEDIHPTVPNPYNLLSGLPPSHQWYTVLDLKDAFFCLRLHPTSQPLFAFEWRDPEMGISGQLTWTRLPQGFKNSPTLFNEALHRDLADFRIQHPDLILLQYVDDLLLAATSELDCQQGTRALLQTLGNLGYRASAKKAQICQKQVKYLGYLLKEGQRWLTEARKETVMGQPTPKTPRQLREFLGKAGFCRLFIPGFAEMAAPLYPLTKPGTLFNWGPDQQKAYQEIKQALLTAPALGLPDLTKPFELFVDEKQGYAKGVLTQKLGPWRRPVAYLSKKLDPVAAGWPPCLRMVAAIAVLTKDAGKLTMGQPLVILAPHAVEALVKQPPDRWLSNARMTHYQALLLDTDRVQFGPVVALNPATLLPLPEEGLQHNCLDILAEAHGTRPDLTDQPLPDADHTWYTDGSSLLQEGQRKAGAAVTTETEVIWAKALPAGTSAQRAELIALTQALKMAEGKKLNVYTDSRYAFATAHIHGEIYRRRGWLTSEGKEIKNKDEILALLKALFLPKRLSIIHCPGHQKGHSAEARGNRMADQAARKAAITETPDTSTLLAGKRTADGSEFEKRTADGSEFESPKKKAKVE

SEQ ID NO: 3087 - protein, 2091 aa, synthetic construct; identical to SEQ ID NO: 2808

SEQ ID NO: 3088 - protein, 2096 aa, synthetic construct; identical to SEQ ID NO: 2857

SEQ ID NO: 3089 - protein, 2091 aa, synthetic construct; identical to SEQ ID NO: 2855

SEQ ID NO: 3090 - protein, 2094 aa, synthetic construct; identical to SEQ ID NO: 2847

SEQ ID NO: 3091 - protein, 2096 aa, synthetic construct; identical to SEQ ID NO: 2798

SEQ ID NO: 3092 - protein, 2100 aa, synthetic construct; identical to SEQ ID NO: 2819

SEQ ID NO: 3093 - protein, 2094 aa, synthetic construct; identical to SEQ ID NO: 2835

SEQ ID NO: 3094 - protein, 2089 aa, synthetic construct
MPAAKRVKLDGGDKKYSIGLDIGTNSVGWAVITDEYKVPSKKFKVLGNTDRHSIKKNLIGALLFDSGETAEATRLKRTARRRYTRRKNRICYLQEIFSNEMAKVDDSFFHRLEESFLVEEDKKHERHPIFGNIVDEVAYHEKYPTIYHLRKKLVDSTDKADLRLIYLALAHMIKFRGHFLIEGDLNPDNSDVDKLFIQLVQTYNQLFEENPINASGVDAKAILSARLSKSRRLENLIAQLPGEKKNGLFGNLIALSLGLTPNFKSNFDLAEDAKLQLSKDTYDDDLDNLLAQIGDQYADLFLAAKNLSDAILLSDILRVNTEITKAPLSASMIKRYDEHHQDLTLLKALVRQQLPEKYKEIFFDQSKNGYAGYIDGGASQEEFYKFIKPILEKMDGTEELLVKLNREDLLRKQRTFDNGSIPHQIHLGELHAILRRQEDFYPFLKDNREKIEKILTFRIPYYVGPLARGNSRFAWMTRKSEETITPWNFEEVVDKGASAQSFIERMTNFDKNLPNEKVLPKHSLLYEYFTVYNELTKVKYVTEGMRKPAFLSGEQKKAIVDLLFKTNRKVTVKQLKEDYFKKIECFDSVEISGVEDRFNASLGTYHDLLKIIKDKDFLDNEENEDILEDIVLTLTLFEDREMIEERLKTYAHLFDDKVMKQLKRRRYTGWGRLSRKLINGIRDKQSGKTILDFLKSDGFANRNFMQLIHDDSLTFKEDIQKAQVSGQGDSLHEHIANLAGSPAIKKGILQTVKVVDELVKVMGRHKPENIVIEMARENQTTQKGQKNSRERMKRIEEGIKELGSQILKEHPVENTQLQNEKLYLYYLQNGRDMYVDQELDINRLSDYDVDHIVPQSFLKDDSIDNKVLTRSDKARGKSDNVPSEEVVKKMKNYWRQLLNAKLITQRKFDNLTKAERGGLSELDKAGFIKRQLVETRQITKHVAQILDSRMNTKYDENDKLIREVKVITLKSKLVSDFRKDFQFYKVREINNYHHAHDAYLNAVVGTALIKKYPKLESEFVYGDYKVYDVRKMIAKSEQEIGKATAKYFFYSNIMNFFKTEITLANGEIRKRPLIETNGETGEIVWDKGRDFATVRKVLSMPQVNIVKKTEVQTGGFSKESILPKRNSDKLIARKKDWDPKKYGGFDSPTVAYSVLVVAKVEKGKSKKLKSVKELLGITIMERSSFEKNPIDFLEAKGYKEVKKDLIIKLPKYSLFELENGRKRMLASAGELQKGNELALPSKYVNFLYLASHYEKLKGSPEDNEQKQLFVEQHKHYLDEIIEQISEFSKRVILADANLDKVLSAYNKHRDKPIREQAENIIHLFTLTNLGAPAAFKYFDTTIDRKRYTSTKEVLDATLIHQSITGLYETRIDLSQLGGDGGGGGGGGTLNIEDEHRLHETSKEPDVSLGSTWLSDFPQAWAETGGMGLAVRQAPLIIPLKATSTPVSIKQYPMSQEARLGIKPHIQRLLDQGILVPCQSPWNTPLLPVKKPGTNDYRPVQDLREVNKRVEDIHPTVPNPYNLLSGLPPSHQWYTVLDLKDAFFCLRLHPTSQPLFAFEWRDPEMGISGQLTWTRLPQGFKNSPTLFNEALHRDLADFRIQHPDLILLQYVDDLLLAATSELDCQQGTRALLQTLGNLGYRASAKKAQICQKQVKYLGYLLKEGQRWLTEARKETVMGQPTPKTPRQLREFLGKAGFCRLFIPGFAEMAAPLYPLTKPGTLFNWGPDQQKAYQEIKQALLTAPALGLPDLTKPFELFVDEKQGYAKGVLTQKLGPWRRPVAYLSKKLDPVAAGWPPCLRMVAAIAVLTKDAGKLTMGQPLVILAPHAVEALVKQPPDRWLSNARMTHYQALLLDTDRVQFGPVVALNPATLLPLPEEGLQHNCLDILAEAHGTRPDLTDQPLPDADHTWYTDGSSLLQEGQRKAGAAVTTETEVIWAKALPAGTSAQRAELIALTQALKMAEGKKLNVYTDSRYAFATAHIHGEIYRRRGWLTSEGKEIKNKDEILALLKALFLPKRLSIIHCPGHQKGHSAEARGNRMADQAARKAAITETPDTSTLLAGKRTADGSEFEKRTADGSEFESPKKKAKVE

SEQ ID NO: 3095 - protein, 2088 aa, synthetic construct
MPAAKRVKLDGGDKKYSIGLDIGTNSVGWAVITDEYKVPSKKFKVLGNTDRHSIKKNLIGALLFDSGETAEATRLKRTARRRYTRRKNRICYLQEIFSNEMAKVDDSFFHRLEESFLVEEDKKHERHPIFGNIVDEVAYHEKYPTIYHLRKKLVDSTDKADLRLIYLALAHMIKFRGHFLIEGDLNPDNSDVDKLFIQLVQTYNQLFEENPINASGVDAKAILSARLSKSRRLENLIAQLPGEKKNGLFGNLIALSLGLTPNFKSNFDLAEDAKLQLSKDTYDDDLDNLLAQIGDQYADLFLAAKNLSDAILLSDILRVNTEITKAPLSASMIKRYDEHHQDLTLLKALVRQQLPEKYKEIFFDQSKNGYAGYIDGGASQEEFYKFIKPILEKMDGTEELLVKLNREDLLRKQRTFDNGSIPHQIHLGELHAILRRQEDFYPFLKDNREKIEKILTFRIPYYVGPLARGNSRFAWMTRKSEETITPWNFEEVVDKGASAQSFIERMTNFDKNLPNEKVLPKHSLLYEYFTVYNELTKVKYVTEGMRKPAFLSGEQKKAIVDLLFKTNRKVTVKQLKEDYFKKIECFDSVEISGVEDRFNASLGTYHDLLKIIKDKDFLDNEENEDILEDIVLTLTLFEDREMIEERLKTYAHLFDDKVMKQLKRRRYTGWGRLSRKLINGIRDKQSGKTILDFLKSDGFANRNFMQLIHDDSLTFKEDIQKAQVSGQGDSLHEHIANLAGSPAIKKGILQTVKVVDELVKVMGRHKPENIVIEMARENQTTQKGQKNSRERMKRIEEGIKELGSQILKEHPVENTQLQNEKLYLYYLQNGRDMYVDQELDINRLSDYDVDHIVPQSFLKDDSIDNKVLTRSDKARGKSDNVPSEEVVKKMKNYWRQLLNAKLITQRKFDNLTKAERGGLSELDKAGFIKRQLVETRQITKHVAQILDSRMNTKYDENDKLIREVKVITLKSKLVSDFRKDFQFYKVREINNYHHAHDAYLNAVVGTALIKKYPKLESEFVYGDYKVYDVRKMIAKSEQEIGKATAKYFFYSNIMNFFKTEITLANGEIRKRPLIETNGETGEIVWDKGRDFATVRKVLSMPQVNIVKKTEVQTGGFSKESILPKRNSDKLIARKKDWDPKKYGGFDSPTVAYSVLVVAKVEKGKSKKLKSVKELLGITIMERSSFEKNPIDFLEAKGYKEVKKDLIIKLPKYSLFELENGRKRMLASAGELQKGNELALPSKYVNFLYLASHYEKLKGSPEDNEQKQLFVEQHKHYLDEIIEQISEFSKRVILADANLDKVLSAYNKHRDKPIREQAENIIHLFTLTNLGAPAAFKYFDTTIDRKRYTSTKEVLDATLIHQSITGLYETRIDLSQLGGDGGGGSGGTLNIEDEHRLHETSKEPDVSLGSTWLSDFPQAWAETGGMGLAVRQAPLIIPLKATSTPVSIKQYPMSQEARLGIKPHIQRLLDQGILVPCQSPWNTPLLPVKKPGTNDYRPVQDLREVNKRVEDIHPTVPNPYNLLSGLPPSHQWYTVLDLKDAFFCLRLHPTSQPLFAFEWRDPEMGISGQLTWTRLPQGFKNSPTLFNEALHRDLADFRIQHPDLILLQYVDDLLLAATSELDCQQGTRALLQTLGNLGYRASAKKAQICQKQVKYLGYLLKEGQRWLTEARKETVMGQPTPKTPRQLREFLGKAGFCRLFIPGFAEMAAPLYPLTKPGTLFNWGPDQQKAYQEIKQALLTAPALGLPDLTKPFELFVDEKQGYAKGVLTQKLGPWRRPVAYLSKKLDPVAAGWPPCLRMVAAIAVLTKDAGKLTMGQPLVILAPHAVEALVKQPPDRWLSNARMTHYQALLLDTDRVQFGPVVALNPATLLPLPEEGLQHNCLDILAEAHGTRPDLTDQPLPDADHTWYTDGSSLLQEGQRKAGAAVTTETEVIWAKALPAGTSAQRAELIALTQALKMAEGKKLNVYTDSRYAFATAHIHGEIYRRRGWLTSEGKEIKNKDEILALLKALFLPKRLSIIHCPGHQKGHSAEARGNRMADQAARKAAITETPDTSTLLAGKRTADGSEFEKRTADGSEFESPKKKAKVE

SEQ ID NO: 3096 - protein, 2092 aa, synthetic construct; identical to SEQ ID NO: 2790

SEQ ID NO: 3097 - protein, 2093 aa, synthetic construct; identical to SEQ ID NO: 2849

SEQ ID NO: 3098 - protein, 2094 aa, synthetic construct; identical to SEQ ID NO: 2793

SEQ ID NO: 3099 - protein, 2100 aa, synthetic construct; identical to SEQ ID NO: 2836

SEQ ID NO: 3100 - protein, 2092 aa, synthetic construct
MPAAKRVKLDGGDKKYSIGLDIGTNSVGWAVITDEYKVPSKKFKVLGNTDRHSIKKNLIGALLFDSGETAEATRLKRTARRRYTRRKNRICYLQEIFSNEMAKVDDSFFHRLEESFLVEEDKKHERHPIFGNIVDEVAYHEKYPTIYHLRKKLVDSTDKADLRLIYLALAHMIKFRGHFLIEGDLNPDNSDVDKLFIQLVQTYNQLFEENPINASGVDAKAILSARLSKSRRLENLIAQLPGEKKNGLFGNLIALSLGLTPNFKSNFDLAEDAKLQLSKDTYDDDLDNLLAQIGDQYADLFLAAKNLSDAILLSDILRVNTEITKAPLSASMIKRYDEHHQDLTLLKALVRQQLPEKYKEIFFDQSKNGYAGYIDGGASQEEFYKFIKPILEKMDGTEELLVKLNREDLLRKQRTFDNGSIPHQIHLGELHAILRRQEDFYPFLKDNREKIEKILTFRIPYYVGPLARGNSRFAWMTRKSEETITPWNFEEVVDKGASAQSFIERMTNFDKNLPNEKVLPKHSLLYEYFTVYNELTKVKYVTEGMRKPAFLSGEQKKAIVDLLFKTNRKVTVKQLKEDYFKKIECFDSVEISGVEDRFNASLGTYHDLLKIIKDKDFLDNEENEDILEDIVLTLTLFEDREMIEERLKTYAHLFDDKVMKQLKRRRYTGWGRLSRKLINGIRDKQSGKTILDFLKSDGFANRNFMQLIHDDSLTFKEDIQKAQVSGQGDSLHEHIANLAGSPAIKKGILQTVKVVDELVKVMGRHKPENIVIEMARENQTTQKGQKNSRERMKRIEEGIKELGSQILKEHPVENTQLQNEKLYLYYLQNGRDMYVDQELDINRLSDYDVDHIVPQSFLKDDSIDNKVLTRSDKARGKSDNVPSEEVVKKMKNYWRQLLNAKLITQRKFDNLTKAERGGLSELDKAGFIKRQLVETRQITKHVAQILDSRMNTKYDENDKLIREVKVITLKSKLVSDFRKDFQFYKVREINNYHHAHDAYLNAVVGTALIKKYPKLESEFVYGDYKVYDVRKMIAKSEQEIGKATAKYFFYSNIMNFFKTEITLANGEIRKRPLIETNGETGEIVWDKGRDFATVRKVLSMPQVNIVKKTEVQTGGFSKESILPKRNSDKLIARKKDWDPKKYGGFDSPTVAYSVLVVAKVEKGKSKKLKSVKELLGITIMERSSFEKNPIDFLEAKGYKEVKKDLIIKLPKYSLFELENGRKRMLASAGELQKGNELALPSKYVNFLYLASHYEKLKGSPEDNEQKQLFVEQHKHYLDEIIEQISEFSKRVILADANLDKVLSAYNKHRDKPIREQAENIIHLFTLTNLGAPAAFKYFDTTIDRKRYTSTKEVLDATLIHQSITGLYETRIDLSQLGGDGGPAPAPAPGGTLNIEDEHRLHETSKEPDVSLGSTWLSDFPQAWAETGGMGLAVRQAPLIIPLKATSTPVSIKQYPMSQEARLGIKPHIQRLLDQGILVPCQSPWNTPLLPVKKPGTNDYRPVQDLREVNKRVEDIHPTVPNPYNLLSGLPPSHQWYTVLDLKDAFFCLRLHPTSQPLFAFEWRDPEMGISGQLTWTRLPQGFKNSPTLFNEALHRDLADFRIQHPDLILLQYVDDLLLAATSELDCQQGTRALLQTLGNLGYRASAKKAQICQKQVKYLGYLLKEGQRWLTEARKETVMGQPTPKTPRQLREFLGKAGFCRLFIPGFAEMAAPLYPLTKPGTLFNWGPDQQKAYQEIKQALLTAPALGLPDLTKPFELFVDEKQGYAKGVLTQKLGPWRRPVAYLSKKLDPVAAGWPPCLRMVAAIAVLTKDAGKLTMGQPLVILAPHAVEALVKQPPDRWLSNARMTHYQALLLDTDRVQFGPVVALNPATLLPLPEEGLQHNCLDILAEAHGTRPDLTDQPLPDADHTWYTDGSSLLQEGQRKAGAAVTTETEVIWAKALPAGTSAQRAELIALTQALKMAEGKKLNVYTDSRYAFATAHIHGEIYRRRGWLTSEGKEIKNKDEILALLKALFLPKRLSIIHCPGHQKGHSAEARGNRMADQAARKAAITETPDTSTLLAGKRTADGSEFEKRTADGSEFESPKKKAKVE

SEQ ID NO: 3101 - protein, 2094 aa, synthetic construct; identical to SEQ ID NO: 2846

SEQ ID NO: 3102 - protein, 2096 aa, synthetic construct; identical to SEQ ID NO: 2842

SEQ ID NO: 3103 - protein, 2096 aa, synthetic construct; identical to SEQ ID NO: 2815

SEQ ID NO: 3104 - protein, 2096 aa, synthetic construct
MPAAKRVKLDGGDKKYSIGLDIGTNSVGWAVITDEYKVPSKKFKVLGNTDRHSIKKNLIGALLFDSGETAEATRLKRTARRRYTRRKNRICYLQEIFSNEMAKVDDSFFHRLEESFLVEEDKKHERHPIFGNIVDEVAYHEKYPTIYHLRKKLVDSTDKADLRLIYLALAHMIKFRGHFLIEGDLNPDNSDVDKLFIQLVQTYNQLFEENPINASGVDAKAILSARLSKSRRLENLIAQLPGEKKNGLFGNLIALSLGLTPNFKSNFDLAEDAKLQLSKDTYDDDLDNLLAQIGDQYADLFLAAKNLSDAILLSDILRVNTEITKAPLSASMIKRYDEHHQDLTLLKALVRQQLPEKYKEIFFDQSKNGYAGYIDGGASQEEFYKFIKPILEKMDGTEELLVKLNREDLLRKQRTFDNGSIPHQIHLGELHAILRRQEDFYPFLKDNREKIEKILTFRIPYYVGPLARGNSRFAWMTRKSEETITPWNFEEVVDKGASAQSFIERMTNFDKNLPNEKVLPKHSLLYEYFTVYNELTKVKYVTEGMRKPAFLSGEQKKAIVDLLFKTNRKVTVKQLKEDYFKKIECFDSVEISGVEDRFNASLGTYHDLLKIIKDKDFLDNEENEDILEDIVLTLTLFEDREMIEERLKTYAHLFDDKVMKQLKRRRYTGWGRLSRKLINGIRDKQSGKTILDFLKSDGFANRNFMQLIHDDSLTFKEDIQKAQVSGQGDSLHEHIANLAGSPAIKKGILQTVKVVDELVKVMGRHKPENIVIEMARENQTTQKGQKNSRERMKRIEEGIKELGSQILKEHPVENTQLQNEKLYLYYLQNGRDMYVDQELDINRLSDYDVDHIVPQSFLKDDSIDNKVLTRSDKARGKSDNVPSEEVVKKMKNYWRQLLNAKLITQRKFDNLTKAERGGLSELDKAGFIKRQLVETRQITKHVAQILDSRMNTKYDENDKLIREVKVITLKSKLVSDFRKDFQFYKVREINNYHHAHDAYLNAVVGTALIKKYPKLESEFVYGDYKVYDVRKMIAKSEQEIGKATAKYFFYSNIMNFFKTEITLANGEIRKRPLIETNGETGEIVWDKGRDFATVRKVLSMPQVNIVKKTEVQTGGFSKESILPKRNSDKLIARKKDWDPKKYGGFDSPTVAYSVLVVAKVEKGKSKKLKSVKELLGITIMERSSFEKNPIDFLEAKGYKEVKKDLIIKLPKYSLFELENGRKRMLASAGELQKGNELALPSKYVNFLYLASHYEKLKGSPEDNEQKQLFVEQHKHYLDEIIEQISEFSKRVILADANLDKVLSAYNKHRDKPIREQAENIIHLFTLTNLGAPAAFKYFDTTIDRKRYTSTKEVLDATLIHQSITGLYETRIDLSQLGGDGGPAPEAAAKGSSGGTLNIEDEHRLHETSKEPDVSLGSTWLSDFPQAWAETGGMGLAVRQAPLIIPLKATSTPVSIKQYPMSQEARLGIKPHIQRLLDQGILVPCQSPWNTPLLPVKKPGTNDYRPVQDLREVNKRVEDIHPTVPNPYNLLSGLPPSHQWYTVLDLKDAFFCLRLHPTSQPLFAFEWRDPEMGISGQLTWTRLPQGFKNSPTLFNEALHRDLADFRIQHPDLILLQYVDDLLLAATSELDCQQGTRALLQTLGNLGYRASAKKAQICQKQVKYLGYLLKEGQRWLTEARKETVMGQPTPKTPRQLREFLGKAGFCRLFIPGFAEMAAPLYPLTKPGTLFNWGPDQQKAYQEIKQALLTAPALGLPDLTKPFELFVDEKQGYAKGVLTQKLGPWRRPVAYLSKKLDPVAAGWPPCLRMVAAIAVLTKDAGKLTMGQPLVILAPHAVEALVKQPPDRWLSNARMTHYQALLLDTDRVQFGPVVALNPATLLPLPEEGLQHNCLDILAEAHGTRPDLTDQPLPDADHTWYTDGSSLLQEGQRKAGAAVTTETEVIWAKALPAGTSAQRAELIALTQALKMAEGKKLNVYTDSRYAFATAHIHGEIYRRRGWLTSEGKEIKNKDEILALLKALFLPKRLSIIHCPGHQKGHSAEARGNRMADQAARKAAITETPDTSTLLAGKRTADGSEFEKRTADGSEFESPKKKAKVE

SEQ ID NO: 3105 - protein, 2096 aa, synthetic construct
MPAAKRVKLDGGDKKYSIGLDIGTNSVGWAVITDEYKVPSKKFKVLGNTDRHSIKKNLIGALLFDSGETAEATRLKRTARRRYTRRKNRICYLQEIFSNEMAKVDDSFFHRLEESFLVEEDKKHERHPIFGNIVDEVAYHEKYPTIYHLRKKLVDSTDKADLRLIYLALAHMIKFRGHFLIEGDLNPDNSDVDKLFIQLVQTYNQLFEENPINASGVDAKAILSARLSKSRRLENLIAQLPGEKKNGLFGNLIALSLGLTPNFKSNFDLAEDAKLQLSKDTYDDDLDNLLAQIGDQYADLFLAAKNLSDAILLSDILRVNTEITKAPLSASMIKRYDEHHQDLTLLKALVRQQLPEKYKEIFFDQSKNGYAGYIDGGASQEEFYKFIKPILEKMDGTEELLVKLNREDLLRKQRTFDNGSIPHQIHLGELHAILRRQEDFYPFLKDNREKIEKILTFRIPYYVGPLARGNSRFAWMTRKSEETITPWNFEEVVDKGASAQSFIERMTNFDKNLPNEKVLPKHSLLYEYFTVYNELTKVKYVTEGMRKPAFLSGEQKKAIVDLLFKTNRKVTVKQLKEDYFKKIECFDSVEISGVEDRFNASLGTYHDLLKIIKDKDFLDNEENEDILEDIVLTLTLFEDREMIEERLKTYAHLFDDKVMKQLKRRRYTGWGRLSRKLINGIRDKQSGKTILDFLKSDGFANRNFMQLIHDDSLTFKEDIQKAQVSGQGDSLHEHIANLAGSPAIKKGILQTVKVVDELVKVMGRHKPENIVIEMARENQTTQKGQKNSRERMKRIEEGIKELGSQILKEHPVENTQLQNEKLYLYYLQNGRDMYVDQELDINRLSDYDVDHIVPQSFLKDDSIDNKVLTRSDKARGKSDNVPSEEVVKKMKNYWRQLLNAKLITQRKFDNLTKAERGGLSELDKAGFIKRQLVETRQITKHVAQILDSRMNTKYDENDKLIREVKVITLKSKLVSDFRKDFQFYKVREINNYHHAHDAYLNAVVGTALIKKYPKLESEFVYGDYKVYDVRKMIAKSEQEIGKATAKYFFYSNIMNFFKTEITLANGEIRKRPLIETNGETGEIVWDKGRDFATVRKVLSMPQVNIVKKTEVQTGGFSKESILPKRNSDKLIARKKDWDPKKYGGFDSPTVAYSVLVVAKVEKGKSKKLKSVKELLGITIMERSSFEKNPIDFLEAKGYKEVKKDLIIKLPKYSLFELENGRKRMLASAGELQKGNELALPSKYVNFLYLASHYEKLKGSPEDNEQKQLFVEQHKHYLDEIIEQISEFSKRVILADANLDKVLSAYNKHRDKPIREQAENIIHLFTLTNLGAPAAFKYFDTTIDRKRYTSTKEVLDATLIHQSITGLYETRIDLSQLGGDGGGSSEAAAKPAPGGTLNIEDEHRLHETSKEPDVSLGSTWLSDFPQAWAETGGMGLAVRQAPLIIPLKATSTPVSIKQYPMSQEARLGIKPHIQRLLDQGILVPCQSPWNTPLLPVKKPGTNDYRPVQDLREVNKRVEDIHPTVPNPYNLLSGLPPSHQWYTVLDLKDAFFCLRLHPTSQPLFAFEWRDPEMGISGQLTWTRLPQGFKNSPTLFNEALHRDLADFRIQHPDLILLQYVDDLLLAATSELDCQQGTRALLQTLGNLGYRASAKKAQICQKQVKYLGYLLKEGQRWLTEARKETVMGQPTPKTPRQLREFLGKAGFCRLFIPGFAEMAAPLYPLTKPGTLFNWGPDQQKAYQEIKQALLTAPALGLPDLTKPFELFVDEKQGYAKGVLTQKLGPWRRPVAYLSKKLDPVAAGWPPCLRMVAAIAVLTKDAGKLTMGQPLVILAPHAVEALVKQPPDRWLSNARMTHYQALLLDTDRVQFGPVVALNPATLLPLPEEGLQHNCLDILAEAHGTRPDLTDQPLPDADHTWYTDGSSLLQEGQRKAGAAVTTETEVIWAKALPAGTSAQRAELIALTQALKMAEGKKLNVYTDSRYAFATAHIHGEIYRRRGWLTSEGKEIKNKDEILALLKALFLPKRLSIIHCPGHQKGHSAEARGNRMADQAARKAAITETPDTSTLLAGKRTADGSEFEKRTADGSEFESPKKKAKVE

SEQ ID NO: 3106 - protein, 2094 aa, synthetic construct
MPAAKRVKLDGGDKKYSIGLDIGTNSVGWAVITDEYKVPSKKFKVLGNTDRHSIKKNLIGALLFDSGETAEATRLKRTARRRYTRRKNRICYLQEIFSNEMAKVDDSFFHRLEESFLVEEDKKHERHPIFGNIVDEVAYHEKYPTIYHLRKKLVDSTDKADLRLIYLALAHMIKFRGHFLIEGDLNPDNSDVDKLFIQLVQTYNQLFEENPINASGVDAKAILSARLSKSRRLENLIAQLPGEKKNGLFGNLIALSLGLTPNFKSNFDLAEDAKLQLSKDTYDDDLDNLLAQIGDQYADLFLAAKNLSDAILLSDILRVNTEITKAPLSASMIKRYDEHHQDLTLLKALVRQQLPEKYKEIFFDQSKNGYAGYIDGGASQEEFYKFIKPILEKMDGTEELLVKLNREDLLRKQRTFDNGSIPHQIHLGELHAILRRQEDFYPFLKDNREKIEKILTFRIPYYVGPLARGNSRFAWMTRKSEETITPWNFEEVVDKGASAQSFIERMTNFDKNLPNEKVLPKHSLLYEYFTVYNELTKVKYVTEGMRKPAFLSGEQKKAIVDLLFKTNRKVTVKQLKEDYFKKIECFDSVEISGVEDRFNASLGTYHDLLKIIKDKDFLDNEENEDILEDIVLTLTLFEDREMIEERLKTYAHLFDDKVMKQLKRRRYTGWGRLSRKLINGIRDKQSGKTILDFLKSDGFANRNFMQLIHDDSLTFKEDIQKAQVSGQGDSLHEHIANLAGSPAIKKGILQTVKVVDELVKVMGRHKPENIVIEMARENQTTQKGQKNSRERMKRIEEGIKELGSQILKEHPVENTQLQNEKLYLYYLQNGRDMYVDQELDINRLSDYDVDHIVPQSFLKDDSIDNKVLTRSDKARGKSDNVPSEEVVKKMKNYWRQLLNAKLITQRKFDNLTKAERGGLSELDKAGFIKRQLVETRQITKHVAQILDSRMNTKYDENDKLIREVKVITLKSKLVSDFRKDFQFYKVREINNYHHAHDAYLNAVVGTALIKKYPKLESEFVYGDYKVYDVRKMIAKSEQEIGKATAKYFFYSNIMNFFKTEITLANGEIRKRPLIETNGETGEIVWDKGRDFATVRKVLSMPQVNIVKKTEVQTGGFSKESILPKRNSDKLIARKKDWDPKKYGGFDSPTVAYSVLVVAKVEKGKSKKLKSVKELLGITIMERSSFEKNPIDFLEAKGYKEVKKDLIIKLPKYSLFELENGRKRMLASAGELQKGNELALPSKYVNFLYLASHYEKLKGSPEDNEQKQLFVEQHKHYLDEIIEQISEFSKRVILADANLDKVLSAYNKHRDKPIREQAENIIHLFTLTNLGAPAAFKYFDTTIDRKRYTSTKEVLDATLIHQSITGLYETRIDLSQLGGDGGPAPGSSGGSGGTLNIEDEHRLHETSKEPDVSLGSTWLSDFPQAWAETGGMGLAVRQAPLIIPLKATSTPVSIKQYPMSQEARLGIKPHIQRLLDQGILVPCQSPWNTPLLPVKKPGTNDYRPVQDLREVNKRVEDIHPTVPNPYNLLSGLPPSHQWYTVLDLKDAFFCLRLHPTSQPLFAFEWRDPEMGISGQLTWTRLPQGFKNSPTLFNEALHRDLADFRIQHPDLILLQYVDDLLLAATSELDCQQGTRALLQTLGNLGYRASAKKAQICQKQVKYLGYLLKEGQRWLTEARKETVMGQPTPKTPRQLREFLGKAGFCRLFIPGFAEMAAPLYPLTKPGTLFNWGPDQQKAYQEIKQALLTAPALGLPDLTKPFELFVDEKQGYAKGVLTQKLGPWRRPVAYLSKKLDPVAAGWPPCLRMVAAIAVLTKDAGKLTMGQPLVILAPHAVEALVKQPPDRWLSNARMTHYQALLLDTDRVQFGPVVALNPATLLPLPEEGLQHNCLDILAEAHGTRPDLTDQPLPDADHTWYTDGSSLLQEGQRKAGAAVTTETEVIWAKALPAGTSAQRAELIALTQALKMAEGKKLNVYTDSRYAFATAHIHGEIYRRRGWLTSEGKEIKNKDEILALLKALFLPKRLSIIHCPGHQKGHSAEARGNRMADQAARKAAITETPDTSTLLAGKRTADGSEFEKRTADGSEFESPKKKAKVE

SEQ ID NO: 3107 - protein, 2091 aa, synthetic construct; identical to SEQ ID NO: 2820

SEQ ID NO: 3108 - protein, 2096 aa, synthetic construct; identical to SEQ ID NO: 2782

SEQ ID NO: 3109 - protein, 2096 aa, synthetic construct; identical to SEQ ID NO: 2860

SEQ ID NO: 3110 - protein, 2095 aa, synthetic construct
MPAAKRVKLDGGDKKYSIGLDIGTNSVGWAVITDEYKVPSKKFKVLGNTDRHSIKKNLIGALLFDSGETAEATRLKRTARRRYTRRKNRICYLQEIFSNEMAKVDDSFFHRLEESFLVEEDKKHERHPIFGNIVDEVAYHEKYPTIYHLRKKLVDSTDKADLRLIYLALAHMIKFRGHFLIEGDLNPDNSDVDKLFIQLVQTYNQLFEENPINASGVDAKAILSARLSKSRRLENLIAQLPGEKKNGLFGNLIALSLGLTPNFKSNFDLAEDAKLQLSKDTYDDDLDNLLAQIGDQYADLFLAAKNLSDAILLSDILRVNTEITKAPLSASMIKRYDEHHQDLTLLKALVRQQLPEKYKEIFFDQSKNGYAGYIDGGASQEEFYKFIKPILEKMDGTEELLVKLNREDLLRKQRTFDNGSIPHQIHLGELHAILRRQEDFYPFLKDNREKIEKILTFRIPYYVGPLARGNSRFAWMTRKSEETITPWNFEEVVDKGASAQSFIERMTNFDKNLPNEKVLPKHSLLYEYFTVYNELTKVKYVTEGMRKPAFLSGEQKKAIVDLLFKTNRKVTVKQLKEDYFKKIECFDSVEISGVEDRFNASLGTYHDLLKIIKDKDFLDNEENEDILEDIVLTLTLFEDREMIEERLKTYAHLFDDKVMKQLKRRRYTGWGRLSRKLINGIRDKQSGKTILDFLKSDGFANRNFMQLIHDDSLTFKEDIQKAQVSGQGDSLHEHIANLAGSPAIKKGILQTVKVVDELVKVMGRHKPENIVIEMARENQTTQKGQKNSRERMKRIEEGIKELGSQILKEHPVENTQLQNEKLYLYYLQNGRDMYVDQELDINRLSDYDVDHIVPQSFLKDDSIDNKVLTRSDKARGKSDNVPSEEVVKKMKNYWRQLLNAKLITQRKFDNLTKAERGGLSELDKAGFIKRQLVETRQITKHVAQILDSRMNTKYDENDKLIREVKVITLKSKLVSDFRKDFQFYKVREINNYHHAHDAYLNAVVGTALIKKYPKLESEFVYGDYKVYDVRKMIAKSEQEIGKATAKYFFYSNIMNFFKTEITLANGEIRKRPLIETNGETGEIVWDKGRDFATVRKVLSMPQVNIVKKTEVQTGGFSKESILPKRNSDKLIARKKDWDPKKYGGFDSPTVAYSVLVVAKVEKGKSKKLKSVKELLGITIMERSSFEKNPIDFLEAKGYKEVKKDLIIKLPKYSLFELENGRKRMLASAGELQKGNELALPSKYVNFLYLASHYEKLKGSPEDNEQKQLFVEQHKHYLDEIIEQISEFSKRVILADANLDKVLSAYNKHRDKPIREQAENIIHLFTLTNLGAPAAFKYFDTTIDRKRYTSTKEVLDATLIHQSITGLYETRIDLSQLGGDGGGGGGSGGGGSGGTLNIEDEHRLHETSKEPDVSLGSTWLSDFPQAWAETGGMGLAVRQAPLIIPLKATSTPVSIKQYPMSQEARLGIKPHIQRLLDQGILVPCQSPWNTPLLPVKKPGTNDYRPVQDLREVNKRVEDIHPTVPNPYNLLSGLPPSHQWYTVLDLKDAFFCLRLHPTSQPLFAFEWRDPEMGISGQLTWTRLPQGFKNSPTLFNEALHRDLADFRIQHPDLILLQYVDDLLLAATSELDCQQGTRALLQTLGNLGYRASAKKAQICQKQVKYLGYLLKEGQRWLTEARKETVMGQPTPKTPRQLREFLGKAGFCRLFIPGFAEMAAPLYPLTKPGTLFNWGPDQQKAYQEIKQALLTAPALGLPDLTKPFELFVDEKQGYAKGVLTQKLGPWRRPVAYLSKKLDPVAAGWPPCLRMVAAIAVLTKDAGKLTMGQPLVILAPHAVEALVKQPPDRWLSNARMTHYQALLLDTDRVQFGPVVALNPATLLPLPEEGLQHNCLDILAEAHGTRPDLTDQPLPDADHTWYTDGSSLLQEGQRKAGAAVTTETEVIWAKALPAGTSAQRAELIALTQALKMAEGKKLNVYTDSRYAFATAHIHGEIYRRRGWLTSEGKEIKNKDEILALLKALFLPKRLSIIHCPGHQKGHSAEARGNRMADQAARKAAITETPDTSTLLAGKRTADGSEFEKRTADGSEFESPKKKAKVE

SEQ ID NO: 3111 - protein, 2094 aa, synthetic construct; identical to SEQ ID NO: 2800

SEQ ID NO: 3112 - protein, 2096 aa, synthetic construct; identical to SEQ ID NO: 2792

SEQ ID NO: 3113 - protein, 2091 aa, synthetic construct
MPAAKRVKLDGGDKKYSIGLDIGTNSVGWAVITDEYKVPSKKFKVLGNTDRHSIKKNLIGALLFDSGETAEATRLKRTARRRYTRRKNRICYLQEIFSNEMAKVDDSFFHRLEESFLVEEDKKHERHPIFGNIVDEVAYHEKYPTIYHLRKKLVDSTDKADLRLIYLALAHMIKFRGHFLIEGDLNPDNSDVDKLFIQLVQTYNQLFEENPINASGVDAKAILSARLSKSRRLENLIAQLPGEKKNGLFGNLIALSLGLTPNFKSNFDLAEDAKLQLSKDTYDDDLDNLLAQIGDQYADLFLAAKNLSDAILLSDILRVNTEITKAPLSASMIKRYDEHHQDLTLLKALVRQQLPEKYKEIFFDQSKNGYAGYIDGGASQEEFYKFIKPILEKMDGTEELLVKLNREDLLRKQRTFDNGSIPHQIHLGELHAILRRQEDFYPFLKDNREKIEKILTFRIPYYVGPLARGNSRFAWMTRKSEETITPWNFEEVVDKGASAQSFIERMTNFDKNLPNEKVLPKHSLLYEYFTVYNELTKVKYVTEGMRKPAFLSGEQKKAIVDLLFKTNRKVTVKQLKEDYFKKIECFDSVEISGVEDRFNASLGTYHDLLKIIKDKDFLDNEENEDILEDIVLTLTLFEDREMIEERLKTYAHLFDDKVMKQLKRRRYTGWGRLSRKLINGIRDKQSGKTILDFLKSDGFANRNFMQLIHDDSLTFKEDIQKAQVSGQGDSLHEHIANLAGSPAIKKGILQTVKVVDELVKVMGRHKPENIVIEMARENQTTQKGQKNSRERMKRIEEGIKELGSQILKEHPVENTQLQNEKLYLYYLQNGRDMYVDQELDINRLSDYDVDHIVPQSFLKDDSIDNKVLTRSDKARGKSDNVPSEEVVKKMKNYWRQLLNAKLITQRKFDNLTKAERGGLSELDKAGFIKRQLVETRQITKHVAQILDSRMNTKYDENDKLIREVKVITLKSKLVSDFRKDFQFYKVREINNYHHAHDAYLNAVVGTALIKKYPKLESEFVYGDYKVYDVRKMIAKSEQEIGKATAKYFFYSNIMNFFKTEITLANGEIRKRPLIETNGETGEIVWDKGRDFATVRKVLSMPQVNIVKKTEVQTGGFSKESILPKRNSDKLIARKKDWDPKKYGGFDSPTVAYSVLVVAKVEKGKSKKLKSVKELLGITIMERSSFEKNPIDFLEAKGYKEVKKDLIIKLPKYSLFELENGRKRMLASAGELQKGNELALPSKYVNFLYLASHYEKLKGSPEDNEQKQLFVEQHKHYLDEIIEQISEFSKRVILADANLDKVLSAYNKHRDKPIREQAENIIHLFTLTNLGAPAAFKYFDTTIDRKRYTSTKEVLDATLIHQSITGLYETRIDLSQLGGDGGGGSGSSGGTLNIEDEHRLHETSKEPDVSLGSTWLSDFPQAWAETGGMGLAVRQAPLIIPLKATSTPVSIKQYPMSQEARLGIKPHIQRLLDQGILVPCQSPWNTPLLPVKKPGTNDYRPVQDLREVNKRVEDIHPTVPNPYNLLSGLPPSHQWYTVLDLKDAFFCLRLHPTSQPLFAFEWRDPEMGISGQLTWTRLPQGFKNSPTLFNEALHRDLADFRIQHPDLILLQYVDDLLLAATSELDCQQGTRALLQTLGNLGYRASAKKAQICQKQVKYLGYLLKEGQRWLTEARKETVMGQPTPKTPRQLREFLGKAGFCRLFIPGFAEMAAPLYPLTKPGTLFNWGPDQQKAYQEIKQALLTAPALGLPDLTKPFELFVDEKQGYAKGVLTQKLGPWRRPVAYLSKKLDPVAAGWPPCLRMVAAIAVLTKDAGKLTMGQPLVILAPHAVEALVKQPPDRWLSNARMTHYQALLLDTDRVQFGPVVALNPATLLPLPEEGLQHNCLDILAEAHGTRPDLTDQPLPDADHTWYTDGSSLLQEGQRKAGAAVTTETEVIWAKALPAGTSAQRAELIALTQALKMAEGKKLNVYTDSRYAFATAHIHGEIYRRRGWLTSEGKEIKNKDEILALLKALFLPKRLSIIHCPGHQKGHSAEARGNRMADQAARKAAITETPDTSTLLAGKRTADGSEFEKRTADGSEFESPKKKAKVE

SEQ ID NO: 3114 - protein, 2090 aa, synthetic construct; identical to SEQ ID NO: 2834

SEQ ID NO: 3115 - protein, 2096 aa, synthetic construct
MPAAKRVKLDGGDKKYSIGLDIGTNSVGWAVITDEYKVPSKKFKVLGNTDRHSIKKNLIGALLFDSGETAEATRLKRTARRRYTRRKNRICYLQEIFSNEMAKVDDSFFHRLEESFLVEEDKKHERHPIFGNIVDEVAYHEKYPTIYHLRKKLVDSTDKADLRLIYLALAHMIKFRGHFLIEGDLNPDNSDVDKLFIQLVQTYNQLFEENPINASGVDAKAILSARLSKSRRLENLIAQLPGEKKNGLFGNLIALSLGLTPNFKSNFDLAEDAKLQLSKDTYDDDLDNLLAQIGDQYADLFLAAKNLSDAILLSDILRVNTEITKAPLSASMIKRYDEHHQDLTLLKALVRQQLPEKYKEIFFDQSKNGYAGYIDGGASQEEFYKFIKPILEKMDGTEELLVKLNREDLLRKQRTFDNGSIPHQIHLGELHAILRRQEDFYPFLKDNREKIEKILTFRIPYYVGPLARGNSRFAWMTRKSEETITPWNFEEVVDKGASAQSFIERMTNFDKNLPNEKVLPKHSLLYEYFTVYNELTKVKYVTEGMRKPAFLSGEQKKAIVDLLFKTNRKVTVKQLKEDYFKKIECFDSVEISGVEDRFNASLGTYHDLLKIIKDKDFLDNEENEDILEDIVLTLTLFEDREMIEERLKTYAHLFDDKVMKQLKRRRYTGWGRLSRKLINGIRDKQSGKTILDFLKSDGFANRNFMQLIHDDSLTFKEDIQKAQVSGQGDSLHEHIANLAGSPAIKKGILQTVKVVDELVKVMGRHKPENIVIEMARENQTTQKGQKNSRERMKRIEEGIKELGSQILKEHPVENTQLQNEKLYLYYLQNGRDMYVDQELDINRLSDYDVDHIVPQSFLKDDSIDNKVLTRSDKARGKSDNVPSEEVVKKMKNYWRQLLNAKLITQRKFDNLTKAERGGLSELDKAGFIKRQLVETRQITKHVAQILDSRMNTKYDENDKLIREVKVITLKSKLVSDFRKDFQFYKVREINNYHHAHDAYLNAVVGTALIKKYPKLESEFVYGDYKVYDVRKMIAKSEQEIGKATAKYFFYSNIMNFFKTEITLANGEIRKRPLIETNGETGEIVWDKGRDFATVRKVLSMPQVNIVKKTEVQTGGFSKESILPKRNSDKLIARKKDWDPKKYGGFDSPTVAYSVLVVAKVEKGKSKKLKSVKELLGITIMERSSFEKNPIDFLEAKGYKEVKKDLIIKLPKYSLFELENGRKRMLASAGELQKGNELALPSKYVNFLYLASHYEKLKGSPEDNEQKQLFVEQHKHYLDEIIEQISEFSKRVILADANLDKVLSAYNKHRDKPIREQAENIIHLFTLTNLGAPAAFKYFDTTIDRKRYTSTKEVLDATLIHQSITGLYETRIDLSQLGGDGGGGGGGSEAAAKGGTLNIEDEHRLHETSKEPDVSLGSTWLSDFPQAWAETGGMGLAVRQAPLIIPLKATSTPVSIKQYPMSQEARLGIKPHIQRLLDQGILVPCQSPWNTPLLPVKKPGTNDYRPVQDLREVNKRVEDIHPTVPNPYNLLSGLPPSHQWYTVLDLKDAFFCLRLHPTSQPLFAFEWRDPEMGISGQLTWTRLPQGFKNSPTLFNEALHRDLADFRIQHPDLILLQYVDDLLLAATSELDCQQGTRALLQTLGNLGYRASAKKAQICQKQVKYLGYLLKEGQRWLTEARKETVMGQPTPKTPRQLREFLGKAGFCRLFIPGFAEMAAPLYPLTKPGTLFNWGPDQQKAYQEIKQALLTAPALGLPDLTKPFELFVDEKQGYAKGVLTQKLGPWRRPVAYLSKKLDPVAAGWPPCLRMVAAIAVLTKDAGKLTMGQPLVILAPHAVEALVKQPPDRWLSNARMTHYQALLLDTDRVQFGPVVALNPATLLPLPEEGLQHNCLDILAEAHGTRPDLTDQPLPDADHTWYTDGSSLLQEGQRKAGAAVTTETEVIWAKALPAGTSAQRAELIALTQALKMAEGKKLNVYTDSRYAFATAHIHGEIYRRRGWLTSEGKEIKNKDEILALLKALFLPKRLSIIHCPGHQKGHSAEARGNRMADQAARKAAITETPDTSTLLAGKRTADGSEFEKRTADGSEFESPKKKAKVE

SEQ ID NO: 3116 - protein, 2096 aa, synthetic construct; identical to SEQ ID NO: 2789

SEQ ID NO: 3117 - protein, 2094 aa, synthetic construct; identical to SEQ ID NO: 2848

SEQ ID NO: 3118 - protein, 2096 aa, synthetic construct; identical to SEQ ID NO: 2805

SEQ ID NO: 3119 - protein, 2091 aa, synthetic construct; identical to SEQ ID NO: 2861

SEQ ID NO: 3120 - protein, 2115 aa, synthetic construct; identical to SEQ ID NO: 2813

SEQ ID NO: 3121 - protein, 2094 aa, synthetic construct
MPAAKRVKLDGGDKKYSIGLDIGTNSVGWAVITDEYKVPSKKFKVLGNTDRHSIKKNLIGALLFDSGETAEATRLKRTARRRYTRRKNRICYLQEIFSNEMAKVDDSFFHRLEESFLVEEDKKHERHPIFGNIVDEVAYHEKYPTIYHLRKKLVDSTDKADLRLIYLALAHMIKFRGHFLIEGDLNPDNSDVDKLFIQLVQTYNQLFEENPINASGVDAKAILSARLSKSRRLENLIAQLPGEKKNGLFGNLIALSLGLTPNFKSNFDLAEDAKLQLSKDTYDDDLDNLLAQIGDQYADLFLAAKNLSDAILLSDILRVNTEITKAPLSASMIKRYDEHHQDLTLLKALVRQQLPEKYKEIFFDQSKNGYAGYIDGGASQEEFYKFIKPILEKMDGTEELLVKLNREDLLRKQRTFDNGSIPHQIHLGELHAILRRQEDFYPFLKDNREKIEKILTFRIPYYVGPLARGNSRFAWMTRKSEETITPWNFEEVVDKGASAQSFIERMTNFDKNLPNEKVLPKHSLLYEYFTVYNELTKVKYVTEGMRKPAFLSGEQKKAIVDLLFKTNRKVTVKQLKEDYFKKIECFDSVEISGVEDRFNASLGTYHDLLKIIKDKDFLDNEENEDILEDIVLTLTLFEDREMIEERLKTYAHLFDDKVMKQLKRRRYTGWGRLSRKLINGIRDKQSGKTILDFLKSDGFANRNFMQLIHDDSLTFKEDIQKAQVSGQGDSLHEHIANLAGSPAIKKGILQTVKVVDELVKVMGRHKPENIVIEMARENQTTQKGQKNSRERMKRIEEGIKELGSQILKEHPVENTQLQNEKLYLYYLQNGRDMYVDQELDINRLSDYDVDHIVPQSFLKDDSIDNKVLTRSDKARGKSDNVPSEEVVKKMKNYWRQLLNAKLITQRKFDNLTKAERGGLSELDKAGFIKRQLVETRQITKHVAQILDSRMNTKYDENDKLIREVKVITLKSKLVSDFRKDFQFYKVREINNYHHAHDAYLNAVVGTALIKKYPKLESEFVYGDYKVYDVRKMIAKSEQEIGKATAKYFFYSNIMNFFKTEITLANGEIRKRPLIETNGETGEIVWDKGRDFATVRKVLSMPQVNIVKKTEVQTGGFSKESILPKRNSDKLIARKKDWDPKKYGGFDSPTVAYSVLVVAKVEKGKSKKLKSVKELLGITIMERSSFEKNPIDFLEAKGYKEVKKDLIIKLPKYSLFELENGRKRMLASAGELQKGNELALPSKYVNFLYLASHYEKLKGSPEDNEQKQLFVEQHKHYLDEIIEQISEFSKRVILADANLDKVLSAYNKHRDKPIREQAENIIHLFTLTNLGAPAAFKYFDTTIDRKRYTSTKEVLDATLIHQSITGLYETRIDLSQLGGDGGGGSGGGGSSGGTLNIEDEHRLHETSKEPDVSLGSTWLSDFPQAWAETGGMGLAVRQAPLIIPLKATSTPVSIKQYPMSQEARLGIKPHIQRLLDQGILVPCQSPWNTPLLPVKKPGTNDYRPVQDLREVNKRVEDIHPTVPNPYNLLSGLPPSHQWYTVLDLKDAFFCLRLHPTSQPLFAFEWRDPEMGISGQLTWTRLPQGFKNSPTLFNEALHRDLADFRIQHPDLILLQYVDDLLLAATSELDCQQGTRALLQTLGNLGYRASAKKAQICQKQVKYLGYLLKEGQRWLTEARKETVMGQPTPKTPRQLREFLGKAGFCRLFIPGFAEMAAPLYPLTKPGTLFNWGPDQQKAYQEIKQALLTAPALGLPDLTKPFELFVDEKQGYAKGVLTQKLGPWRRPVAYLSKKLDPVAAGWPPCLRMVAAIAVLTKDAGKLTMGQPLVILAPHAVEALVKQPPDRWLSNARMTHYQALLLDTDRVQFGPVVALNPATLLPLPEEGLQHNCLDILAEAHGTRPDLTDQPLPDADHTWYTDGSSLLQEGQRKAGAAVTTETEVIWAKALPAGTSAQRAELIALTQALKMAEGKKLNVYTDSRYAFATAHIHGEIYRRRGWLTSEGKEIKNKDEILALLKALFLPKRLSIIHCPGHQKGHSAEARGNRMADQAARKAAITETPDTSTLLAGKRTADGSEFEKRTADGSEFESPKKKAKVE

SEQ ID NO: 3122 - protein, 2094 aa, synthetic construct
MPAAKRVKLDGGDKKYSIGLDIGTNSVGWAVITDEYKVPSKKFKVLGNTDRHSIKKNLIGALLFDSGETAEATRLKRTARRRYTRRKNRICYLQEIFSNEMAKVDDSFFHRLEESFLVEEDKKHERHPIFGNIVDEVAYHEKYPTIYHLRKKLVDSTDKADLRLIYLALAHMIKFRGHFLIEGDLNPDNSDVDKLFIQLVQTYNQLFEENPINASGVDAKAILSARLSKSRRLENLIAQLPGEKKNGLFGNLIALSLGLTPNFKSNFDLAEDAKLQLSKDTYDDDLDNLLAQIGDQYADLFLAAKNLSDAILLSDILRVNTEITKAPLSASMIKRYDEHHQDLTLLKALVRQQLPEKYKEIFFDQSKNGYAGYIDGGASQEEFYKFIKPILEKMDGTEELLVKLNREDLLRKQRTFDNGSIPHQIHLGELHAILRRQEDFYPFLKDNREKIEKILTFRIPYYVGPLARGNSRFAWMTRKSEETITPWNFEEVVDKGASAQSFIERMTNFDKNLPNEKVLPKHSLLYEYFTVYNELTKVKYVTEGMRKPAFLSGEQKKAIVDLLFKTNRKVTVKQLKEDYFKKIECFDSVEISGVEDRFNASLGTYHDLLKIIKDKDFLDNEENEDILEDIVLTLTLFEDREMIEERLKTYAHLFDDKVMKQLKRRRYTGWGRLSRKLINGIRDKQSGKTILDFLKSDGFANRNFMQLIHDDSLTFKEDIQKAQVSGQGDSLHEHIANLAGSPAIKKGILQTVKVVDELVKVMGRHKPENIVIEMARENQTTQKGQKNSRERMKRIEEGIKELGSQILKEHPVENTQLQNEKLYLYYLQNGRDMYVDQELDINRLSDYDVDHIVPQSFLKDDSIDNKVLTRSDKARGKSDNVPSEEVVKKMKNYWRQLLNAKLITQRKFDNLTKAERGGLSELDKAGFIKRQLVETRQITKHVAQILDSRMNTKYDENDKLIREVKVITLKSKLVSDFRKDFQFYKVREINNYHHAHDAYLNAVVGTALIKKYPKLESEFVYGDYKVYDVRKMIAKSEQEIGKATAKYFFYSNIMNFFKTEITLANGEIRKRPLIETNGETGEIVWDKGRDFATVRKVLSMPQVNIVKKTEVQTGGFSKESILPKRNSDKLIARKKDWDPKKYGGFDSPTVAYSVLVVAKVEKGKSKKLKSVKELLGITIMERSSFEKNPIDFLEAKGYKEVKKDLIIKLPKYSLFELENGRKRMLASAGELQKGNELALPSKYVNFLYLASHYEKLKGSPEDNEQKQLFVEQHKHYLDEIIEQISEFSKRVILADANLDKVLSAYNKHRDKPIREQAENIIHLFTLTNLGAPAAFKYFDTTIDRKRYTSTKEVLDATLIHQSITGLYETRIDLSQLGGDGGGGSGSSPAPGGTLNIEDEHRLHETSKEPDVSLGSTWLSDFPQAWAETGGMGLAVRQAPLIIPLKATSTPVSIKQYPMSQEARLGIKPHIQRLLDQGILVPCQSPWNTPLLPVKKPGTNDYRPVQDLREVNKRVEDIHPTVPNPYNLLSGLPPSHQWYTVLDLKDAFFCLRLHPTSQPLFAFEWRDPEMGISGQLTWTRLPQGFKNSPTLFNEALHRDLADFRIQHPDLILLQYVDDLLLAATSELDCQQGTRALLQTLGNLGYRASAKKAQICQKQVKYLGYLLKEGQRWLTEARKETVMGQPTPKTPRQLREFLGKAGFCRLFIPGFAEMAAPLYPLTKPGTLFNWGPDQQKAYQEIKQALLTAPALGLPDLTKPFELFVDEKQGYAKGVLTQKLGPWRRPVAYLSKKLDPVAAGWPPCLRMVAAIAVLTKDAGKLTMGQPLVILAPHAVEALVKQPPDRWLSNARMTHYQALLLDTDRVQFGPVVALNPATLLPLPEEGLQHNCLDILAEAHGTRPDLTDQPLPDADHTWYTDGSSLLQEGQRKAGAAVTTETEVIWAKALPAGTSAQRAELIALTQALKMAEGKKLNVYTDSRYAFATAHIHGEIYRRRGWLTSEGKEIKNKDEILALLKALFLPKRLSIIHCPGHQKGHSAEARGNRMADQAARKAAITETPDTSTLLAGKRTADGSEFEKRTADGSEFESPKKKAKVE

SEQ ID NO: 3123 - protein, 2090 aa, synthetic construct; identical to SEQ ID NO: 2823

SEQ ID NO: 3124 - protein, 2094 aa, synthetic construct; identical to SEQ ID NO: 2833

SEQ ID NO: 3125 - protein, 2096 aa, synthetic construct; identical to SEQ ID NO: 2794

SEQ ID NO: 3126 - protein, 2100 aa, synthetic construct; identical to SEQ ID NO: 2802

SEQ ID NO: 3127 - protein, 2096 aa, synthetic construct; identical to SEQ ID NO: 2839

SEQ ID NO: 3128 - protein, 2094 aa, synthetic construct; identical to SEQ ID NO: 2841

SEQ ID NO: 3129 - protein, 2096 aa, synthetic construct
MPAAKRVKLDGGDKKYSIGLDIGTNSVGWAVITDEYKVPSKKFKVLGNTDRHSIKKNLIGALLFDSGETAEATRLKRTARRRYTRRKNRICYLQEIFSNEMAKVDDSFFHRLEESFLVEEDKKHERHPIFGNIVDEVAYHEKYPTIYHLRKKLVDSTDKADLRLIYLALAHMIKFRGHFLIEGDLNPDNSDVDKLFIQLVQTYNQLFEENPINASGVDAKAILSARLSKSRRLENLIAQLPGEKKNGLFGNLIALSLGLTPNFKSNFDLAEDAKLQLSKDTYDDDLDNLLAQIGDQYADLFLAAKNLSDAILLSDILRVNTEITKAPLSASMIKRYDEHHQDLTLLKALVRQQLPEKYKEIFFDQSKNGYAGYIDGGASQEEFYKFIKPILEKMDGTEELLVKLNREDLLRKQRTFDNGSIPHQIHLGELHAILRRQEDFYPFLKDNREKIEKILTFRIPYYVGPLARGNSRFAWMTRKSEETITPWNFEEVVDKGASAQSFIERMTNFDKNLPNEKVLPKHSLLYEYFTVYNELTKVKYVTEGMRKPAFLSGEQKKAIVDLLFKTNRKVTVKQLKEDYFKKIECFDSVEISGVEDRFNASLGTYHDLLKIIKDKDFLDNEENEDILEDIVLTLTLFEDREMIEERLKTYAHLFDDKVMKQLKRRRYTGWGRLSRKLINGIRDKQSGKTILDFLKSDGFANRNFMQLIHDDSLTFKEDIQKAQVSGQGDSLHEHIANLAGSPAIKKGILQTVKVVDELVKVMGRHKPENIVIEMARENQTTQKGQKNSRERMKRIEEGIKELGSQILKEHPVENTQLQNEKLYLYYLQNGRDMYVDQELDINRLSDYDVDHIVPQSFLKDDSIDNKVLTRSDKARGKSDNVPSEEVVKKMKNYWRQLLNAKLITQRKFDNLTKAERGGLSELDKAGFIKRQLVETRQITKHVAQILDSRMNTKYDENDKLIREVKVITLKSKLVSDFRKDFQFYKVREINNYHHAHDAYLNAVVGTALIKKYPKLESEFVYGDYKVYDVRKMIAKSEQEIGKATAKYFFYSNIMNFFKTEITLANGEIRKRPLIETNGETGEIVWDKGRDFATVRKVLSMPQVNIVKKTEVQTGGFSKESILPKRNSDKLIARKKDWDPKKYGGFDSPTVAYSVLVVAKVEKGKSKKLKSVKELLGITIMERSSFEKNPIDFLEAKGYKEVKKDLIIKLPKYSLFELENGRKRMLASAGELQKGNELALPSKYVNFLYLASHYEKLKGSPEDNEQKQLFVEQHKHYLDEIIEQISEFSKRVILADANLDKVLSAYNKHRDKPIREQAENIIHLFTLTNLGAPAAFKYFDTTIDRKRYTSTKEVLDATLIHQSITGLYETRIDLSQLGGDGGGGSGGGEAAAKGGTLNIEDEHRLHETSKEPDVSLGSTWLSDFPQAWAETGGMGLAVRQAPLIIPLKATSTPVSIKQYPMSQEARLGIKPHIQRLLDQGILVPCQSPWNTPLLPVKKPGTNDYRPVQDLREVNKRVEDIHPTVPNPYNLLSGLPPSHQWYTVLDLKDAFFCLRLHPTSQPLFAFEWRDPEMGISGQLTWTRLPQGFKNSPTLFNEALHRDLADFRIQHPDLILLQYVDDLLLAATSELDCQQGTRALLQTLGNLGYRASAKKAQICQKQVKYLGYLLKEGQRWLTEARKETVMGQPTPKTPRQLREFLGKAGFCRLFIPGFAEMAAPLYPLTKPGTLFNWGPDQQKAYQEIKQALLTAPALGLPDLTKPFELFVDEKQGYAKGVLTQKLGPWRRPVAYLSKKLDPVAAGWPPCLRMVAAIAVLTKDAGKLTMGQPLVILAPHAVEALVKQPPDRWLSNARMTHYQALLLDTDRVQFGPVVALNPATLLPLPEEGLQHNCLDILAEAHGTRPDLTDQPLPDADHTWYTDGSSLLQEGQRKAGAAVTTETEVIWAKALPAGTSAQRAELIALTQALKMAEGKKLNVYTDSRYAFATAHIHGEIYRRRGWLTSEGKEIKNKDEILALLKALFLPKRLSIIHCPGHQKGHSAEARGNRMADQAARKAAITETPDTSTLLAGKRTADGSEFEKRTADGSEFESPKKKAKVE

SEQ ID NO: 3130 - protein, 2094 aa, synthetic construct; identical to SEQ ID NO: 2801

SEQ ID NO: 3131 - protein, 2096 aa, synthetic construct
MPAAKRVKLDGGDKKYSIGLDIGTNSVGWAVITDEYKVPSKKFKVLGNTDRHSIKKNLIGALLFDSGETAEATRLKRTARRRYTRRKNRICYLQEIFSNEMAKVDDSFFHRLEESFLVEEDKKHERHPIFGNIVDEVAYHEKYPTIYHLRKKLVDSTDKADLRLIYLALAHMIKFRGHFLIEGDLNPDNSDVDKLFIQLVQTYNQLFEENPINASGVDAKAILSARLSKSRRLENLIAQLPGEKKNGLFGNLIALSLGLTPNFKSNFDLAEDAKLQLSKDTYDDDLDNLLAQIGDQYADLFLAAKNLSDAILLSDILRVNTEITKAPLSASMIKRYDEHHQDLTLLKALVRQQLPEKYKEIFFDQSKNGYAGYIDGGASQEEFYKFIKPILEKMDGTEELLVKLNREDLLRKQRTFDNGSIPHQIHLGELHAILRRQEDFYPFLKDNREKIEKILTFRIPYYVGPLARGNSRFAWMTRKSEETITPWNFEEVVDKGASAQSFIERMTNFDKNLPNEKVLPKHSLLYEYFTVYNELTKVKYVTEGMRKPAFLSGEQKKAIVDLLFKTNRKVTVKQLKEDYFKKIECFDSVEISGVEDRFNASLGTYHDLLKIIKDKDFLDNEENEDILEDIVLTLTLFEDREMIEERLKTYAHLFDDKVMKQLKRRRYTGWGRLSRKLINGIRDKQSGKTILDFLKSDGFANRNFMQLIHDDSLTFKEDIQKAQVSGQGDSLHEHIANLAGSPAIKKGILQTVKVVDELVKVMGRHKPENIVIEMARENQTTQKGQKNSRERMKRIEEGIKELGSQILKEHPVENTQLQNEKLYLYYLQNGRDMYVDQELDINRLSDYDVDHIVPQSFLKDDSIDNKVLTRSDKARGKSDNVPSEEVVKKMKNYWRQLLNAKLITQRKFDNLTKAERGGLSELDKAGFIKRQLVETRQITKHVAQILDSRMNTKYDENDKLIREVKVITLKSKLVSDFRKDFQFYKVREINNYHHAHDAYLNAVVGTALIKKYPKLESEFVYGDYKVYDVRKMIAKSEQEIGKATAKYFFYSNIMNFFKTEITLANGEIRKRPLIETNGETGEIVWDKGRDFATVRKVLSMPQVNIVKKTEVQTGGFSKESILPKRNSDKLIARKKDWDPKKYGGFDSPTVAYSVLVVAKVEKGKSKKLKSVKELLGITIMERSSFEKNPIDFLEAKGYKEVKKDLIIKLPKYSLFELENGRKRMLASAGELQKGNELALPSKYVNFLYLASHYEKLKGSPEDNEQKQLFVEQHKHYLDEIIEQISEFSKRVILADANLDKVLSAYNKHRDKPIREQAENIIHLFTLTNLGAPAAFKYFDTTIDRKRYTSTKEVLDATLIHQSITGLYETRIDLSQLGGDGGGSSEAAAKGGSGGTLNIEDEHRLHETSKEPDVSLGSTWLSDFPQAWAETGGMGLAVRQAPLIIPLKATSTPVSIKQYPMSQEARLGIKPHIQRLLDQGILVPCQSPWNTPLLPVKKPGTNDYRPVQDLREVNKRVEDIHPTVPNPYNLLSGLPPSHQWYTVLDLKDAFFCLRLHPTSQPLFAFEWRDPEMGISGQLTWTRLPQGFKNSPTLFNEALHRDLADFRIQHPDLILLQYVDDLLLAATSELDCQQGTRALLQTLGNLGYRASAKKAQICQKQVKYLGYLLKEGQRWLTEARKETVMGQPTPKTPRQLREFLGKAGFCRLFIPGFAEMAAPLYPLTKPGTLFNWGPDQQKAYQEIKQALLTAPALGLPDLTKPFELFVDEKQGYAKGVLTQKLGPWRRPVAYLSKKLDPVAAGWPPCLRMVAAIAVLTKDAGKLTMGQPLVILAPHAVEALVKQPPDRWLSNARMTHYQALLLDTDRVQFGPVVALNPATLLPLPEEGLQHNCLDILAEAHGTRPDLTDQPLPDADHTWYTDGSSLLQEGQRKAGAAVTTETEVIWAKALPAGTSAQRAELIALTQALKMAEGKKLNVYTDSRYAFATAHIHGEIYRRRGWLTSEGKEIKNKDEILALLKALFLPKRLSIIHCPGHQKGHSAEARGNRMADQAARKAAITETPDTSTLLAGKRTADGSEFEKRTADGSEFESPKKKAKVE

SEQ ID NO: 3132 - protein, 2118 aa, synthetic construct
MPAAKRVKLDGGDKKYSIGLDIGTNSVGWAVITDEYKVPSKKFKVLGNTDRHSIKKNLIGALLFDSGETAEATRLKRTARRRYTRRKNRICYLQEIFSNEMAKVDDSFFHRLEESFLVEEDKKHERHPIFGNIVDEVAYHEKYPTIYHLRKKLVDSTDKADLRLIYLALAHMIKFRGHFLIEGDLNPDNSDVDKLFIQLVQTYNQLFEENPINASGVDAKAILSARLSKSRRLENLIAQLPGEKKNGLFGNLIALSLGLTPNFKSNFDLAEDAKLQLSKDTYDDDLDNLLAQIGDQYADLFLAAKNLSDAILLSDILRVNTEITKAPLSASMIKRYDEHHQDLTLLKALVRQQLPEKYKEIFFDQSKNGYAGYIDGGASQEEFYKFIKPILEKMDGTEELLVKLNREDLLRKQRTFDNGSIPHQIHLGELHAILRRQEDFYPFLKDNREKIEKILTFRIPYYVGPLARGNSRFAWMTRKSEETITPWNFEEVVDKGASAQSFIERMTNFDKNLPNEKVLPKHSLLYEYFTVYNELTKVKYVTEGMRKPAFLSGEQKKAIVDLLFKTNRKVTVKQLKEDYFKKIECFDSVEISGVEDRFNASLGTYHDLLKIIKDKDFLDNEENEDILEDIVLTLTLFEDREMIEERLKTYAHLFDDKVMKQLKRRRYTGWGRLSRKLINGIRDKQSGKTILDFLKSDGFANRNFMQLIHDDSLTFKEDIQKAQVSGQGDSLHEHIANLAGSPAIKKGILQTVKVVDELVKVMGRHKPENIVIEMARENQTTQKGQKNSRERMKRIEEGIKELGSQILKEHPVENTQLQNEKLYLYYLQNGRDMYVDQELDINRLSDYDVDHIVPQSFLKDDSIDNKVLTRSDKARGKSDNVPSEEVVKKMKNYWRQLLNAKLITQRKFDNLTKAERGGLSELDKAGFIKRQLVETRQITKHVAQILDSRMNTKYDENDKLIREVKVITLKSKLVSDFRKDFQFYKVREINNYHHAHDAYLNAVVGTALIKKYPKLESEFVYGDYKVYDVRKMIAKSEQEIGKATAKYFFYSNIMNFFKTEITLANGEIRKRPLIETNGETGEIVWDKGRDFATVRKVLSMPQVNIVKKTEVQTGGFSKESILPKRNSDKLIARKKDWDPKKYGGFDSPTVAYSVLVVAKVEKGKSKKLKSVKELLGITIMERSSFEKNPIDFLEAKGYKEVKKDLIIKLPKYSLFELENGRKRMLASAGELQKGNELALPSKYVNFLYLASHYEKLKGSPEDNEQKQLFVEQHKHYLDEIIEQISEFSKRVILADANLDKVLSAYNKHRDKPIREQAENIIHLFTLTNLGAPAAFKYFDTTIDRKRYTSTKEVLDATLIHQSITGLYETRIDLSQLGGDGGSGGSSGGSSGSETPGTSESATPESSGGSSGGSSGGTLNIEDEHRLHETSKEPDVSLGSTWLSDFPQAWAETGGMGLAVRQAPLIIPLKATSTPVSIKQYPMSQEARLGIKPHIQRLLDQGILVPCQSPWNTPLLPVKKPGTNDYRPVQDLREVNKRVEDIHPTVPNPYNLLSGLPPSHQWYTVLDLKDAFFCLRLHPTSQPLFAFEWRDPEMGISGQLTWTRLPQGFKNSPTLFNEALHRDLADFRIQHPDLILLQYVDDLLLAATSELDCQQGTRALLQTLGNLGYRASAKKAQICQKQVKYLGYLLKEGQRWLTEARKETVMGQPTPKTPRQLREFLGKAGFCRLFIPGFAEMAAPLYPLTKPGTLFNWGPDQQKAYQEIKQALLTAPALGLPDLTKPFELFVDEKQGYAKGVLTQKLGPWRRPVAYLSKKLDPVAAGWPPCLRMVAAIAVLTKDAGKLTMGQPLVILAPHAVEALVKQPPDRWLSNARMTHYQALLLDTDRVQFGPVVALNPATLLPLPEEGLQHNCLDILAEAHGTRPDLTDQPLPDADHTWYTDGSSLLQEGQRKAGAAVTTETEVIWAKALPAGTSAQRAELIALTQALKMAEGKKLNVYTDSRYAFATAHIHGEIYRRRGWLTSEGKEIKNKDEILALLKALFLPKRLSIIHCPGHQKGHSAEARGNRMADQAARKAAITETPDTSTLLAGKRTADGSEFEKRTADGSEFESPKKKAKVE

SEQ ID NO: 3133 - protein, 2094 aa, synthetic construct; identical to SEQ ID NO: 2859

SEQ ID NO: 3134 - protein, 2094 aa, synthetic construct; identical to SEQ ID NO: 2854

SEQ ID NO: 3135 - protein, 2091 aa, synthetic construct; identical to SEQ ID NO: 2832

SEQ ID NO: 3136 - protein, 2096 aa, synthetic construct
MPAAKRVKLDGGDKKYSIGLDIGTNSVGWAVITDEYKVPSKKFKVLGNTDRHSIKKNLIGALLFDSGETAEATRLKRTARRRYTRRKNRICYLQEIFSNEMAKVDDSFFHRLEESFLVEEDKKHERHPIFGNIVDEVAYHEKYPTIYHLRKKLVDSTDKADLRLIYLALAHMIKFRGHFLIEGDLNPDNSDVDKLFIQLVQTYNQLFEENPINASGVDAKAILSARLSKSRRLENLIAQLPGEKKNGLFGNLIALSLGLTPNFKSNFDLAEDAKLQLSKDTYDDDLDNLLAQIGDQYADLFLAAKNLSDAILLSDILRVNTEITKAPLSASMIKRYDEHHQDLTLLKALVRQQLPEKYKEIFFDQSKNGYAGYIDGGASQEEFYKFIKPILEKMDGTEELLVKLNREDLLRKQRTFDNGSIPHQIHLGELHAILRRQEDFYPFLKDNREKIEKILTFRIPYYVGPLARGNSRFAWMTRKSEETITPWNFEEVVDKGASAQSFIERMTNFDKNLPNEKVLPKHSLLYEYFTVYNELTKVKYVTEGMRKPAFLSGEQKKAIVDLLFKTNRKVTVKQLKEDYFKKIECFDSVEISGVEDRFNASLGTYHDLLKIIKDKDFLDNEENEDILEDIVLTLTLFEDREMIEERLKTYAHLFDDKVMKQLKRRRYTGWGRLSRKLINGIRDKQSGKTILDFLKSDGFANRNFMQLIHDDSLTFKEDIQKAQVSGQGDSLHEHIANLAGSPAIKKGILQTVKVVDELVKVMGRHKPENIVIEMARENQTTQKGQKNSRERMKRIEEGIKELGSQILKEHPVENTQLQNEKLYLYYLQNGRDMYVDQELDINRLSDYDVDHIVPQSFLKDDSIDNKVLTRSDKARGKSDNVPSEEVVKKMKNYWRQLLNAKLITQRKFDNLTKAERGGLSELDKAGFIKRQLVETRQITKHVAQILDSRMNTKYDENDKLIREVKVITLKSKLVSDFRKDFQFYKVREINNYHHAHDAYLNAVVGTALIKKYPKLESEFVYGDYKVYDVRKMIAKSEQEIGKATAKYFFYSNIMNFFKTEITLANGEIRKRPLIETNGETGEIVWDKGRDFATVRKVLSMPQVNIVKKTEVQTGGFSKESILPKRNSDKLIARKKDWDPKKYGGFDSPTVAYSVLVVAKVEKGKSKKLKSVKELLGITIMERSSFEKNPIDFLEAKGYKEVKKDLIIKLPKYSLFELENGRKRMLASAGELQKGNELALPSKYVNFLYLASHYEKLKGSPEDNEQKQLFVEQHKHYLDEIIEQISEFSKRVILADANLDKVLSAYNKHRDKPIREQAENIIHLFTLTNLGAPAAFKYFDTTIDRKRYTSTKEVLDATLIHQSITGLYETRIDLSQLGGDGGGGGPAPEAAAKGGTLNIEDEHRLHETSKEPDVSLGSTWLSDFPQAWAETGGMGLAVRQAPLIIPLKATSTPVSIKQYPMSQEARLGIKPHIQRLLDQGILVPCQSPWNTPLLPVKKPGTNDYRPVQDLREVNKRVEDIHPTVPNPYNLLSGLPPSHQWYTVLDLKDAFFCLRLHPTSQPLFAFEWRDPEMGISGQLTWTRLPQGFKNSPTLFNEALHRDLADFRIQHPDLILLQYVDDLLLAATSELDCQQGTRALLQTLGNLGYRASAKKAQICQKQVKYLGYLLKEGQRWLTEARKETVMGQPTPKTPRQLREFLGKAGFCRLFIPGFAEMAAPLYPLTKPGTLFNWGPDQQKAYQEIKQALLTAPALGLPDLTKPFELFVDEKQGYAKGVLTQKLGPWRRPVAYLSKKLDPVAAGWPPCLRMVAAIAVLTKDAGKLTMGQPLVILAPHAVEALVKQPPDRWLSNARMTHYQALLLDTDRVQFGPVVALNPATLLPLPEEGLQHNCLDILAEAHGTRPDLTDQPLPDADHTWYTDGSSLLQEGQRKAGAAVTTETEVIWAKALPAGTSAQRAELIALTQALKMAEGKKLNVYTDSRYAFATAHIHGEIYRRRGWLTSEGKEIKNKDEILALLKALFLPKRLSIIHCPGHQKGHSAEARGNRMADQAARKAAITETPDTSTLLAGKRTADGSEFEKRTADGSEFESPKKKAKVE

SEQ ID NO: 3137 - protein, 2091 aa, synthetic construct
MPAAKRVKLDGGDKKYSIGLDIGTNSVGWAVITDEYKVPSKKFKVLGNTDRHSIKKNLIGALLFDSGETAEATRLKRTARRRYTRRKNRICYLQEIFSNEMAKVDDSFFHRLEESFLVEEDKKHERHPIFGNIVDEVAYHEKYPTIYHLRKKLVDSTDKADLRLIYLALAHMIKFRGHFLIEGDLNPDNSDVDKLFIQLVQTYNQLFEENPINASGVDAKAILSARLSKSRRLENLIAQLPGEKKNGLFGNLIALSLGLTPNFKSNFDLAEDAKLQLSKDTYDDDLDNLLAQIGDQYADLFLAAKNLSDAILLSDILRVNTEITKAPLSASMIKRYDEHHQDLTLLKALVRQQLPEKYKEIFFDQSKNGYAGYIDGGASQEEFYKFIKPILEKMDGTEELLVKLNREDLLRKQRTFDNGSIPHQIHLGELHAILRRQEDFYPFLKDNREKIEKILTFRIPYYVGPLARGNSRFAWMTRKSEETITPWNFEEVVDKGASAQSFIERMTNFDKNLPNEKVLPKHSLLYEYFTVYNELTKVKYVTEGMRKPAFLSGEQKKAIVDLLFKTNRKVTVKQLKEDYFKKIECFDSVEISGVEDRFNASLGTYHDLLKIIKDKDFLDNEENEDILEDIVLTLTLFEDREMIEERLKTYAHLFDDKVMKQLKRRRYTGWGRLSRKLINGIRDKQSGKTILDFLKSDGFANRNFMQLIHDDSLTFKEDIQKAQVSGQGDSLHEHIANLAGSPAIKKGILQTVKVVDELVKVMGRHKPENIVIEMARENQTTQKGQKNSRERMKRIEEGIKELGSQILKEHPVENTQLQNEKLYLYYLQNGRDMYVDQELDINRLSDYDVDHIVPQSFLKDDSIDNKVLTRSDKARGKSDNVPSEEVVKKMKNYWRQLLNAKLITQRKFDNLTKAERGGLSELDKAGFIKRQLVETRQITKHVAQILDSRMNTKYDENDKLIREVKVITLKSKLVSDFRKDFQFYKVREINNYHHAHDAYLNAVVGTALIKKYPKLESEFVYGDYKVYDVRKMIAKSEQEIGKATAKYFFYSNIMNFFKTEITLANGEIRKRPLIETNGETGEIVWDKGRDFATVRKVLSMPQVNIVKKTEVQTGGFSKESILPKRNSDKLIARKKDWDPKKYGGFDSPTVAYSVLVVAKVEKGKSKKLKSVKELLGITIMERSSFEKNPIDFLEAKGYKEVKKDLIIKLPKYSLFELENGRKRMLASAGELQKGNELALPSKYVNFLYLASHYEKLKGSPEDNEQKQLFVEQHKHYLDEIIEQISEFSKRVILADANLDKVLSAYNKHRDKPIREQAENIIHLFTLTNLGAPAAFKYFDTTIDRKRYTSTKEVLDATLIHQSITGLYETRIDLSQLGGDGGPAPGGGGGTLNIEDEYRLHEISTEPDVSPGSTWLSDFPQAWAETGGMGLAVRQAPLIIPLKATSTPVSIKQYPMSQEAKLGIKPHIQRLLDQGILVPCQSPWNTPLLPVKKPGTNDYRPVQGLREVNKRVEDIHPTVPNPYNLLSGLPTSHRWYTVLDLKDAFFCLRLHPTSQPLFASEWRDPGMGISGQLTWTRLPQGFKNSPTLFDEALHRGLADFRIQHPDLILLQYVDDLLLAATSELDCQQGTRALLKTLGNLGYRASAKKAQICQKQVKYLGYLLREGQRWLTEARKETVMGQPTPKTPRQLREFLGTAGFCRLWIPRFAEMAAPLYPLTKTGTLFNWGPDQQKAYHEIKQALLTAPALGLPDLTKPFELFVDEKQGYAKGVLTQKLGPWRRPVAYLSKKLDPVAAGWPPCLRMVAAIAVLTKDAGKLTMGQPLVILAPHAVEALVKQPPDRWLSNARMTHYQAMLLDTDRVQFGPVVALNPATLLPLPEEGAPHDCLEILAETHGTEPDLTDQPIPDADHTWYTDGSSFLQEGQRKAGAAVTTETEVIWARALPAGTSAQRAELIALTQALKMAEGKRLNVYTDSRYAFATAHIHGEIYKRRGLLTSEGREIKNKSEILALLKALFLPKRLSIIHCLGHQKGDSAEARGNRLADQAAREAAIKTPPDTSTLLAGKRTADGSEFEKRTADGSEFESPKKKAKVE

SEQ ID NO: 3138 - protein, 2088 aa, synthetic construct
MPAAKRVKLDGGDKKYSIGLDIGTNSVGWAVITDEYKVPSKKFKVLGNTDRHSIKKNLIGALLFDSGETAEATRLKRTARRRYTRRKNRICYLQEIFSNEMAKVDDSFFHRLEESFLVEEDKKHERHPIFGNIVDEVAYHEKYPTIYHLRKKLVDSTDKADLRLIYLALAHMIKFRGHFLIEGDLNPDNSDVDKLFIQLVQTYNQLFEENPINASGVDAKAILSARLSKSRRLENLIAQLPGEKKNGLFGNLIALSLGLTPNFKSNFDLAEDAKLQLSKDTYDDDLDNLLAQIGDQYADLFLAAKNLSDAILLSDILRVNTEITKAPLSASMIKRYDEHHQDLTLLKALVRQQLPEKYKEIFFDQSKNGYAGYIDGGASQEEFYKFIKPILEKMDGTEELLVKLNREDLLRKQRTFDNGSIPHQIHLGELHAILRRQEDFYPFLKDNREKIEKILTFRIPYYVGPLARGNSRFAWMTRKSEETITPWNFEEVVDKGASAQSFIERMTNFDKNLPNEKVLPKHSLLYEYFTVYNELTKVKYVTEGMRKPAFLSGEQKKAIVDLLFKTNRKVTVKQLKEDYFKKIECFDSVEISGVEDRFNASLGTYHDLLKIIKDKDFLDNEENEDILEDIVLTLTLFEDREMIEERLKTYAHLFDDKVMKQLKRRRYTGWGRLSRKLINGIRDKQSGKTILDFLKSDGFANRNFMQLIHDDSLTFKEDIQKAQVSGQGDSLHEHIANLAGSPAIKKGILQTVKVVDELVKVMGRHKPENIVIEMARENQTTQKGQKNSRERMKRIEEGIKELGSQILKEHPVENTQLQNEKLYLYYLQNGRDMYVDQELDINRLSDYDVDHIVPQSFLKDDSIDNKVLTRSDKARGKSDNVPSEEVVKKMKNYWRQLLNAKLITQRKFDNLTKAERGGLSELDKAGFIKRQLVETRQITKHVAQILDSRMNTKYDENDKLIREVKVITLKSKLVSDFRKDFQFYKVREINNYHHAHDAYLNAVVGTALIKKYPKLESEFVYGDYKVYDVRKMIAKSEQEIGKATAKYFFYSNIMNFFKTEITLANGEIRKRPLIETNGETGEIVWDKGRDFATVRKVLSMPQVNIVKKTEVQTGGFSKESILPKRNSDKLIARKKDWDPKKYGGFDSPTVAYSVLVVAKVEKGKSKKLKSVKELLGITIMERSSFEKNPIDFLEAKGYKEVKKDLIIKLPKYSLFELENGRKRMLASAGELQKGNELALPSKYVNFLYLASHYEKLKGSPEDNEQKQLFVEQHKHYLDEIIEQISEFSKRVILADANLDKVLSAYNKHRDKPIREQAENIIHLFTLTNLGAPAAFKYFDTTIDRKRYTSTKEVLDATLIHQSITGLYETRIDLSQLGGDGGGGSGGTLNIEDEYRLHEISTEPDVSPGSTWLSDFPQAWAETGGMGLAVRQAPLIIPLKATSTPVSIKQYPMSQEAKLGIKPHIQRLLDQGILVPCQSPWNTPLLPVKKPGTNDYRPVQGLREVNKRVEDIHPTVPNPYNLLSGLPTSHRWYTVLDLKDAFFCLRLHPTSQPLFASEWRDPGMGISGQLTWTRLPQGFKNSPTLFNEALHRGLADFRIQHPDLILLQYVDDLLLAATSELDCQQGTRALLKTLGNLGYRASAKKAQICQKQVKYLGYLLREGQRWLTEARKETVMGQPTPKTPRQLREFLGTAGFCRLWIPRFAEMAAPLYPLTKPGTLFNWGPDQQKAYHEIKQALLTAPALGLPDLTKPFELFVDEKQGYAKGVLTQKLGPWRRPVAYLSKKLDPVAAGWPPCLRMVAAIAVLTKDAGKLTMGQPLVILAPHAVEALVKQPPDRWLSNARMTHYQAMLLDTDRVQFGPVVALNPATLLPLPEEGAPHDCLEILAETHGTEPDLTDQPIPDADHTWYTDGSSFLQEGQRKAGAAVTTETEVIWARALPAGTSAQRAELIALTQALKMAEGKRLNVYTDSRYAFATAHIHGEIYKRRGWLTSEGREIKNKSEILALLKALFLPKRLSIIHCLGHQKGDSAEARGNRLADQAAREAAIKTPPDTSTLLAGKRTADGSEFEKRTADGSEFESPKKKAKVE

SEQ ID NO: 3139 - protein, 2091 aa, synthetic construct
MPAAKRVKLDGGDKKYSIGLDIGTNSVGWAVITDEYKVPSKKFKVLGNTDRHSIKKNLIGALLFDSGETAEATRLKRTARRRYTRRKNRICYLQEIFSNEMAKVDDSFFHRLEESFLVEEDKKHERHPIFGNIVDEVAYHEKYPTIYHLRKKLVDSTDKADLRLIYLALAHMIKFRGHFLIEGDLNPDNSDVDKLFIQLVQTYNQLFEENPINASGVDAKAILSARLSKSRRLENLIAQLPGEKKNGLFGNLIALSLGLTPNFKSNFDLAEDAKLQLSKDTYDDDLDNLLAQIGDQYADLFLAAKNLSDAILLSDILRVNTEITKAPLSASMIKRYDEHHQDLTLLKALVRQQLPEKYKEIFFDQSKNGYAGYIDGGASQEEFYKFIKPILEKMDGTEELLVKLNREDLLRKQRTFDNGSIPHQIHLGELHAILRRQEDFYPFLKDNREKIEKILTFRIPYYVGPLARGNSRFAWMTRKSEETITPWNFEEVVDKGASAQSFIERMTNFDKNLPNEKVLPKHSLLYEYFTVYNELTKVKYVTEGMRKPAFLSGEQKKAIVDLLFKTNRKVTVKQLKEDYFKKIECFDSVEISGVEDRFNASLGTYHDLLKIIKDKDFLDNEENEDILEDIVLTLTLFEDREMIEERLKTYAHLFDDKVMKQLKRRRYTGWGRLSRKLINGIRDKQSGKTILDFLKSDGFANRNFMQLIHDDSLTFKEDIQKAQVSGQGDSLHEHIANLAGSPAIKKGILQTVKVVDELVKVMGRHKPENIVIEMARENQTTQKGQKNSRERMKRIEEGIKELGSQILKEHPVENTQLQNEKLYLYYLQNGRDMYVDQELDINRLSDYDVDHIVPQSFLKDDSIDNKVLTRSDKARGKSDNVPSEEVVKKMKNYWRQLLNAKLITQRKFDNLTKAERGGLSELDKAGFIKRQLVETRQITKHVAQILDSRMNTKYDENDKLIREVKVITLKSKLVSDFRKDFQFYKVREINNYHHAHDAYLNAVVGTALIKKYPKLESEFVYGDYKVYDVRKMIAKSEQEIGKATAKYFFYSNIMNFFKTEITLANGEIRKRPLIETNGETGEIVWDKGRDFATVRKVLSMPQVNIVKKTEVQTGGFSKESILPKRNSDKLIARKKDWDPKKYGGFDSPTVAYSVLVVAKVEKGKSKKLKSVKELLGITIMERSSFEKNPIDFLEAKGYKEVKKDLIIKLPKYSLFELENGRKRMLASAGELQKGNELALPSKYVNFLYLASHYEKLKGSPEDNEQKQLFVEQHKHYLDEIIEQISEFSKRVILADANLDKVLSAYNKHRDKPIREQAENIIHLFTLTNLGAPAAFKYFDTTIDRKRYTSTKEVLDATLIHQSITGLYETRIDLSQLGGDGGPAPGGSGGTLNIEDEYRLHEISTEPDVSPGSTWLSDFPQAWAETGGMGLAVRQAPLIIPLKATSTPVSIKQYPMSQEAKLGIKPHIQRLLDQGILVPCQSPWNTPLLPVKKPGTNDYRPVQGLREVNKRVEDIHPTVPNPYNLLSGLPTSHRWYTVLDLKDAFFCLRLHPTSQPLFASEWRDPGMGISGQLTWTRLPQGFKNSPTLFNEALHRGLADFRIQHPDLILLQYVDDLLLAATSELDCQQGTRALLKTLGNLGYRASAKKAQICQKQVKYLGYLLREGQRWLTEARKETVMGQPTPKTPRQLREFLGTAGFCRLWIPRFAEMAAPLYPLTKPGTLFNWGPDQQKAYHEIKQALLTAPALGLPDLTKPFELFVDEKQGYAKGVLTQKLGPWRRPVAYLSKKLDPVAAGWPPCLRMVAAIAVLTKDAGKLTMGQPLVILAPHAVEALVKQPPDRWLSNARMTHYQAMLLDTDRVQFGPVVALNPATLLPLPEEGAPHDCLEILAETHGTEPDLTDQPIPDADHTWYTDGSSFLQEGQRKAGAAVTTETEVIWARALPAGTSAQRAELIALTQALKMAEGKRLNVYTDSRYAFATAHIHGEIYKRRGWLTSEGREIKNKSEILALLKALFLPKRLSIIHCLGHQKGDSAEARGNRLADQAAREAAIKTPPDTSTLLAGKRTADGSEFEKRTADGSEFESPKKKAKVE

SEQ ID NO: 3140 - protein, 2105 aa, synthetic construct
MPAAKRVKLDGGDKKYSIGLDIGTNSVGWAVITDEYKVPSKKFKVLGNTDRHSIKKNLIGALLFDSGETAEATRLKRTARRRYTRRKNRICYLQEIFSNEMAKVDDSFFHRLEESFLVEEDKKHERHPIFGNIVDEVAYHEKYPTIYHLRKKLVDSTDKADLRLIYLALAHMIKFRGHFLIEGDLNPDNSDVDKLFIQLVQTYNQLFEENPINASGVDAKAILSARLSKSRRLENLIAQLPGEKKNGLFGNLIALSLGLTPNFKSNFDLAEDAKLQLSKDTYDDDLDNLLAQIGDQYADLFLAAKNLSDAILLSDILRVNTEITKAPLSASMIKRYDEHHQDLTLLKALVRQQLPEKYKEIFFDQSKNGYAGYIDGGASQEEFYKFIKPILEKMDGTEELLVKLNREDLLRKQRTFDNGSIPHQIHLGELHAILRRQEDFYPFLKDNREKIEKILTFRIPYYVGPLARGNSRFAWMTRKSEETITPWNFEEVVDKGASAQSFIERMTNFDKNLPNEKVLPKHSLLYEYFTVYNELTKVKYVTEGMRKPAFLSGEQKKAIVDLLFKTNRKVTVKQLKEDYFKKIECFDSVEISGVEDRFNASLGTYHDLLKIIKDKDFLDNEENEDILEDIVLTLTLFEDREMIEERLKTYAHLFDDKVMKQLKRRRYTGWGRLSRKLINGIRDKQSGKTILDFLKSDGFANRNFMQLIHDDSLTFKEDIQKAQVSGQGDSLHEHIANLAGSPAIKKGILQTVKVVDELVKVMGRHKPENIVIEMARENQTTQKGQKNSRERMKRIEEGIKELGSQILKEHPVENTQLQNEKLYLYYLQNGRDMYVDQELDINRLSDYDVDHIVPQSFLKDDSIDNKVLTRSDKARGKSDNVPSEEVVKKMKNYWRQLLNAKLITQRKFDNLTKAERGGLSELDKAGFIKRQLVETRQITKHVAQILDSRMNTKYDENDKLIREVKVITLKSKLVSDFRKDFQFYKVREINNYHHAHDAYLNAVVGTALIKKYPKLESEFVYGDYKVYDVRKMIAKSEQEIGKATAKYFFYSNIMNFFKTEITLANGEIRKRPLIETNGETGEIVWDKGRDFATVRKVLSMPQVNIVKKTEVQTGGFSKESILPKRNSDKLIARKKDWDPKKYGGFDSPTVAYSVLVVAKVEKGKSKKLKSVKELLGITIMERSSFEKNPIDFLEAKGYKEVKKDLIIKLPKYSLFELENGRKRMLASAGELQKGNELALPSKYVNFLYLASHYEKLKGSPEDNEQKQLFVEQHKHYLDEIIEQISEFSKRVILADANLDKVLSAYNKHRDKPIREQAENIIHLFTLTNLGAPAAFKYFDTTIDRKRYTSTKEVLDATLIHQSITGLYETRIDLSQLGGDGGEAAAKEAAAKEAAAKEAAAKGGTLNIEDEYRLHEISTEPDVSPGSTWLSDFPQAWAETGGMGLAVRQAPLIIPLKATSTPVSIKQYPMSQEAKLGIKPHIQRLLDQGILVPCQSPWNTPLLPVKKPGTNDYRPVQGLREVNKRVEDIHPTVPNPYNLLSGLPTSHRWYTVLDLKDAFFCLRLHPTSQPLFASEWRDPGMGISGQLTWTRLPQGFKNSPTLFNEALHRGLADFRIQHPDLILLQYVDDLLLAATSELDCQQGTRALLKTLGNLGYRASAKKAQICQKQVKYLGYLLREGQRWLTEARKETVMGQPTPKTPRQLREFLGTAGFCRLWIPRFAEMAAPLYPLTKPGTLFNWGPDQQKAYHEIKQALLTAPALGLPDLTKPFELFVDEKQGYAKGVLTQKLGPWRRPVAYLSKKLDPVAAGWPPCLRMVAAIAVLTKDAGKLTMGQPLVILAPHAVEALVKQPPDRWLSNARMTHYQAMLLDTDRVQFGPVVALNPATLLPLPEEGAPHDCLEILAETHGTEPDLTDQPIPDADHTWYTDGSSFLQEGQRKAGAAVTTETEVIWARALPAGTSAQRAELIALTQALKMAEGKRLNVYTDSRYAFATAHIHGEIYKRRGWLTSEGREIKNKSEILALLKALFLPKRLSIIHCLGHQKGDSAEARGNRLADQAAREAAIKTPPDTSTLLAGKRTADGSEFEKRTADGSEFESPKKKAKVE

SEQ ID NO: 3141 - protein, 2151 aa, synthetic construct
MPAAKRVKLDGGDKKYSIGLDIGTNSVGWAVITDEYKVPSKKFKVLGNTDRHSIKKNLIGALLFDSGETAEATRLKRTARRRYTRRKNRICYLQEIFSNEMAKVDDSFFHRLEESFLVEEDKKHERHPIFGNIVDEVAYHEKYPTIYHLRKKLVDSTDKADLRLIYLALAHMIKFRGHFLIEGDLNPDNSDVDKLFIQLVQTYNQLFEENPINASGVDAKAILSARLSKSRRLENLIAQLPGEKKNGLFGNLIALSLGLTPNFKSNFDLAEDAKLQLSKDTYDDDLDNLLAQIGDQYADLFLAAKNLSDAILLSDILRVNTEITKAPLSASMIKRYDEHHQDLTLLKALVRQQLPEKYKEIFFDQSKNGYAGYIDGGASQEEFYKFIKPILEKMDGTEELLVKLNREDLLRKQRTFDNGSIPHQIHLGELHAILRRQEDFYPFLKDNREKIEKILTFRIPYYVGPLARGNSRFAWMTRKSEETITPWNFEEVVDKGASAQSFIERMTNFDKNLPNEKVLPKHSLLYEYFTVYNELTKVKYVTEGMRKPAFLSGEQKKAIVDLLFKTNRKVTVKQLKEDYFKKIECFDSVEISGVEDRFNASLGTYHDLLKIIKDKDFLDNEENEDILEDIVLTLTLFEDREMIEERLKTYAHLFDDKVMKQLKRRRYTGWGRLSRKLINGIRDKQSGKTILDFLKSDGFANRNFMQLIHDDSLTFKEDIQKAQVSGQGDSLHEHIANLAGSPAIKKGILQTVKVVDELVKVMGRHKPENIVIEMARENQTTQKGQKNSRERMKRIEEGIKELGSQILKEHPVENTQLQNEKLYLYYLQNGRDMYVDQELDINRLSDYDVDHIVPQSFLKDDSIDNKVLTRSDKARGKSDNVPSEEVVKKMKNYWRQLLNAKLITQRKFDNLTKAERGGLSELDKAGFIKRQLVETRQITKHVAQILDSRMNTKYDENDKLIREVKVITLKSKLVSDFRKDFQFYKVREINNYHHAHDAYLNAVVGTALIKKYPKLESEFVYGDYKVYDVRKMIAKSEQEIGKATAKYFFYSNIMNFFKTEITLANGEIRKRPLIETNGETGEIVWDKGRDFATVRKVLSMPQVNIVKKTEVQTGGFSKESILPKRNSDKLIARKKDWDPKKYGGFDSPTVAYSVLVVAKVEKGKSKKLKSVKELLGITIMERSSFEKNPIDFLEAKGYKEVKKDLIIKLPKYSLFELENGRKRMLASAGELQKGNELALPSKYVNFLYLASHYEKLKGSPEDNEQKQLFVEQHKHYLDEIIEQISEFSKRVILADANLDKVLSAYNKHRDKPIREQAENIIHLFTLTNLGAPAAFKYFDTTIDRKRYTSTKEVLDATLIHQSITGLYETRIDLSQLGGDGGAEAAAKEAAAKEAAAKEAAAKALEAEAAAKEAAAKEAAAKEAAAKAGGVQEISDSRPMLHIYLNGRRFLGLLDTGADKTCIAGRDWPANWPIHQTESSLQGLGMACGVARSSQPLRWQHEDKSGIIHPFVIPTLPFTLWGRDIMKDIKVRLMTDSPDDSQDLMIGAIESNLFADQISWKSDQPVWLNQWPLKQEKLQALQQLVTEQLQLGHLEESNSPWNTPVFVIKKKSGKWRLLQDLRAVNATMHDMGALQPGLPSPVAVPKGWEIIIIDLQDCFFNIKLHPEDCKRFAFSVPSPNFKRPYQRFQWKVLPQGMKNSPTLCQKFVDKAILTVRDKYQDSYIVHYMDDILLAHPSRSIVDEILTSMIQALNKHGLVVSTEKIQKYDNLKYLGTHIQGDSVSYQKLQIRTDKLRTLNDFQKLLGNINWIRPFLKLTTGELKPLFEILNGDSNPISTRKLTPEACKALQLMNERLSTARVKRLDLSQPWSLCILKTEYTPTACLWQDGVVEWIHLPHISPKVITPYDIFCTQLIIKGRHRSKELFSKDPDYIVVPYTKVQFDLLLQEKEDWPISLLGFLGEVHFHLPKDPLLTFTLQTAIIFPHMTSTTPLEKGIVIFTDGSANGRSVTYIQGREPIIKENTQNTAQQAEIVAVITAFEEVSQPFNLYTDSKYVTGLFPEIETATLSPRTKIYTELKHLQRLIHKRQEKFYIGHIRGHTGLPGPLAQGNAYADSLTRILTAAGKRTADGSEFEKRTADGSEFESPKKKAKVE

SEQ ID NO: 3142 - protein, 2130 aa, synthetic construct
MPAAKRVKLDGGDKKYSIGLDIGTNSVGWAVITDEYKVPSKKFKVLGNTDRHSIKKNLIGALLFDSGETAEATRLKRTARRRYTRRKNRICYLQEIFSNEMAKVDDSFFHRLEESFLVEEDKKHERHPIFGNIVDEVAYHEKYPTIYHLRKKLVDSTDKADLRLIYLALAHMIKFRGHFLIEGDLNPDNSDVDKLFIQLVQTYNQLFEENPINASGVDAKAILSARLSKSRRLENLIAQLPGEKKNGLFGNLIALSLGLTPNFKSNFDLAEDAKLQLSKDTYDDDLDNLLAQIGDQYADLFLAAKNLSDAILLSDILRVNTEITKAPLSASMIKRYDEHHQDLTLLKALVRQQLPEKYKEIFFDQSKNGYAGYIDGGASQEEFYKFIKPILEKMDGTEELLVKLNREDLLRKQRTFDNGSIPHQIHLGELHAILRRQEDFYPFLKDNREKIEKILTFRIPYYVGPLARGNSRFAWMTRKSEETITPWNFEEVVDKGASAQSFIERMTNFDKNLPNEKVLPKHSLLYEYFTVYNELTKVKYVTEGMRKPAFLSGEQKKAIVDLLFKTNRKVTVKQLKEDYFKKIECFDSVEISGVEDRFNASLGTYHDLLKIIKDKDFLDNEENEDILEDIVLTLTLFEDREMIEERLKTYAHLFDDKVMKQLKRRRYTGWGRLSRKLINGIRDKQSGKTILDFLKSDGFANRNFMQLIHDDSLTFKEDIQKAQVSGQGDSLHEHIANLAGSPAIKKGILQTVKVVDELVKVMGRHKPENIVIEMARENQTTQKGQKNSRERMKRIEEGIKELGSQILKEHPVENTQLQNEKLYLYYLQNGRDMYVDQELDINRLSDYDVDHIVPQSFLKDDSIDNKVLTRSDKARGKSDNVPSEEVVKKMKNYWRQLLNAKLITQRKFDNLTKAERGGLSELDKAGFIKRQLVETRQITKHVAQILDSRMNTKYDENDKLIREVKVITLKSKLVSDFRKDFQFYKVREINNYHHAHDAYLNAVVGTALIKKYPKLESEFVYGDYKVYDVRKMIAKSEQEIGKATAKYFFYSNIMNFFKTEITLANGEIRKRPLIETNGETGEIVWDKGRDFATVRKVLSMPQVNIVKKTEVQTGGFSKESILPKRNSDKLIARKKDWDPKKYGGFDSPTVAYSVLVVAKVEKGKSKKLKSVKELLGITIMERSSFEKNPIDFLEAKGYKEVKKDLIIKLPKYSLFELENGRKRMLASAGELQKGNELALPSKYVNFLYLASHYEKLKGSPEDNEQKQLFVEQHKHYLDEIIEQISEFSKRVILADANLDKVLSAYNKHRDKPIREQAENIIHLFTLTNLGAPAAFKYFDTTIDRKRYTSTKEVLDATLIHQSITGLYETRIDLSQLGGDGGEAAAKEAAAKEAAAKEAAAKEAAAKGGVQEISDSRPMLHIYLNGRRFLGLLDTGADKTCIAGRDWPANWPIHQTESSLQGLGMACGVARSSQPLRWQHEDKSGIIHPFVIPTLPFTLWGRDIMKDIKVRLMTDSPDDSQDLMIGAIESNLFADQISWKSDQPVWLNQWPLKQEKLQALQQLVTEQLQLGHLEESNSPWNTPVFVIKKKSGKWRLLQDLRAVNATMHDMGALQPGLPSPVAVPKGWEIIIIDLQDCFFNIKLHPEDCKRFAFSVPSPNFKRPYQRFQWKVLPQGMKNSPTLCQKFVDKAILTVRDKYQDSYIVHYMDDILLAHPSRSIVDEILTSMIQALNKHGLVVSTEKIQKYDNLKYLGTHIQGDSVSYQKLQIRTDKLRTLNDFQKLLGNINWIRPFLKLTTGELKPLFEILNGDSNPISTRKLTPEACKALQLMNERLSTARVKRLDLSQPWSLCILKTEYTPTACLWQDGVVEWIHLPHISPKVITPYDIFCTQLIIKGRHRSKELFSKDPDYIVVPYTKVQFDLLLQEKEDWPISLLGFLGEVHFHLPKDPLLTFTLQTAIIFPHMTSTTPLEKGIVIFTDGSANGRSVTYIQGREPIIKENTQNTAQQAEIVAVITAFEEVSQPFNLYTDSKYVTGLFPEIETATLSPRTKIYTELKHLQRLIHKRQEKFYIGHIRGHTGLPGPLAQGNAYADSLTRILTAAGKRTADGSEFEKRTADGSEFESPKKKAKVE

SEQ ID NO: 3143 - protein, 2138 aa, synthetic construct
MPAAKRVKLDGGDKKYSIGLDIGTNSVGWAVITDEYKVPSKKFKVLGNTDRHSIKKNLIGALLFDSGETAEATRLKRTARRRYTRRKNRICYLQEIFSNEMAKVDDSFFHRLEESFLVEEDKKHERHPIFGNIVDEVAYHEKYPTIYHLRKKLVDSTDKADLRLIYLALAHMIKFRGHFLIEGDLNPDNSDVDKLFIQLVQTYNQLFEENPINASGVDAKAILSARLSKSRRLENLIAQLPGEKKNGLFGNLIALSLGLTPNFKSNFDLAEDAKLQLSKDTYDDDLDNLLAQIGDQYADLFLAAKNLSDAILLSDILRVNTEITKAPLSASMIKRYDEHHQDLTLLKALVRQQLPEKYKEIFFDQSKNGYAGYIDGGASQEEFYKFIKPILEKMDGTEELLVKLNREDLLRKQRTFDNGSIPHQIHLGELHAILRRQEDFYPFLKDNREKIEKILTFRIPYYVGPLARGNSRFAWMTRKSEETITPWNFEEVVDKGASAQSFIERMTNFDKNLPNEKVLPKHSLLYEYFTVYNELTKVKYVTEGMRKPAFLSGEQKKAIVDLLFKTNRKVTVKQLKEDYFKKIECFDSVEISGVEDRFNASLGTYHDLLKIIKDKDFLDNEENEDILEDIVLTLTLFEDREMIEERLKTYAHLFDDKVMKQLKRRRYTGWGRLSRKLINGIRDKQSGKTILDFLKSDGFANRNFMQLIHDDSLTFKEDIQKAQVSGQGDSLHEHIANLAGSPAIKKGILQTVKVVDELVKVMGRHKPENIVIEMARENQTTQKGQKNSRERMKRIEEGIKELGSQILKEHPVENTQLQNEKLYLYYLQNGRDMYVDQELDINRLSDYDVDHIVPQSFLKDDSIDNKVLTRSDKARGKSDNVPSEEVVKKMKNYWRQLLNAKLITQRKFDNLTKAERGGLSELDKAGFIKRQLVETRQITKHVAQILDSRMNTKYDENDKLIREVKVITLKSKLVSDFRKDFQFYKVREINNYHHAHDAYLNAVVGTALIKKYPKLESEFVYGDYKVYDVRKMIAKSEQEIGKATAKYFFYSNIMNFFKTEITLANGEIRKRPLIETNGETGEIVWDKGRDFATVRKVLSMPQVNIVKKTEVQTGGFSKESILPKRNSDKLIARKKDWDPKKYGGFDSPTVAYSVLVVAKVEKGKSKKLKSVKELLGITIMERSSFEKNPIDFLEAKGYKEVKKDLIIKLPKYSLFELENGRKRMLASAGELQKGNELALPSKYVNFLYLASHYEKLKGSPEDNEQKQLFVEQHKHYLDEIIEQISEFSKRVILADANLDKVLSAYNKHRDKPIREQAENIIHLFTLTNLGAPAAFKYFDTTIDRKRYTSTKEVLDATLIHQSITGLYETRIDLSQLGGDGGSGGSSGGSSGSETPGTSESATPESSGGSSGGSSGGVQEISDSRPMLHIYLNGRRFLGLLDTGADKTCIAGRDWPANWPIHQTESSLQGLGMACGVARSSQPLRWQHEDKSGIIHPFVIPTLPFTLWGRDIMKDIKVRLMTDSPDDSQDLMIGAIESNLFADQISWKSDQPVWLNQWPLKQEKLQALQQLVTEQLQLGHLEESNSPWNTPVFVIKKKSGKWRLLQDLRAVNATMHDMGALQPGLPSPVAVPKGWEIIIIDLQDCFFNIKLHPEDCKRFAFSVPSPNFKRPYQRFQWKVLPQGMKNSPTLCQKFVDKAILTVRDKYQDSYIVHYMDDILLAHPSRSIVDEILTSMIQALNKHGLVVSTEKIQKYDNLKYLGTHIQGDSVSYQKLQIRTDKLRTLNDFQKLLGNINWIRPFLKLTTGELKPLFEILNGDSNPISTRKLTPEACKALQLMNERLSTARVKRLDLSQPWSLCILKTEYTPTACLWQDGVVEWIHLPHISPKVITPYDIFCTQLIIKGRHRSKELFSKDPDYIVVPYTKVQFDLLLQEKEDWPISLLGFLGEVHFHLPKDPLLTFTLQTAIIFPHMTSTTPLEKGIVIFTDGSANGRSVTYIQGREPIIKENTQNTAQQAEIVAVITAFEEVSQPFNLYTDSKYVTGLFPEIETATLSPRTKIYTELKHLQRLIHKRQEKFYIGHIRGHTGLPGPLAQGNAYADSLTRILTAAGKRTADGSEFEKRTADGSEFESPKKKAKVE

SEQ ID NO: 3144 - protein, 2116 aa, synthetic construct
MPAAKRVKLDGGDKKYSIGLDIGTNSVGWAVITDEYKVPSKKFKVLGNTDRHSIKKNLIGALLFDSGETAEATRLKRTARRRYTRRKNRICYLQEIFSNEMAKVDDSFFHRLEESFLVEEDKKHERHPIFGNIVDEVAYHEKYPTIYHLRKKLVDSTDKADLRLIYLALAHMIKFRGHFLIEGDLNPDNSDVDKLFIQLVQTYNQLFEENPINASGVDAKAILSARLSKSRRLENLIAQLPGEKKNGLFGNLIALSLGLTPNFKSNFDLAEDAKLQLSKDTYDDDLDNLLAQIGDQYADLFLAAKNLSDAILLSDILRVNTEITKAPLSASMIKRYDEHHQDLTLLKALVRQQLPEKYKEIFFDQSKNGYAGYIDGGASQEEFYKFIKPILEKMDGTEELLVKLNREDLLRKQRTFDNGSIPHQIHLGELHAILRRQEDFYPFLKDNREKIEKILTFRIPYYVGPLARGNSRFAWMTRKSEETITPWNFEEVVDKGASAQSFIERMTNFDKNLPNEKVLPKHSLLYEYFTVYNELTKVKYVTEGMRKPAFLSGEQKKAIVDLLFKTNRKVTVKQLKEDYFKKIECFDSVEISGVEDRFNASLGTYHDLLKIIKDKDFLDNEENEDILEDIVLTLTLFEDREMIEERLKTYAHLFDDKVMKQLKRRRYTGWGRLSRKLINGIRDKQSGKTILDFLKSDGFANRNFMQLIHDDSLTFKEDIQKAQVSGQGDSLHEHIANLAGSPAIKKGILQTVKVVDELVKVMGRHKPENIVIEMARENQTTQKGQKNSRERMKRIEEGIKELGSQILKEHPVENTQLQNEKLYLYYLQNGRDMYVDQELDINRLSDYDVDHIVPQSFLKDDSIDNKVLTRSDKARGKSDNVPSEEVVKKMKNYWRQLLNAKLITQRKFDNLTKAERGGLSELDKAGFIKRQLVETRQITKHVAQILDSRMNTKYDENDKLIREVKVITLKSKLVSDFRKDFQFYKVREINNYHHAHDAYLNAVVGTALIKKYPKLESEFVYGDYKVYDVRKMIAKSEQEIGKATAKYFFYSNIMNFFKTEITLANGEIRKRPLIETNGETGEIVWDKGRDFATVRKVLSMPQVNIVKKTEVQTGGFSKESILPKRNSDKLIARKKDWDPKKYGGFDSPTVAYSVLVVAKVEKGKSKKLKSVKELLGITIMERSSFEKNPIDFLEAKGYKEVKKDLIIKLPKYSLFELENGRKRMLASAGELQKGNELALPSKYVNFLYLASHYEKLKGSPEDNEQKQLFVEQHKHYLDEIIEQISEFSKRVILADANLDKVLSAYNKHRDKPIREQAENIIHLFTLTNLGAPAAFKYFDTTIDRKRYTSTKEVLDATLIHQSITGLYETRIDLSQLGGDGGGGGEAAAKGGSGGVQEISDSRPMLHIYLNGRRFLGLLDTGADKTCIAGRDWPANWPIHQTESSLQGLGMACGVARSSQPLRWQHEDKSGIIHPFVIPTLPFTLWGRDIMKDIKVRLMTDSPDDSQDLMIGAIESNLFADQISWKSDQPVWLNQWPLKQEKLQALQQLVTEQLQLGHLEESNSPWNTPVFVIKKKSGKWRLLQDLRAVNATMHDMGALQPGLPSPVAVPKGWEIIIIDLQDCFFNIKLHPEDCKRFAFSVPSPNFKRPYQRFQWKVLPQGMKNSPTLCQKFVDKAILTVRDKYQDSYIVHYMDDILLAHPSRSIVDEILTSMIQALNKHGLVVSTEKIQKYDNLKYLGTHIQGDSVSYQKLQIRTDKLRTLNDFQKLLGNINWIRPFLKLTTGELKPLFEILNGDSNPISTRKLTPEACKALQLMNERLSTARVKRLDLSQPWSLCILKTEYTPTACLWQDGVVEWIHLPHISPKVITPYDIFCTQLIIKGRHRSKELFSKDPDYIVVPYTKVQFDLLLQEKEDWPISLLGFLGEVHFHLPKDPLLTFTLQTAIIFPHMTSTTPLEKGIVIFTDGSANGRSVTYIQGREPIIKENTQNTAQQAEIVAVITAFEEVSQPFNLYTDSKYVTGLFPEIETATLSPRTKIYTELKHLQRLIHKRQEKFYIGHIRGHTGLPGPLAQGNAYADSLTRILTAAGKRTADGSEFEKRTADGSEFESPKKKAKVE

SEQ ID NO: 3145 - protein, 2113 aa, synthetic construct
MPAAKRVKLDGGDKKYSIGLDIGTNSVGWAVITDEYKVPSKKFKVLGNTDRHSIKKNLIGALLFDSGETAEATRLKRTARRRYTRRKNRICYLQEIFSNEMAKVDDSFFHRLEESFLVEEDKKHERHPIFGNIVDEVAYHEKYPTIYHLRKKLVDSTDKADLRLIYLALAHMIKFRGHFLIEGDLNPDNSDVDKLFIQLVQTYNQLFEENPINASGVDAKAILSARLSKSRRLENLIAQLPGEKKNGLFGNLIALSLGLTPNFKSNFDLAEDAKLQLSKDTYDDDLDNLLAQIGDQYADLFLAAKNLSDAILLSDILRVNTEITKAPLSASMIKRYDEHHQDLTLLKALVRQQLPEKYKEIFFDQSKNGYAGYIDGGASQEEFYKFIKPILEKMDGTEELLVKLNREDLLRKQRTFDNGSIPHQIHLGELHAILRRQEDFYPFLKDNREKIEKILTFRIPYYVGPLARGNSRFAWMTRKSEETITPWNFEEVVDKGASAQSFIERMTNFDKNLPNEKVLPKHSLLYEYFTVYNELTKVKYVTEGMRKPAFLSGEQKKAIVDLLFKTNRKVTVKQLKEDYFKKIECFDSVEISGVEDRFNASLGTYHDLLKIIKDKDFLDNEENEDILEDIVLTLTLFEDREMIEERLKTYAHLFDDKVMKQLKRRRYTGWGRLSRKLINGIRDKQSGKTILDFLKSDGFANRNFMQLIHDDSLTFKEDIQKAQVSGQGDSLHEHIANLAGSPAIKKGILQTVKVVDELVKVMGRHKPENIVIEMARENQTTQKGQKNSRERMKRIEEGIKELGSQILKEHPVENTQLQNEKLYLYYLQNGRDMYVDQELDINRLSDYDVDHIVPQSFLKDDSIDNKVLTRSDKARGKSDNVPSEEVVKKMKNYWRQLLNAKLITQRKFDNLTKAERGGLSELDKAGFIKRQLVETRQITKHVAQILDSRMNTKYDENDKLIREVKVITLKSKLVSDFRKDFQFYKVREINNYHHAHDAYLNAVVGTALIKKYPKLESEFVYGDYKVYDVRKMIAKSEQEIGKATAKYFFYSNIMNFFKTEITLANGEIRKRPLIETNGETGEIVWDKGRDFATVRKVLSMPQVNIVKKTEVQTGGFSKESILPKRNSDKLIARKKDWDPKKYGGFDSPTVAYSVLVVAKVEKGKSKKLKSVKELLGITIMERSSFEKNPIDFLEAKGYKEVKKDLIIKLPKYSLFELENGRKRMLASAGELQKGNELALPSKYVNFLYLASHYEKLKGSPEDNEQKQLFVEQHKHYLDEIIEQISEFSKRVILADANLDKVLSAYNKHRDKPIREQAENIIHLFTLTNLGAPAAFKYFDTTIDRKRYTSTKEVLDATLIHQSITGLYETRIDLSQLGGDGGPAPEAAAKGGVQEISDSRPMLHIYLNGRRFLGLLDTGADKTCIAGRDWPANWPIHQTESSLQGLGMACGVARSSQPLRWQHEDKSGIIHPFVIPTLPFTLWGRDIMKDIKVRLMTDSPDDSQDLMIGAIESNLFADQISWKSDQPVWLNQWPLKQEKLQALQQLVTEQLQLGHLEESNSPWNTPVFVIKKKSGKWRLLQDLRAVNATMHDMGALQPGLPSPVAVPKGWEIIIIDLQDCFFNIKLHPEDCKRFAFSVPSPNFKRPYQRFQWKVLPQGMKNSPTLCQKFVDKAILTVRDKYQDSYIVHYMDDILLAHPSRSIVDEILTSMIQALNKHGLVVSTEKIQKYDNLKYLGTHIQGDSVSYQKLQIRTDKLRTLNDFQKLLGNINWIRPFLKLTTGELKPLFEILNGDSNPISTRKLTPEACKALQLMNERLSTARVKRLDLSQPWSLCILKTEYTPTACLWQDGVVEWIHLPHISPKVITPYDIFCTQLIIKGRHRSKELFSKDPDYIVVPYTKVQFDLLLQEKEDWPISLLGFLGEVHFHLPKDPLLTFTLQTAIIFPHMTSTTPLEKGIVIFTDGSANGRSVTYIQGREPIIKENTQNTAQQAEIVAVITAFEEVSQPFNLYTDSKYVTGLFPEIETATLSPRTKIYTELKHLQRLIHKRQEKFYIGHIRGHTGLPGPLAQGNAYADSLTRILTAAGKRTADGSEFEKRTADGSEFESPKKKAKVE

SEQ ID NO: 3146 - protein, 2116 aa, synthetic construct
MPAAKRVKLDGGDKKYSIGLDIGTNSVGWAVITDEYKVPSKKFKVLGNTDRHSIKKNLIGALLFDSGETAEATRLKRTARRRYTRRKNRICYLQEIFSNEMAKVDDSFFHRLEESFLVEEDKKHERHPIFGNIVDEVAYHEKYPTIYHLRKKLVDSTDKADLRLIYLALAHMIKFRGHFLIEGDLNPDNSDVDKLFIQLVQTYNQLFEENPINASGVDAKAILSARLSKSRRLENLIAQLPGEKKNGLFGNLIALSLGLTPNFKSNFDLAEDAKLQLSKDTYDDDLDNLLAQIGDQYADLFLAAKNLSDAILLSDILRVNTEITKAPLSASMIKRYDEHHQDLTLLKALVRQQLPEKYKEIFFDQSKNGYAGYIDGGASQEEFYKFIKPILEKMDGTEELLVKLNREDLLRKQRTFDNGSIPHQIHLGELHAILRRQEDFYPFLKDNREKIEKILTFRIPYYVGPLARGNSRFAWMTRKSEETITPWNFEEVVDKGASAQSFIERMTNFDKNLPNEKVLPKHSLLYEYFTVYNELTKVKYVTEGMRKPAFLSGEQKKAIVDLLFKTNRKVTVKQLKEDYFKKIECFDSVEISGVEDRFNASLGTYHDLLKIIKDKDFLDNEENEDILEDIVLTLTLFEDREMIEERLKTYAHLFDDKVMKQLKRRRYTGWGRLSRKLINGIRDKQSGKTILDFLKSDGFANRNFMQLIHDDSLTFKEDIQKAQVSGQGDSLHEHIANLAGSPAIKKGILQTVKVVDELVKVMGRHKPENIVIEMARENQTTQKGQKNSRERMKRIEEGIKELGSQILKEHPVENTQLQNEKLYLYYLQNGRDMYVDQELDINRLSDYDVDHIVPQSFLKDDSIDNKVLTRSDKARGKSDNVPSEEVVKKMKNYWRQLLNAKLITQRKFDNLTKAERGGLSELDKAGFIKRQLVETRQITKHVAQILDSRMNTKYDENDKLIREVKVITLKSKLVSDFRKDFQFYKVREINNYHHAHDAYLNAVVGTALIKKYPKLESEFVYGDYKVYDVRKMIAKSEQEIGKATAKYFFYSNIMNFFKTEITLANGEIRKRPLIETNGETGEIVWDKGRDFATVRKVLSMPQVNIVKKTEVQTGGFSKESILPKRNSDKLIARKKDWDPKKYGGFDSPTVAYSVLVVAKVEKGKSKKLKSVKELLGITIMERSSFEKNPIDFLEAKGYKEVKKDLIIKLPKYSLFELENGRKRMLASAGELQKGNELALPSKYVNFLYLASHYEKLKGSPEDNEQKQLFVEQHKHYLDEIIEQISEFSKRVILADANLDKVLSAYNKHRDKPIREQAENIIHLFTLTNLGAPAAFKYFDTTIDRKRYTSTKEVLDATLIHQSITGLYETRIDLSQLGGDGGPAPGGGEAAAKGGVQEISDSRPMLHIYLNGRRFLGLLDTGADKTCIAGRDWPANWPIHQTESSLQGLGMACGVARSSQPLRWQHEDKSGIIHPFVIPTLPFTLWGRDIMKDIKVRLMTDSPDDSQDLMIGAIESNLFADQISWKSDQPVWLNQWPLKQEKLQALQQLVTEQLQLGHLEESNSPWNTPVFVIKKKSGKWRLLQDLRAVNATMHDMGALQPGLPSPVAVPKGWEIIIIDLQDCFFNIKLHPEDCKRFAFSVPSPNFKRPYQRFQWKVLPQGMKNSPTLCQKFVDKAILTVRDKYQDSYIVHYMDDILLAHPSRSIVDEILTSMIQALNKHGLVVSTEKIQKYDNLKYLGTHIQGDSVSYQKLQIRTDKLRTLNDFQKLLGNINWIRPFLKLTTGELKPLFEILNGDSNPISTRKLTPEACKALQLMNERLSTARVKRLDLSQPWSLCILKTEYTPTACLWQDGVVEWIHLPHISPKVITPYDIFCTQLIIKGRHRSKELFSKDPDYIVVPYTKVQFDLLLQEKEDWPISLLGFLGEVHFHLPKDPLLTFTLQTAIIFPHMTSTTPLEKGIVIFTDGSANGRSVTYIQGREPIIKENTQNTAQQAEIVAVITAFEEVSQPFNLYTDSKYVTGLFPEIETATLSPRTKIYTELKHLQRLIHKRQEKFYIGHIRGHTGLPGPLAQGNAYADSLTRILTAAGKRTADGSEFEKRTADGSEFESPKKKAKVE

SEQ ID NO: 3147 - protein, 2116 aa, synthetic construct
MPAAKRVKLDGGDKKYSIGLDIGTNSVGWAVITDEYKVPSKKFKVLGNTDRHSIKKNLIGALLFDSGETAEATRLKRTARRRYTRRKNRICYLQEIFSNEMAKVDDSFFHRLEESFLVEEDKKHERHPIFGNIVDEVAYHEKYPTIYHLRKKLVDSTDKADLRLIYLALAHMIKFRGHFLIEGDLNPDNSDVDKLFIQLVQTYNQLFEENPINASGVDAKAILSARLSKSRRLENLIAQLPGEKKNGLFGNLIALSLGLTPNFKSNFDLAEDAKLQLSKDTYDDDLDNLLAQIGDQYADLFLAAKNLSDAILLSDILRVNTEITKAPLSASMIKRYDEHHQDLTLLKALVRQQLPEKYKEIFFDQSKNGYAGYIDGGASQEEFYKFIKPILEKMDGTEELLVKLNREDLLRKQRTFDNGSIPHQIHLGELHAILRRQEDFYPFLKDNREKIEKILTFRIPYYVGPLARGNSRFAWMTRKSEETITPWNFEEVVDKGASAQSFIERMTNFDKNLPNEKVLPKHSLLYEYFTVYNELTKVKYVTEGMRKPAFLSGEQKKAIVDLLFKTNRKVTVKQLKEDYFKKIECFDSVEISGVEDRFNASLGTYHDLLKIIKDKDFLDNEENEDILEDIVLTLTLFEDREMIEERLKTYAHLFDDKVMKQLKRRRYTGWGRLSRKLINGIRDKQSGKTILDFLKSDGFANRNFMQLIHDDSLTFKEDIQKAQVSGQGDSLHEHIANLAGSPAIKKGILQTVKVVDELVKVMGRHKPENIVIEMARENQTTQKGQKNSRERMKRIEEGIKELGSQILKEHPVENTQLQNEKLYLYYLQNGRDMYVDQELDINRLSDYDVDHIVPQSFLKDDSIDNKVLTRSDKARGKSDNVPSEEVVKKMKNYWRQLLNAKLITQRKFDNLTKAERGGLSELDKAGFIKRQLVETRQITKHVAQILDSRMNTKYDENDKLIREVKVITLKSKLVSDFRKDFQFYKVREINNYHHAHDAYLNAVVGTALIKKYPKLESEFVYGDYKVYDVRKMIAKSEQEIGKATAKYFFYSNIMNFFKTEITLANGEIRKRPLIETNGETGEIVWDKGRDFATVRKVLSMPQVNIVKKTEVQTGGFSKESILPKRNSDKLIARKKDWDPKKYGGFDSPTVAYSVLVVAKVEKGKSKKLKSVKELLGITIMERSSFEKNPIDFLEAKGYKEVKKDLIIKLPKYSLFELENGRKRMLASAGELQKGNELALPSKYVNFLYLASHYEKLKGSPEDNEQKQLFVEQHKHYLDEIIEQISEFSKRVILADANLDKVLSAYNKHRDKPIREQAENIIHLFTLTNLGAPAAFKYFDTTIDRKRYTSTKEVLDATLIHQSITGLYETRIDLSQLGGDGGGSSEAAAKGGGGGVQEISDSRPMLHIYLNGRRFLGLLDTGADKTCIAGRDWPANWPIHQTESSLQGLGMACGVARSSQPLRWQHEDKSGIIHPFVIPTLPFTLWGRDIMKDIKVRLMTDSPDDSQDLMIGAIESNLFADQISWKSDQPVWLNQWPLKQEKLQALQQLVTEQLQLGHLEESNSPWNTPVFVIKKKSGKWRLLQDLRAVNATMHDMGALQPGLPSPVAVPKGWEIIIIDLQDCFFNIKLHPEDCKRFAFSVPSPNFKRPYQRFQWKVLPQGMKNSPTLCQKFVDKAILTVRDKYQDSYIVHYMDDILLAHPSRSIVDEILTSMIQALNKHGLVVSTEKIQKYDNLKYLGTHIQGDSVSYQKLQIRTDKLRTLNDFQKLLGNINWIRPFLKLTTGELKPLFEILNGDSNPISTRKLTPEACKALQLMNERLSTARVKRLDLSQPWSLCILKTEYTPTACLWQDGVVEWIHLPHISPKVITPYDIFCTQLIIKGRHRSKELFSKDPDYIVVPYTKVQFDLLLQEKEDWPISLLGFLGEVHFHLPKDPLLTFTLQTAIIFPHMTSTTPLEKGIVIFTDGSANGRSVTYIQGREPIIKENTQNTAQQAEIVAVITAFEEVSQPFNLYTDSKYVTGLFPEIETATLSPRTKIYTELKHLQRLIHKRQEKFYIGHIRGHTGLPGPLAQGNAYADSLTRILTAAGKRTADGSEFEKRTADGSEFESPKKKAKVE

SEQ ID NO: 3148 - protein, 2116 aa, synthetic construct
MPAAKRVKLDGGDKKYSIGLDIGTNSVGWAVITDEYKVPSKKFKVLGNTDRHSIKKNLIGALLFDSGETAEATRLKRTARRRYTRRKNRICYLQEIFSNEMAKVDDSFFHRLEESFLVEEDKKHERHPIFGNIVDEVAYHEKYPTIYHLRKKLVDSTDKADLRLIYLALAHMIKFRGHFLIEGDLNPDNSDVDKLFIQLVQTYNQLFEENPINASGVDAKAILSARLSKSRRLENLIAQLPGEKKNGLFGNLIALSLGLTPNFKSNFDLAEDAKLQLSKDTYDDDLDNLLAQIGDQYADLFLAAKNLSDAILLSDILRVNTEITKAPLSASMIKRYDEHHQDLTLLKALVRQQLPEKYKEIFFDQSKNGYAGYIDGGASQEEFYKFIKPILEKMDGTEELLVKLNREDLLRKQRTFDNGSIPHQIHLGELHAILRRQEDFYPFLKDNREKIEKILTFRIPYYVGPLARGNSRFAWMTRKSEETITPWNFEEVVDKGASAQSFIERMTNFDKNLPNEKVLPKHSLLYEYFTVYNELTKVKYVTEGMRKPAFLSGEQKKAIVDLLFKTNRKVTVKQLKEDYFKKIECFDSVEISGVEDRFNASLGTYHDLLKIIKDKDFLDNEENEDILEDIVLTLTLFEDREMIEERLKTYAHLFDDKVMKQLKRRRYTGWGRLSRKLINGIRDKQSGKTILDFLKSDGFANRNFMQLIHDDSLTFKEDIQKAQVSGQGDSLHEHIANLAGSPAIKKGILQTVKVVDELVKVMGRHKPENIVIEMARENQTTQKGQKNSRERMKRIEEGIKELGSQILKEHPVENTQLQNEKLYLYYLQNGRDMYVDQELDINRLSDYDVDHIVPQSFLKDDSIDNKVLTRSDKARGKSDNVPSEEVVKKMKNYWRQLLNAKLITQRKFDNLTKAERGGLSELDKAGFIKRQLVETRQITKHVAQILDSRMNTKYDENDKLIREVKVITLKSKLVSDFRKDFQFYKVREINNYHHAHDAYLNAVVGTALIKKYPKLESEFVYGDYKVYDVRKMIAKSEQEIGKATAKYFFYSNIMNFFKTEITLANGEIRKRPLIETNGETGEIVWDKGRDFATVRKVLSMPQVNIVKKTEVQTGGFSKESILPKRNSDKLIARKKDWDPKKYGGFDSPTVAYSVLVVAKVEKGKSKKLKSVKELLGITIMERSSFEKNPIDFLEAKGYKEVKKDLIIKLPKYSLFELENGRKRMLASAGELQKGNELALPSKYVNFLYLASHYEKLKGSPEDNEQKQLFVEQHKHYLDEIIEQISEFSKRVILADANLDKVLSAYNKHRDKPIREQAENIIHLFTLTNLGAPAAFKYFDTTIDRKRYTSTKEVLDATLIHQSITGLYETRIDLSQLGGDGGEAAAKGGSGSSGGVQEISDSRPMLHIYLNGRRFLGLLDTGADKTCIAGRDWPANWPIHQTESSLQGLGMACGVARSSQPLRWQHEDKSGIIHPFVIPTLPFTLWGRDIMKDIKVRLMTDSPDDSQDLMIGAIESNLFADQISWKSDQPVWLNQWPLKQEKLQALQQLVTEQLQLGHLEESNSPWNTPVFVIKKKSGKWRLLQDLRAVNATMHDMGALQPGLPSPVAVPKGWEIIIIDLQDCFFNIKLHPEDCKRFAFSVPSPNFKRPYQRFQWKVLPQGMKNSPTLCQKFVDKAILTVRDKYQDSYIVHYMDDILLAHPSRSIVDEILTSMIQALNKHGLVVSTEKIQKYDNLKYLGTHIQGDSVSYQKLQIRTDKLRTLNDFQKLLGNINWIRPFLKLTTGELKPLFEILNGDSNPISTRKLTPEACKALQLMNERLSTARVKRLDLSQPWSLCILKTEYTPTACLWQDGVVEWIHLPHISPKVITPYDIFCTQLIIKGRHRSKELFSKDPDYIVVPYTKVQFDLLLQEKEDWPISLLGFLGEVHFHLPKDPLLTFTLQTAIIFPHMTSTTPLEKGIVIFTDGSANGRSVTYIQGREPIIKENTQNTAQQAEIVAVITAFEEVSQPFNLYTDSKYVTGLFPEIETATLSPRTKIYTELKHLQRLIHKRQEKFYIGHIRGHTGLPGPLAQGNAYADSLTRILTAAGKRTADGSEFEKRTADGSEFESPKKKAKVE

SEQ ID NO: 3149 - protein, 2116 aa, synthetic construct
MPAAKRVKLDGGDKKYSIGLDIGTNSVGWAVITDEYKVPSKKFKVLGNTDRHSIKKNLIGALLFDSGETAEATRLKRTARRRYTRRKNRICYLQEIFSNEMAKVDDSFFHRLEESFLVEEDKKHERHPIFGNIVDEVAYHEKYPTIYHLRKKLVDSTDKADLRLIYLALAHMIKFRGHFLIEGDLNPDNSDVDKLFIQLVQTYNQLFEENPINASGVDAKAILSARLSKSRRLENLIAQLPGEKKNGLFGNLIALSLGLTPNFKSNFDLAEDAKLQLSKDTYDDDLDNLLAQIGDQYADLFLAAKNLSDAILLSDILRVNTEITKAPLSASMIKRYDEHHQDLTLLKALVRQQLPEKYKEIFFDQSKNGYAGYIDGGASQEEFYKFIKPILEKMDGTEELLVKLNREDLLRKQRTFDNGSIPHQIHLGELHAILRRQEDFYPFLKDNREKIEKILTFRIPYYVGPLARGNSRFAWMTRKSEETITPWNFEEVVDKGASAQSFIERMTNFDKNLPNEKVLPKHSLLYEYFTVYNELTKVKYVTEGMRKPAFLSGEQKKAIVDLLFKTNRKVTVKQLKEDYFKKIECFDSVEISGVEDRFNASLGTYHDLLKIIKDKDFLDNEENEDILEDIVLTLTLFEDREMIEERLKTYAHLFDDKVMKQLKRRRYTGWGRLSRKLINGIRDKQSGKTILDFLKSDGFANRNFMQLIHDDSLTFKEDIQKAQVSGQGDSLHEHIANLAGSPAIKKGILQTVKVVDELVKVMGRHKPENIVIEMARENQTTQKGQKNSRERMKRIEEGIKELGSQILKEHPVENTQLQNEKLYLYYLQNGRDMYVDQELDINRLSDYDVDHIVPQSFLKDDSIDNKVLTRSDKARGKSDNVPSEEVVKKMKNYWRQLLNAKLITQRKFDNLTKAERGGLSELDKAGFIKRQLVETRQITKHVAQILDSRMNTKYDENDKLIREVKVITLKSKLVSDFRKDFQFYKVREINNYHHAHDAYLNAVVGTALIKKYPKLESEFVYGDYKVYDVRKMIAKSEQEIGKATAKYFFYSNIMNFFKTEITLANGEIRKRPLIETNGETGEIVWDKGRDFATVRKVLSMPQVNIVKKTEVQTGGFSKESILPKRNSDKLIARKKDWDPKKYGGFDSPTVAYSVLVVAKVEKGKSKKLKSVKELLGITIMERSSFEKNPIDFLEAKGYKEVKKDLIIKLPKYSLFELENGRKRMLASAGELQKGNELALPSKYVNFLYLASHYEKLKGSPEDNEQKQLFVEQHKHYLDEIIEQISEFSKRVILADANLDKVLSAYNKHRDKPIREQAENIIHLFTLTNLGAPAAFKYFDTTIDRKRYTSTKEVLDATLIHQSITGLYETRIDLSQLGGDGGGSSPAPEAAAKGGVQEISDSRPMLHIYLNGRRFLGLLDTGADKTCIAGRDWPANWPIHQTESSLQGLGMACGVARSSQPLRWQHEDKSGIIHPFVIPTLPFTLWGRDIMKDIKVRLMTDSPDDSQDLMIGAIESNLFADQISWKSDQPVWLNQWPLKQEKLQALQQLVTEQLQLGHLEESNSPWNTPVFVIKKKSGKWRLLQDLRAVNATMHDMGALQPGLPSPVAVPKGWEIIIIDLQDCFFNIKLHPEDCKRFAFSVPSPNFKRPYQRFQWKVLPQGMKNSPTLCQKFVDKAILTVRDKYQDSYIVHYMDDILLAHPSRSIVDEILTSMIQALNKHGLVVSTEKIQKYDNLKYLGTHIQGDSVSYQKLQIRTDKLRTLNDFQKLLGNINWIRPFLKLTTGELKPLFEILNGDSNPISTRKLTPEACKALQLMNERLSTARVKRLDLSQPWSLCILKTEYTPTACLWQDGVVEWIHLPHISPKVITPYDIFCTQLIIKGRHRSKELFSKDPDYIVVPYTKVQFDLLLQEKEDWPISLLGFLGEVHFHLPKDPLLTFTLQTAIIFPHMTSTTPLEKGIVIFTDGSANGRSVTYIQGREPIIKENTQNTAQQAEIVAVITAFEEVSQPFNLYTDSKYVTGLFPEIETATLSPRTKIYTELKHLQRLIHKRQEKFYIGHIRGHTGLPGPLAQGNAYADSLTRILTAAGKRTADGSEFEKRTADGSEFESPKKKAKVE

SEQ ID NO: 3150 - protein, 2114 aa, synthetic construct
MPAAKRVKLDGGDKKYSIGLDIGTNSVGWAVITDEYKVPSKKFKVLGNTDRHSIKKNLIGALLFDSGETAEATRLKRTARRRYTRRKNRICYLQEIFSNEMAKVDDSFFHRLEESFLVEEDKKHERHPIFGNIVDEVAYHEKYPTIYHLRKKLVDSTDKADLRLIYLALAHMIKFRGHFLIEGDLNPDNSDVDKLFIQLVQTYNQLFEENPINASGVDAKAILSARLSKSRRLENLIAQLPGEKKNGLFGNLIALSLGLTPNFKSNFDLAEDAKLQLSKDTYDDDLDNLLAQIGDQYADLFLAAKNLSDAILLSDILRVNTEITKAPLSASMIKRYDEHHQDLTLLKALVRQQLPEKYKEIFFDQSKNGYAGYIDGGASQEEFYKFIKPILEKMDGTEELLVKLNREDLLRKQRTFDNGSIPHQIHLGELHAILRRQEDFYPFLKDNREKIEKILTFRIPYYVGPLARGNSRFAWMTRKSEETITPWNFEEVVDKGASAQSFIERMTNFDKNLPNEKVLPKHSLLYEYFTVYNELTKVKYVTEGMRKPAFLSGEQKKAIVDLLFKTNRKVTVKQLKEDYFKKIECFDSVEISGVEDRFNASLGTYHDLLKIIKDKDFLDNEENEDILEDIVLTLTLFEDREMIEERLKTYAHLFDDKVMKQLKRRRYTGWGRLSRKLINGIRDKQSGKTILDFLKSDGFANRNFMQLIHDDSLTFKEDIQKAQVSGQGDSLHEHIANLAGSPAIKKGILQTVKVVDELVKVMGRHKPENIVIEMARENQTTQKGQKNSRERMKRIEEGIKELGSQILKEHPVENTQLQNEKLYLYYLQNGRDMYVDQELDINRLSDYDVDHIVPQSFLKDDSIDNKVLTRSDKARGKSDNVPSEEVVKKMKNYWRQLLNAKLITQRKFDNLTKAERGGLSELDKAGFIKRQLVETRQITKHVAQILDSRMNTKYDENDKLIREVKVITLKSKLVSDFRKDFQFYKVREINNYHHAHDAYLNAVVGTALIKKYPKLESEFVYGDYKVYDVRKMIAKSEQEIGKATAKYFFYSNIMNFFKTEITLANGEIRKRPLIETNGETGEIVWDKGRDFATVRKVLSMPQVNIVKKTEVQTGGFSKESILPKRNSDKLIARKKDWDPKKYGGFDSPTVAYSVLVVAKVEKGKSKKLKSVKELLGITIMERSSFEKNPIDFLEAKGYKEVKKDLIIKLPKYSLFELENGRKRMLASAGELQKGNELALPSKYVNFLYLASHYEKLKGSPEDNEQKQLFVEQHKHYLDEIIEQISEFSKRVILADANLDKVLSAYNKHRDKPIREQAENIIHLFTLTNLGAPAAFKYFDTTIDRKRYTSTKEVLDATLIHQSITGLYETRIDLSQLGGDGGGGSGSSPAPGGVQEISDSRPMLHIYLNGRRFLGLLDTGADKTCIAGRDWPANWPIHQTESSLQGLGMACGVARSSQPLRWQHEDKSGIIHPFVIPTLPFTLWGRDIMKDIKVRLMTDSPDDSQDLMIGAIESNLFADQISWKSDQPVWLNQWPLKQEKLQALQQLVTEQLQLGHLEESNSPWNTPVFVIKKKSGKWRLLQDLRAVNATMHDMGALQPGLPSPVAVPKGWEIIIIDLQDCFFNIKLHPEDCKRFAFSVPSPNFKRPYQRFQWKVLPQGMKNSPTLCQKFVDKAILTVRDKYQDSYIVHYMDDILLAHPSRSIVDEILTSMIQALNKHGLVVSTEKIQKYDNLKYLGTHIQGDSVSYQKLQIRTDKLRTLNDFQKLLGNINWIRPFLKLTTGELKPLFEILNGDSNPISTRKLTPEACKALQLMNERLSTARVKRLDLSQPWSLCILKTEYTPTACLWQDGVVEWIHLPHISPKVITPYDIFCTQLIIKGRHRSKELFSKDPDYIVVPYTKVQFDLLLQEKEDWPISLLGFLGEVHFHLPKDPLLTFTLQTAIIFPHMTSTTPLEKGIVIFTDGSANGRSVTYIQGREPIIKENTQNTAQQAEIVAVITAFEEVSQPFNLYTDSKYVTGLFPEIETATLSPRTKIYTELKHLQRLIHKRQEKFYIGHIRGHTGLPGPLAQGNAYADSLTRILTAAGKRTADGSEFEKRTADGSEFESPKKKAKVE

SEQ ID NO: 3151 - protein, 2120 aa, synthetic construct
MPAAKRVKLDGGDKKYSIGLDIGTNSVGWAVITDEYKVPSKKFKVLGNTDRHSIKKNLIGALLFDSGETAEATRLKRTARRRYTRRKNRICYLQEIFSNEMAKVDDSFFHRLEESFLVEEDKKHERHPIFGNIVDEVAYHEKYPTIYHLRKKLVDSTDKADLRLIYLALAHMIKFRGHFLIEGDLNPDNSDVDKLFIQLVQTYNQLFEENPINASGVDAKAILSARLSKSRRLENLIAQLPGEKKNGLFGNLIALSLGLTPNFKSNFDLAEDAKLQLSKDTYDDDLDNLLAQIGDQYADLFLAAKNLSDAILLSDILRVNTEITKAPLSASMIKRYDEHHQDLTLLKALVRQQLPEKYKEIFFDQSKNGYAGYIDGGASQEEFYKFIKPILEKMDGTEELLVKLNREDLLRKQRTFDNGSIPHQIHLGELHAILRRQEDFYPFLKDNREKIEKILTFRIPYYVGPLARGNSRFAWMTRKSEETITPWNFEEVVDKGASAQSFIERMTNFDKNLPNEKVLPKHSLLYEYFTVYNELTKVKYVTEGMRKPAFLSGEQKKAIVDLLFKTNRKVTVKQLKEDYFKKIECFDSVEISGVEDRFNASLGTYHDLLKIIKDKDFLDNEENEDILEDIVLTLTLFEDREMIEERLKTYAHLFDDKVMKQLKRRRYTGWGRLSRKLINGIRDKQSGKTILDFLKSDGFANRNFMQLIHDDSLTFKEDIQKAQVSGQGDSLHEHIANLAGSPAIKKGILQTVKVVDELVKVMGRHKPENIVIEMARENQTTQKGQKNSRERMKRIEEGIKELGSQILKEHPVENTQLQNEKLYLYYLQNGRDMYVDQELDINRLSDYDVDHIVPQSFLKDDSIDNKVLTRSDKARGKSDNVPSEEVVKKMKNYWRQLLNAKLITQRKFDNLTKAERGGLSELDKAGFIKRQLVETRQITKHVAQILDSRMNTKYDENDKLIREVKVITLKSKLVSDFRKDFQFYKVREINNYHHAHDAYLNAVVGTALIKKYPKLESEFVYGDYKVYDVRKMIAKSEQEIGKATAKYFFYSNIMNFFKTEITLANGEIRKRPLIETNGETGEIVWDKGRDFATVRKVLSMPQVNIVKKTEVQTGGFSKESILPKRNSDKLIARKKDWDPKKYGGFDSPTVAYSVLVVAKVEKGKSKKLKSVKELLGITIMERSSFEKNPIDFLEAKGYKEVKKDLIIKLPKYSLFELENGRKRMLASAGELQKGNELALPSKYVNFLYLASHYEKLKGSPEDNEQKQLFVEQHKHYLDEIIEQISEFSKRVILADANLDKVLSAYNKHRDKPIREQAENIIHLFTLTNLGAPAAFKYFDTTIDRKRYTSTKEVLDATLIHQSITGLYETRIDLSQLGGDGGEAAAKGGGGSEAAAKGGVQEISDSRPMLHIYLNGRRFLGLLDTGADKTCIAGRDWPANWPIHQTESSLQGLGMACGVARSSQPLRWQHEDKSGIIHPFVIPTLPFTLWGRDIMKDIKVRLMTDSPDDSQDLMIGAIESNLFADQISWKSDQPVWLNQWPLKQEKLQALQQLVTEQLQLGHLEESNSPWNTPVFVIKKKSGKWRLLQDLRAVNATMHDMGALQPGLPSPVAVPKGWEIIIIDLQDCFFNIKLHPEDCKRFAFSVPSPNFKRPYQRFQWKVLPQGMKNSPTLCQKFVDKAILTVRDKYQDSYIVHYMDDILLAHPSRSIVDEILTSMIQALNKHGLVVSTEKIQKYDNLKYLGTHIQGDSVSYQKLQIRTDKLRTLNDFQKLLGNINWIRPFLKLTTGELKPLFEILNGDSNPISTRKLTPEACKALQLMNERLSTARVKRLDLSQPWSLCILKTEYTPTACLWQDGVVEWIHLPHISPKVITPYDIFCTQLIIKGRHRSKELFSKDPDYIVVPYTKVQFDLLLQEKEDWPISLLGFLGEVHFHLPKDPLLTFTLQTAIIFPHMTSTTPLEKGIVIFTDGSANGRSVTYIQGREPIIKENTQNTAQQAEIVAVITAFEEVSQPFNLYTDSKYVTGLFPEIETATLSPRTKIYTELKHLQRLIHKRQEKFYIGHIRGHTGLPGPLAQGNAYADSLTRILTAAGKRTADGSEFEKRTADGSEFESPKKKAKVE

SEQ ID NO: 3152 - protein, 2116 aa, synthetic construct
MPAAKRVKLDGGDKKYSIGLDIGTNSVGWAVITDEYKVPSKKFKVLGNTDRHSIKKNLIGALLFDSGETAEATRLKRTARRRYTRRKNRICYLQEIFSNEMAKVDDSFFHRLEESFLVEEDKKHERHPIFGNIVDEVAYHEKYPTIYHLRKKLVDSTDKADLRLIYLALAHMIKFRGHFLIEGDLNPDNSDVDKLFIQLVQTYNQLFEENPINASGVDAKAILSARLSKSRRLENLIAQLPGEKKNGLFGNLIALSLGLTPNFKSNFDLAEDAKLQLSKDTYDDDLDNLLAQIGDQYADLFLAAKNLSDAILLSDILRVNTEITKAPLSASMIKRYDEHHQDLTLLKALVRQQLPEKYKEIFFDQSKNGYAGYIDGGASQEEFYKFIKPILEKMDGTEELLVKLNREDLLRKQRTFDNGSIPHQIHLGELHAILRRQEDFYPFLKDNREKIEKILTFRIPYYVGPLARGNSRFAWMTRKSEETITPWNFEEVVDKGASAQSFIERMTNFDKNLPNEKVLPKHSLLYEYFTVYNELTKVKYVTEGMRKPAFLSGEQKKAIVDLLFKTNRKVTVKQLKEDYFKKIECFDSVEISGVEDRFNASLGTYHDLLKIIKDKDFLDNEENEDILEDIVLTLTLFEDREMIEERLKTYAHLFDDKVMKQLKRRRYTGWGRLSRKLINGIRDKQSGKTILDFLKSDGFANRNFMQLIHDDSLTFKEDIQKAQVSGQGDSLHEHIANLAGSPAIKKGILQTVKVVDELVKVMGRHKPENIVIEMARENQTTQKGQKNSRERMKRIEEGIKELGSQILKEHPVENTQLQNEKLYLYYLQNGRDMYVDQELDINRLSDYDVDHIVPQSFLKDDSIDNKVLTRSDKARGKSDNVPSEEVVKKMKNYWRQLLNAKLITQRKFDNLTKAERGGLSELDKAGFIKRQLVETRQITKHVAQILDSRMNTKYDENDKLIREVKVITLKSKLVSDFRKDFQFYKVREINNYHHAHDAYLNAVVGTALIKKYPKLESEFVYGDYKVYDVRKMIAKSEQEIGKATAKYFFYSNIMNFFKTEITLANGEIRKRPLIETNGETGEIVWDKGRDFATVRKVLSMPQVNIVKKTEVQTGGFSKESILPKRNSDKLIARKKDWDPKKYGGFDSPTVAYSVLVVAKVEKGKSKKLKSVKELLGITIMERSSFEKNPIDFLEAKGYKEVKKDLIIKLPKYSLFELENGRKRMLASAGELQKGNELALPSKYVNFLYLASHYEKLKGSPEDNEQKQLFVEQHKHYLDEIIEQISEFSKRVILADANLDKVLSAYNKHRDKPIREQAENIIHLFTLTNLGAPAAFKYFDTTIDRKRYTSTKEVLDATLIHQSITGLYETRIDLSQLGGDGGPAPEAAAKGSSGGVQEISDSRPMLHIYLNGRRFLGLLDTGADKTCIAGRDWPANWPIHQTESSLQGLGMACGVARSSQPLRWQHEDKSGIIHPFVIPTLPFTLWGRDIMKDIKVRLMTDSPDDSQDLMIGAIESNLFADQISWKSDQPVWLNQWPLKQEKLQALQQLVTEQLQLGHLEESNSPWNTPVFVIKKKSGKWRLLQDLRAVNATMHDMGALQPGLPSPVAVPKGWEIIIIDLQDCFFNIKLHPEDCKRFAFSVPSPNFKRPYQRFQWKVLPQGMKNSPTLCQKFVDKAILTVRDKYQDSYIVHYMDDILLAHPSRSIVDEILTSMIQALNKHGLVVSTEKIQKYDNLKYLGTHIQGDSVSYQKLQIRTDKLRTLNDFQKLLGNINWIRPFLKLTTGELKPLFEILNGDSNPISTRKLTPEACKALQLMNERLSTARVKRLDLSQPWSLCILKTEYTPTACLWQDGVVEWIHLPHISPKVITPYDIFCTQLIIKGRHRSKELFSKDPDYIVVPYTKVQFDLLLQEKEDWPISLLGFLGEVHFHLPKDPLLTFTLQTAIIFPHMTSTTPLEKGIVIFTDGSANGRSVTYIQGREPIIKENTQNTAQQAEIVAVITAFEEVSQPFNLYTDSKYVTGLFPEIETATLSPRTKIYTELKHLQRLIHKRQEKFYIGHIRGHTGLPGPLAQGNAYADSLTRILTAAGKRTADGSEFEKRTADGSEFESPKKKAKVE

SEQ ID NO: 3153 - protein, 2121 aa, synthetic construct
MPAAKRVKLDGGDKKYSIGLDIGTNSVGWAVITDEYKVPSKKFKVLGNTDRHSIKKNLIGALLFDSGETAEATRLKRTARRRYTRRKNRICYLQEIFSNEMAKVDDSFFHRLEESFLVEEDKKHERHPIFGNIVDEVAYHEKYPTIYHLRKKLVDSTDKADLRLIYLALAHMIKFRGHFLIEGDLNPDNSDVDKLFIQLVQTYNQLFEENPINASGVDAKAILSARLSKSRRLENLIAQLPGEKKNGLFGNLIALSLGLTPNFKSNFDLAEDAKLQLSKDTYDDDLDNLLAQIGDQYADLFLAAKNLSDAILLSDILRVNTEITKAPLSASMIKRYDEHHQDLTLLKALVRQQLPEKYKEIFFDQSKNGYAGYIDGGASQEEFYKFIKPILEKMDGTEELLVKLNREDLLRKQRTFDNGSIPHQIHLGELHAILRRQEDFYPFLKDNREKIEKILTFRIPYYVGPLARGNSRFAWMTRKSEETITPWNFEEVVDKGASAQSFIERMTNFDKNLPNEKVLPKHSLLYEYFTVYNELTKVKYVTEGMRKPAFLSGEQKKAIVDLLFKTNRKVTVKQLKEDYFKKIECFDSVEISGVEDRFNASLGTYHDLLKIIKDKDFLDNEENEDILEDIVLTLTLFEDREMIEERLKTYAHLFDDKVMKQLKRRRYTGWGRLSRKLINGIRDKQSGKTILDFLKSDGFANRNFMQLIHDDSLTFKEDIQKAQVSGQGDSLHEHIANLAGSPAIKKGILQTVKVVDELVKVMGRHKPENIVIEMARENQTTQKGQKNSRERMKRIEEGIKELGSQILKEHPVENTQLQNEKLYLYYLQNGRDMYVDQELDINRLSDYDVDHIVPQSFLKDDSIDNKVLTRSDKARGKSDNVPSEEVVKKMKNYWRQLLNAKLITQRKFDNLTKAERGGLSELDKAGFIKRQLVETRQITKHVAQILDSRMNTKYDENDKLIREVKVITLKSKLVSDFRKDFQFYKVREINNYHHAHDAYLNAVVGTALIKKYPKLESEFVYGDYKVYDVRKMIAKSEQEIGKATAKYFFYSNIMNFFKTEITLANGEIRKRPLIETNGETGEIVWDKGRDFATVRKVLSMPQVNIVKKTEVQTGGFSKESILPKRNSDKLIARKKDWDPKKYGGFDSPTVAYSVLVVAKVEKGKSKKLKSVKELLGITIMERSSFEKNPIDFLEAKGYKEVKKDLIIKLPKYSLFELENGRKRMLASAGELQKGNELALPSKYVNFLYLASHYEKLKGSPEDNEQKQLFVEQHKHYLDEIIEQISEFSKRVILADANLDKVLSAYNKHRDKPIREQAENIIHLFTLTNLGAPAAFKYFDTTIDRKRYTSTKEVLDATLIHQSITGLYETRIDLSQLGGDGGSGSETPGTSESATPESGGVQEISDSRPMLHIYLNGRRFLGLLDTGADKTCIAGRDWPANWPIHQTESSLQGLGMACGVARSSQPLRWQHEDKSGIIHPFVIPTLPFTLWGRDIMKDIKVRLMTDSPDDSQDLMIGAIESNLFADQISWKSDQPVWLNQWPLKQEKLQALQQLVTEQLQLGHLEESNSPWNTPVFVIKKKSGKWRLLQDLRAVNATMHDMGALQPGLPSPVAVPKGWEIIIIDLQDCFFNIKLHPEDCKRFAFSVPSPNFKRPYQRFQWKVLPQGMKNSPTLCQKFVDKAILTVRDKYQDSYIVHYMDDILLAHPSRSIVDEILTSMIQALNKHGLVVSTEKIQKYDNLKYLGTHIQGDSVSYQKLQIRTDKLRTLNDFQKLLGNINWIRPFLKLTTGELKPLFEILNGDSNPISTRKLTPEACKALQLMNERLSTARVKRLDLSQPWSLCILKTEYTPTACLWQDGVVEWIHLPHISPKVITPYDIFCTQLIIKGRHRSKELFSKDPDYIVVPYTKVQFDLLLQEKEDWPISLLGFLGEVHFHLPKDPLLTFTLQTAIIFPHMTSTTPLEKGIVIFTDGSANGRSVTYIQGREPIIKENTQNTAQQAEIVAVITAFEEVSQPFNLYTDSKYVTGLFPEIETATLSPRTKIYTELKHLQRLIHKRQEKFYIGHIRGHTGLPGPLAQGNAYADSLTRILTAAGKRTADGSEFEKRTADGSEFESPKKKAKVE

SEQ ID NO: 3154 - protein, 2116 aa, synthetic construct
MPAAKRVKLDGGDKKYSIGLDIGTNSVGWAVITDEYKVPSKKFKVLGNTDRHSIKKNLIGALLFDSGETAEATRLKRTARRRYTRRKNRICYLQEIFSNEMAKVDDSFFHRLEESFLVEEDKKHERHPIFGNIVDEVAYHEKYPTIYHLRKKLVDSTDKADLRLIYLALAHMIKFRGHFLIEGDLNPDNSDVDKLFIQLVQTYNQLFEENPINASGVDAKAILSARLSKSRRLENLIAQLPGEKKNGLFGNLIALSLGLTPNFKSNFDLAEDAKLQLSKDTYDDDLDNLLAQIGDQYADLFLAAKNLSDAILLSDILRVNTEITKAPLSASMIKRYDEHHQDLTLLKALVRQQLPEKYKEIFFDQSKNGYAGYIDGGASQEEFYKFIKPILEKMDGTEELLVKLNREDLLRKQRTFDNGSIPHQIHLGELHAILRRQEDFYPFLKDNREKIEKILTFRIPYYVGPLARGNSRFAWMTRKSEETITPWNFEEVVDKGASAQSFIERMTNFDKNLPNEKVLPKHSLLYEYFTVYNELTKVKYVTEGMRKPAFLSGEQKKAIVDLLFKTNRKVTVKQLKEDYFKKIECFDSVEISGVEDRFNASLGTYHDLLKIIKDKDFLDNEENEDILEDIVLTLTLFEDREMIEERLKTYAHLFDDKVMKQLKRRRYTGWGRLSRKLINGIRDKQSGKTILDFLKSDGFANRNFMQLIHDDSLTFKEDIQKAQVSGQGDSLHEHIANLAGSPAIKKGILQTVKVVDELVKVMGRHKPENIVIEMARENQTTQKGQKNSRERMKRIEEGIKELGSQILKEHPVENTQLQNEKLYLYYLQNGRDMYVDQELDINRLSDYDVDHIVPQSFLKDDSIDNKVLTRSDKARGKSDNVPSEEVVKKMKNYWRQLLNAKLITQRKFDNLTKAERGGLSELDKAGFIKRQLVETRQITKHVAQILDSRMNTKYDENDKLIREVKVITLKSKLVSDFRKDFQFYKVREINNYHHAHDAYLNAVVGTALIKKYPKLESEFVYGDYKVYDVRKMIAKSEQEIGKATAKYFFYSNIMNFFKTEITLANGEIRKRPLIETNGETGEIVWDKGRDFATVRKVLSMPQVNIVKKTEVQTGGFSKESILPKRNSDKLIARKKDWDPKKYGGFDSPTVAYSVLVVAKVEKGKSKKLKSVKELLGITIMERSSFEKNPIDFLEAKGYKEVKKDLIIKLPKYSLFELENGRKRMLASAGELQKGNELALPSKYVNFLYLASHYEKLKGSPEDNEQKQLFVEQHKHYLDEIIEQISEFSKRVILADANLDKVLSAYNKHRDKPIREQAENIIHLFTLTNLGAPAAFKYFDTTIDRKRYTSTKEVLDATLIHQSITGLYETRIDLSQLGGDGGGGSEAAAKGGGGGVQEISDSRPMLHIYLNGRRFLGLLDTGADKTCIAGRDWPANWPIHQTESSLQGLGMACGVARSSQPLRWQHEDKSGIIHPFVIPTLPFTLWGRDIMKDIKVRLMTDSPDDSQDLMIGAIESNLFADQISWKSDQPVWLNQWPLKQEKLQALQQLVTEQLQLGHLEESNSPWNTPVFVIKKKSGKWRLLQDLRAVNATMHDMGALQPGLPSPVAVPKGWEIIIIDLQDCFFNIKLHPEDCKRFAFSVPSPNFKRPYQRFQWKVLPQGMKNSPTLCQKFVDKAILTVRDKYQDSYIVHYMDDILLAHPSRSIVDEILTSMIQALNKHGLVVSTEKIQKYDNLKYLGTHIQGDSVSYQKLQIRTDKLRTLNDFQKLLGNINWIRPFLKLTTGELKPLFEILNGDSNPISTRKLTPEACKALQLMNERLSTARVKRLDLSQPWSLCILKTEYTPTACLWQDGVVEWIHLPHISPKVITPYDIFCTQLIIKGRHRSKELFSKDPDYIVVPYTKVQFDLLLQEKEDWPISLLGFLGEVHFHLPKDPLLTFTLQTAIIFPHMTSTTPLEKGIVIFTDGSANGRSVTYIQGREPIIKENTQNTAQQAEIVAVITAFEEVSQPFNLYTDSKYVTGLFPEIETATLSPRTKIYTELKHLQRLIHKRQEKFYIGHIRGHTGLPGPLAQGNAYADSLTRILTAAGKRTADGSEFEKRTADGSEFESPKKKAKVE

SEQ ID NO: 3155 - protein, 2114 aa, synthetic construct
MPAAKRVKLDGGDKKYSIGLDIGTNSVGWAVITDEYKVPSKKFKVLGNTDRHSIKKNLIGALLFDSGETAEATRLKRTARRRYTRRKNRICYLQEIFSNEMAKVDDSFFHRLEESFLVEEDKKHERHPIFGNIVDEVAYHEKYPTIYHLRKKLVDSTDKADLRLIYLALAHMIKFRGHFLIEGDLNPDNSDVDKLFIQLVQTYNQLFEENPINASGVDAKAILSARLSKSRRLENLIAQLPGEKKNGLFGNLIALSLGLTPNFKSNFDLAEDAKLQLSKDTYDDDLDNLLAQIGDQYADLFLAAKNLSDAILLSDILRVNTEITKAPLSASMIKRYDEHHQDLTLLKALVRQQLPEKYKEIFFDQSKNGYAGYIDGGASQEEFYKFIKPILEKMDGTEELLVKLNREDLLRKQRTFDNGSIPHQIHLGELHAILRRQEDFYPFLKDNREKIEKILTFRIPYYVGPLARGNSRFAWMTRKSEETITPWNFEEVVDKGASAQSFIERMTNFDKNLPNEKVLPKHSLLYEYFTVYNELTKVKYVTEGMRKPAFLSGEQKKAIVDLLFKTNRKVTVKQLKEDYFKKIECFDSVEISGVEDRFNASLGTYHDLLKIIKDKDFLDNEENEDILEDIVLTLTLFEDREMIEERLKTYAHLFDDKVMKQLKRRRYTGWGRLSRKLINGIRDKQSGKTILDFLKSDGFANRNFMQLIHDDSLTFKEDIQKAQVSGQGDSLHEHIANLAGSPAIKKGILQTVKVVDELVKVMGRHKPENIVIEMARENQTTQKGQKNSRERMKRIEEGIKELGSQILKEHPVENTQLQNEKLYLYYLQNGRDMYVDQELDINRLSDYDVDHIVPQSFLKDDSIDNKVLTRSDKARGKSDNVPSEEVVKKMKNYWRQLLNAKLITQRKFDNLTKAERGGLSELDKAGFIKRQLVETRQITKHVAQILDSRMNTKYDENDKLIREVKVITLKSKLVSDFRKDFQFYKVREINNYHHAHDAYLNAVVGTALIKKYPKLESEFVYGDYKVYDVRKMIAKSEQEIGKATAKYFFYSNIMNFFKTEITLANGEIRKRPLIETNGETGEIVWDKGRDFATVRKVLSMPQVNIVKKTEVQTGGFSKESILPKRNSDKLIARKKDWDPKKYGGFDSPTVAYSVLVVAKVEKGKSKKLKSVKELLGITIMERSSFEKNPIDFLEAKGYKEVKKDLIIKLPKYSLFELENGRKRMLASAGELQKGNELALPSKYVNFLYLASHYEKLKGSPEDNEQKQLFVEQHKHYLDEIIEQISEFSKRVILADANLDKVLSAYNKHRDKPIREQAENIIHLFTLTNLGAPAAFKYFDTTIDRKRYTSTKEVLDATLIHQSITGLYETRIDLSQLGGDGGPAPGGSGSSGGVQEISDSRPMLHIYLNGRRFLGLLDTGADKTCIAGRDWPANWPIHQTESSLQGLGMACGVARSSQPLRWQHEDKSGIIHPFVIPTLPFTLWGRDIMKDIKVRLMTDSPDDSQDLMIGAIESNLFADQISWKSDQPVWLNQWPLKQEKLQALQQLVTEQLQLGHLEESNSPWNTPVFVIKKKSGKWRLLQDLRAVNATMHDMGALQPGLPSPVAVPKGWEIIIIDLQDCFFNIKLHPEDCKRFAFSVPSPNFKRPYQRFQWKVLPQGMKNSPTLCQKFVDKAILTVRDKYQDSYIVHYMDDILLAHPSRSIVDEILTSMIQALNKHGLVVSTEKIQKYDNLKYLGTHIQGDSVSYQKLQIRTDKLRTLNDFQKLLGNINWIRPFLKLTTGELKPLFEILNGDSNPISTRKLTPEACKALQLMNERLSTARVKRLDLSQPWSLCILKTEYTPTACLWQDGVVEWIHLPHISPKVITPYDIFCTQLIIKGRHRSKELFSKDPDYIVVPYTKVQFDLLLQEKEDWPISLLGFLGEVHFHLPKDPLLTFTLQTAIIFPHMTSTTPLEKGIVIFTDGSANGRSVTYIQGREPIIKENTQNTAQQAEIVAVITAFEEVSQPFNLYTDSKYVTGLFPEIETATLSPRTKIYTELKHLQRLIHKRQEKFYIGHIRGHTGLPGPLAQGNAYADSLTRILTAAGKRTADGSEFEKRTADGSEFESPKKKAKVE

SEQ ID NO: 3156 - protein, 2116 aa, synthetic construct
MPAAKRVKLDGGDKKYSIGLDIGTNSVGWAVITDEYKVPSKKFKVLGNTDRHSIKKNLIGALLFDSGETAEATRLKRTARRRYTRRKNRICYLQEIFSNEMAKVDDSFFHRLEESFLVEEDKKHERHPIFGNIVDEVAYHEKYPTIYHLRKKLVDSTDKADLRLIYLALAHMIKFRGHFLIEGDLNPDNSDVDKLFIQLVQTYNQLFEENPINASGVDAKAILSARLSKSRRLENLIAQLPGEKKNGLFGNLIALSLGLTPNFKSNFDLAEDAKLQLSKDTYDDDLDNLLAQIGDQYADLFLAAKNLSDAILLSDILRVNTEITKAPLSASMIKRYDEHHQDLTLLKALVRQQLPEKYKEIFFDQSKNGYAGYIDGGASQEEFYKFIKPILEKMDGTEELLVKLNREDLLRKQRTFDNGSIPHQIHLGELHAILRRQEDFYPFLKDNREKIEKILTFRIPYYVGPLARGNSRFAWMTRKSEETITPWNFEEVVDKGASAQSFIERMTNFDKNLPNEKVLPKHSLLYEYFTVYNELTKVKYVTEGMRKPAFLSGEQKKAIVDLLFKTNRKVTVKQLKEDYFKKIECFDSVEISGVEDRFNASLGTYHDLLKIIKDKDFLDNEENEDILEDIVLTLTLFEDREMIEERLKTYAHLFDDKVMKQLKRRRYTGWGRLSRKLINGIRDKQSGKTILDFLKSDGFANRNFMQLIHDDSLTFKEDIQKAQVSGQGDSLHEHIANLAGSPAIKKGILQTVKVVDELVKVMGRHKPENIVIEMARENQTTQKGQKNSRERMKRIEEGIKELGSQILKEHPVENTQLQNEKLYLYYLQNGRDMYVDQELDINRLSDYDVDHIVPQSFLKDDSIDNKVLTRSDKARGKSDNVPSEEVVKKMKNYWRQLLNAKLITQRKFDNLTKAERGGLSELDKAGFIKRQLVETRQITKHVAQILDSRMNTKYDENDKLIREVKVITLKSKLVSDFRKDFQFYKVREINNYHHAHDAYLNAVVGTALIKKYPKLESEFVYGDYKVYDVRKMIAKSEQEIGKATAKYFFYSNIMNFFKTEITLANGEIRKRPLIETNGETGEIVWDKGRDFATVRKVLSMPQVNIVKKTEVQTGGFSKESILPKRNSDKLIARKKDWDPKKYGGFDSPTVAYSVLVVAKVEKGKSKKLKSVKELLGITIMERSSFEKNPIDFLEAKGYKEVKKDLIIKLPKYSLFELENGRKRMLASAGELQKGNELALPSKYVNFLYLASHYEKLKGSPEDNEQKQLFVEQHKHYLDEIIEQISEFSKRVILADANLDKVLSAYNKHRDKPIREQAENIIHLFTLTNLGAPAAFKYFDTTIDRKRYTSTKEVLDATLIHQSITGLYETRIDLSQLGGDGGEAAAKGGGGGSGGVQEISDSRPMLHIYLNGRRFLGLLDTGADKTCIAGRDWPANWPIHQTESSLQGLGMACGVARSSQPLRWQHEDKSGIIHPFVIPTLPFTLWGRDIMKDIKVRLMTDSPDDSQDLMIGAIESNLFADQISWKSDQPVWLNQWPLKQEKLQALQQLVTEQLQLGHLEESNSPWNTPVFVIKKKSGKWRLLQDLRAVNATMHDMGALQPGLPSPVAVPKGWEIIIIDLQDCFFNIKLHPEDCKRFAFSVPSPNFKRPYQRFQWKVLPQGMKNSPTLCQKFVDKAILTVRDKYQDSYIVHYMDDILLAHPSRSIVDEILTSMIQALNKHGLVVSTEKIQKYDNLKYLGTHIQGDSVSYQKLQIRTDKLRTLNDFQKLLGNINWIRPFLKLTTGELKPLFEILNGDSNPISTRKLTPEACKALQLMNERLSTARVKRLDLSQPWSLCILKTEYTPTACLWQDGVVEWIHLPHISPKVITPYDIFCTQLIIKGRHRSKELFSKDPDYIVVPYTKVQFDLLLQEKEDWPISLLGFLGEVHFHLPKDPLLTFTLQTAIIFPHMTSTTPLEKGIVIFTDGSANGRSVTYIQGREPIIKENTQNTAQQAEIVAVITAFEEVSQPFNLYTDSKYVTGLFPEIETATLSPRTKIYTELKHLQRLIHKRQEKFYIGHIRGHTGLPGPLAQGNAYADSLTRILTAAGKRTADGSEFEKRTADGSEFESPKKKAKVE

SEQ ID NO: 3157 - protein, 2125 aa, synthetic construct
MPAAKRVKLDGGDKKYSIGLDIGTNSVGWAVITDEYKVPSKKFKVLGNTDRHSIKKNLIGALLFDSGETAEATRLKRTARRRYTRRKNRICYLQEIFSNEMAKVDDSFFHRLEESFLVEEDKKHERHPIFGNIVDEVAYHEKYPTIYHLRKKLVDSTDKADLRLIYLALAHMIKFRGHFLIEGDLNPDNSDVDKLFIQLVQTYNQLFEENPINASGVDAKAILSARLSKSRRLENLIAQLPGEKKNGLFGNLIALSLGLTPNFKSNFDLAEDAKLQLSKDTYDDDLDNLLAQIGDQYADLFLAAKNLSDAILLSDILRVNTEITKAPLSASMIKRYDEHHQDLTLLKALVRQQLPEKYKEIFFDQSKNGYAGYIDGGASQEEFYKFIKPILEKMDGTEELLVKLNREDLLRKQRTFDNGSIPHQIHLGELHAILRRQEDFYPFLKDNREKIEKILTFRIPYYVGPLARGNSRFAWMTRKSEETITPWNFEEVVDKGASAQSFIERMTNFDKNLPNEKVLPKHSLLYEYFTVYNELTKVKYVTEGMRKPAFLSGEQKKAIVDLLFKTNRKVTVKQLKEDYFKKIECFDSVEISGVEDRFNASLGTYHDLLKIIKDKDFLDNEENEDILEDIVLTLTLFEDREMIEERLKTYAHLFDDKVMKQLKRRRYTGWGRLSRKLINGIRDKQSGKTILDFLKSDGFANRNFMQLIHDDSLTFKEDIQKAQVSGQGDSLHEHIANLAGSPAIKKGILQTVKVVDELVKVMGRHKPENIVIEMARENQTTQKGQKNSRERMKRIEEGIKELGSQILKEHPVENTQLQNEKLYLYYLQNGRDMYVDQELDINRLSDYDVDHIVPQSFLKDDSIDNKVLTRSDKARGKSDNVPSEEVVKKMKNYWRQLLNAKLITQRKFDNLTKAERGGLSELDKAGFIKRQLVETRQITKHVAQILDSRMNTKYDENDKLIREVKVITLKSKLVSDFRKDFQFYKVREINNYHHAHDAYLNAVVGTALIKKYPKLESEFVYGDYKVYDVRKMIAKSEQEIGKATAKYFFYSNIMNFFKTEITLANGEIRKRPLIETNGETGEIVWDKGRDFATVRKVLSMPQVNIVKKTEVQTGGFSKESILPKRNSDKLIARKKDWDPKKYGGFDSPTVAYSVLVVAKVEKGKSKKLKSVKELLGITIMERSSFEKNPIDFLEAKGYKEVKKDLIIKLPKYSLFELENGRKRMLASAGELQKGNELALPSKYVNFLYLASHYEKLKGSPEDNEQKQLFVEQHKHYLDEIIEQISEFSKRVILADANLDKVLSAYNKHRDKPIREQAENIIHLFTLTNLGAPAAFKYFDTTIDRKRYTSTKEVLDATLIHQSITGLYETRIDLSQLGGDGGEAAAKEAAAKEAAAKEAAAKGGVQEISDSRPMLHIYLNGRRFLGLLDTGADKTCIAGRDWPANWPIHQTESSLQGLGMACGVARSSQPLRWQHEDKSGIIHPFVIPTLPFTLWGRDIMKDIKVRLMTDSPDDSQDLMIGAIESNLFADQISWKSDQPVWLNQWPLKQEKLQALQQLVTEQLQLGHLEESNSPWNTPVFVIKKKSGKWRLLQDLRAVNATMHDMGALQPGLPSPVAVPKGWEIIIIDLQDCFFNIKLHPEDCKRFAFSVPSPNFKRPYQRFQWKVLPQGMKNSPTLCQKFVDKAILTVRDKYQDSYIVHYMDDILLAHPSRSIVDEILTSMIQALNKHGLVVSTEKIQKYDNLKYLGTHIQGDSVSYQKLQIRTDKLRTLNDFQKLLGNINWIRPFLKLTTGELKPLFEILNGDSNPISTRKLTPEACKALQLMNERLSTARVKRLDLSQPWSLCILKTEYTPTACLWQDGVVEWIHLPHISPKVITPYDIFCTQLIIKGRHRSKELFSKDPDYIVVPYTKVQFDLLLQEKEDWPISLLGFLGEVHFHLPKDPLLTFTLQTAIIFPHMTSTTPLEKGIVIFTDGSANGRSVTYIQGREPIIKENTQNTAQQAEIVAVITAFEEVSQPFNLYTDSKYVTGLFPEIETATLSPRTKIYTELKHLQRLIHKRQEKFYIGHIRGHTGLPGPLAQGNAYADSLTRILTAAGKRTADGSEFEKRTADGSEFESPKKKAKVE

SEQ ID NO: 3158 - protein, 2116 aa, synthetic construct
MPAAKRVKLDGGDKKYSIGLDIGTNSVGWAVITDEYKVPSKKFKVLGNTDRHSIKKNLIGALLFDSGETAEATRLKRTARRRYTRRKNRICYLQEIFSNEMAKVDDSFFHRLEESFLVEEDKKHERHPIFGNIVDEVAYHEKYPTIYHLRKKLVDSTDKADLRLIYLALAHMIKFRGHFLIEGDLNPDNSDVDKLFIQLVQTYNQLFEENPINASGVDAKAILSARLSKSRRLENLIAQLPGEKKNGLFGNLIALSLGLTPNFKSNFDLAEDAKLQLSKDTYDDDLDNLLAQIGDQYADLFLAAKNLSDAILLSDILRVNTEITKAPLSASMIKRYDEHHQDLTLLKALVRQQLPEKYKEIFFDQSKNGYAGYIDGGASQEEFYKFIKPILEKMDGTEELLVKLNREDLLRKQRTFDNGSIPHQIHLGELHAILRRQEDFYPFLKDNREKIEKILTFRIPYYVGPLARGNSRFAWMTRKSEETITPWNFEEVVDKGASAQSFIERMTNFDKNLPNEKVLPKHSLLYEYFTVYNELTKVKYVTEGMRKPAFLSGEQKKAIVDLLFKTNRKVTVKQLKEDYFKKIECFDSVEISGVEDRFNASLGTYHDLLKIIKDKDFLDNEENEDILEDIVLTLTLFEDREMIEERLKTYAHLFDDKVMKQLKRRRYTGWGRLSRKLINGIRDKQSGKTILDFLKSDGFANRNFMQLIHDDSLTFKEDIQKAQVSGQGDSLHEHIANLAGSPAIKKGILQTVKVVDELVKVMGRHKPENIVIEMARENQTTQKGQKNSRERMKRIEEGIKELGSQILKEHPVENTQLQNEKLYLYYLQNGRDMYVDQELDINRLSDYDVDHIVPQSFLKDDSIDNKVLTRSDKARGKSDNVPSEEVVKKMKNYWRQLLNAKLITQRKFDNLTKAERGGLSELDKAGFIKRQLVETRQITKHVAQILDSRMNTKYDENDKLIREVKVITLKSKLVSDFRKDFQFYKVREINNYHHAHDAYLNAVVGTALIKKYPKLESEFVYGDYKVYDVRKMIAKSEQEIGKATAKYFFYSNIMNFFKTEITLANGEIRKRPLIETNGETGEIVWDKGRDFATVRKVLSMPQVNIVKKTEVQTGGFSKESILPKRNSDKLIARKKDWDPKKYGGFDSPTVAYSVLVVAKVEKGKSKKLKSVKELLGITIMERSSFEKNPIDFLEAKGYKEVKKDLIIKLPKYSLFELENGRKRMLASAGELQKGNELALPSKYVNFLYLASHYEKLKGSPEDNEQKQLFVEQHKHYLDEIIEQISEFSKRVILADANLDKVLSAYNKHRDKPIREQAENIIHLFTLTNLGAPAAFKYFDTTIDRKRYTSTKEVLDATLIHQSITGLYETRIDLSQLGGDGGGGSEAAAKGSSGGVQEISDSRPMLHIYLNGRRFLGLLDTGADKTCIAGRDWPANWPIHQTESSLQGLGMACGVARSSQPLRWQHEDKSGIIHPFVIPTLPFTLWGRDIMKDIKVRLMTDSPDDSQDLMIGAIESNLFADQISWKSDQPVWLNQWPLKQEKLQALQQLVTEQLQLGHLEESNSPWNTPVFVIKKKSGKWRLLQDLRAVNATMHDMGALQPGLPSPVAVPKGWEIIIIDLQDCFFNIKLHPEDCKRFAFSVPSPNFKRPYQRFQWKVLPQGMKNSPTLCQKFVDKAILTVRDKYQDSYIVHYMDDILLAHPSRSIVDEILTSMIQALNKHGLVVSTEKIQKYDNLKYLGTHIQGDSVSYQKLQIRTDKLRTLNDFQKLLGNINWIRPFLKLTTGELKPLFEILNGDSNPISTRKLTPEACKALQLMNERLSTARVKRLDLSQPWSLCILKTEYTPTACLWQDGVVEWIHLPHISPKVITPYDIFCTQLIIKGRHRSKELFSKDPDYIVVPYTKVQFDLLLQEKEDWPISLLGFLGEVHFHLPKDPLLTFTLQTAIIFPHMTSTTPLEKGIVIFTDGSANGRSVTYIQGREPIIKENTQNTAQQAEIVAVITAFEEVSQPFNLYTDSKYVTGLFPEIETATLSPRTKIYTELKHLQRLIHKRQEKFYIGHIRGHTGLPGPLAQGNAYADSLTRILTAAGKRTADGSEFEKRTADGSEFESPKKKAKVE

SEQ ID NO: 3159 - protein, 2114 aa, synthetic construct
MPAAKRVKLDGGDKKYSIGLDIGTNSVGWAVITDEYKVPSKKFKVLGNTDRHSIKKNLIGALLFDSGETAEATRLKRTARRRYTRRKNRICYLQEIFSNEMAKVDDSFFHRLEESFLVEEDKKHERHPIFGNIVDEVAYHEKYPTIYHLRKKLVDSTDKADLRLIYLALAHMIKFRGHFLIEGDLNPDNSDVDKLFIQLVQTYNQLFEENPINASGVDAKAILSARLSKSRRLENLIAQLPGEKKNGLFGNLIALSLGLTPNFKSNFDLAEDAKLQLSKDTYDDDLDNLLAQIGDQYADLFLAAKNLSDAILLSDILRVNTEITKAPLSASMIKRYDEHHQDLTLLKALVRQQLPEKYKEIFFDQSKNGYAGYIDGGASQEEFYKFIKPILEKMDGTEELLVKLNREDLLRKQRTFDNGSIPHQIHLGELHAILRRQEDFYPFLKDNREKIEKILTFRIPYYVGPLARGNSRFAWMTRKSEETITPWNFEEVVDKGASAQSFIERMTNFDKNLPNEKVLPKHSLLYEYFTVYNELTKVKYVTEGMRKPAFLSGEQKKAIVDLLFKTNRKVTVKQLKEDYFKKIECFDSVEISGVEDRFNASLGTYHDLLKIIKDKDFLDNEENEDILEDIVLTLTLFEDREMIEERLKTYAHLFDDKVMKQLKRRRYTGWGRLSRKLINGIRDKQSGKTILDFLKSDGFANRNFMQLIHDDSLTFKEDIQKAQVSGQGDSLHEHIANLAGSPAIKKGILQTVKVVDELVKVMGRHKPENIVIEMARENQTTQKGQKNSRERMKRIEEGIKELGSQILKEHPVENTQLQNEKLYLYYLQNGRDMYVDQELDINRLSDYDVDHIVPQSFLKDDSIDNKVLTRSDKARGKSDNVPSEEVVKKMKNYWRQLLNAKLITQRKFDNLTKAERGGLSELDKAGFIKRQLVETRQITKHVAQILDSRMNTKYDENDKLIREVKVITLKSKLVSDFRKDFQFYKVREINNYHHAHDAYLNAVVGTALIKKYPKLESEFVYGDYKVYDVRKMIAKSEQEIGKATAKYFFYSNIMNFFKTEITLANGEIRKRPLIETNGETGEIVWDKGRDFATVRKVLSMPQVNIVKKTEVQTGGFSKESILPKRNSDKLIARKKDWDPKKYGGFDSPTVAYSVLVVAKVEKGKSKKLKSVKELLGITIMERSSFEKNPIDFLEAKGYKEVKKDLIIKLPKYSLFELENGRKRMLASAGELQKGNELALPSKYVNFLYLASHYEKLKGSPEDNEQKQLFVEQHKHYLDEIIEQISEFSKRVILADANLDKVLSAYNKHRDKPIREQAENIIHLFTLTNLGAPAAFKYFDTTIDRKRYTSTKEVLDATLIHQSITGLYETRIDLSQLGGDGGGGGGSSGGSGGVQEISDSRPMLHIYLNGRRFLGLLDTGADKTCIAGRDWPANWPIHQTESSLQGLGMACGVARSSQPLRWQHEDKSGIIHPFVIPTLPFTLWGRDIMKDIKVRLMTDSPDDSQDLMIGAIESNLFADQISWKSDQPVWLNQWPLKQEKLQALQQLVTEQLQLGHLEESNSPWNTPVFVIKKKSGKWRLLQDLRAVNATMHDMGALQPGLPSPVAVPKGWEIIIIDLQDCFFNIKLHPEDCKRFAFSVPSPNFKRPYQRFQWKVLPQGMKNSPTLCQKFVDKAILTVRDKYQDSYIVHYMDDILLAHPSRSIVDEILTSMIQALNKHGLVVSTEKIQKYDNLKYLGTHIQGDSVSYQKLQIRTDKLRTLNDFQKLLGNINWIRPFLKLTTGELKPLFEILNGDSNPISTRKLTPEACKALQLMNERLSTARVKRLDLSQPWSLCILKTEYTPTACLWQDGVVEWIHLPHISPKVITPYDIFCTQLIIKGRHRSKELFSKDPDYIVVPYTKVQFDLLLQEKEDWPISLLGFLGEVHFHLPKDPLLTFTLQTAIIFPHMTSTTPLEKGIVIFTDGSANGRSVTYIQGREPIIKENTQNTAQQAEIVAVITAFEEVSQPFNLYTDSKYVTGLFPEIETATLSPRTKIYTELKHLQRLIHKRQEKFYIGHIRGHTGLPGPLAQGNAYADSLTRILTAAGKRTADGSEFEKRTADGSEFESPKKKAKVE

SEQ ID NO: 3160 - protein, 2111 aa, synthetic construct
MPAAKRVKLDGGDKKYSIGLDIGTNSVGWAVITDEYKVPSKKFKVLGNTDRHSIKKNLIGALLFDSGETAEATRLKRTARRRYTRRKNRICYLQEIFSNEMAKVDDSFFHRLEESFLVEEDKKHERHPIFGNIVDEVAYHEKYPTIYHLRKKLVDSTDKADLRLIYLALAHMIKFRGHFLIEGDLNPDNSDVDKLFIQLVQTYNQLFEENPINASGVDAKAILSARLSKSRRLENLIAQLPGEKKNGLFGNLIALSLGLTPNFKSNFDLAEDAKLQLSKDTYDDDLDNLLAQIGDQYADLFLAAKNLSDAILLSDILRVNTEITKAPLSASMIKRYDEHHQDLTLLKALVRQQLPEKYKEIFFDQSKNGYAGYIDGGASQEEFYKFIKPILEKMDGTEELLVKLNREDLLRKQRTFDNGSIPHQIHLGELHAILRRQEDFYPFLKDNREKIEKILTFRIPYYVGPLARGNSRFAWMTRKSEETITPWNFEEVVDKGASAQSFIERMTNFDKNLPNEKVLPKHSLLYEYFTVYNELTKVKYVTEGMRKPAFLSGEQKKAIVDLLFKTNRKVTVKQLKEDYFKKIECFDSVEISGVEDRFNASLGTYHDLLKIIKDKDFLDNEENEDILEDIVLTLTLFEDREMIEERLKTYAHLFDDKVMKQLKRRRYTGWGRLSRKLINGIRDKQSGKTILDFLKSDGFANRNFMQLIHDDSLTFKEDIQKAQVSGQGDSLHEHIANLAGSPAIKKGILQTVKVVDELVKVMGRHKPENIVIEMARENQTTQKGQKNSRERMKRIEEGIKELGSQILKEHPVENTQLQNEKLYLYYLQNGRDMYVDQELDINRLSDYDVDHIVPQSFLKDDSIDNKVLTRSDKARGKSDNVPSEEVVKKMKNYWRQLLNAKLITQRKFDNLTKAERGGLSELDKAGFIKRQLVETRQITKHVAQILDSRMNTKYDENDKLIREVKVITLKSKLVSDFRKDFQFYKVREINNYHHAHDAYLNAVVGTALIKKYPKLESEFVYGDYKVYDVRKMIAKSEQEIGKATAKYFFYSNIMNFFKTEITLANGEIRKRPLIETNGETGEIVWDKGRDFATVRKVLSMPQVNIVKKTEVQTGGFSKESILPKRNSDKLIARKKDWDPKKYGGFDSPTVAYSVLVVAKVEKGKSKKLKSVKELLGITIMERSSFEKNPIDFLEAKGYKEVKKDLIIKLPKYSLFELENGRKRMLASAGELQKGNELALPSKYVNFLYLASHYEKLKGSPEDNEQKQLFVEQHKHYLDEIIEQISEFSKRVILADANLDKVLSAYNKHRDKPIREQAENIIHLFTLTNLGAPAAFKYFDTTIDRKRYTSTKEVLDATLIHQSITGLYETRIDLSQLGGDGGGGSPAPGGVQEISDSRPMLHIYLNGRRFLGLLDTGADKTCIAGRDWPANWPIHQTESSLQGLGMACGVARSSQPLRWQHEDKSGIIHPFVIPTLPFTLWGRDIMKDIKVRLMTDSPDDSQDLMIGAIESNLFADQISWKSDQPVWLNQWPLKQEKLQALQQLVTEQLQLGHLEESNSPWNTPVFVIKKKSGKWRLLQDLRAVNATMHDMGALQPGLPSPVAVPKGWEIIIIDLQDCFFNIKLHPEDCKRFAFSVPSPNFKRPYQRFQWKVLPQGMKNSPTLCQKFVDKAILTVRDKYQDSYIVHYMDDILLAHPSRSIVDEILTSMIQALNKHGLVVSTEKIQKYDNLKYLGTHIQGDSVSYQKLQIRTDKLRTLNDFQKLLGNINWIRPFLKLTTGELKPLFEILNGDSNPISTRKLTPEACKALQLMNERLSTARVKRLDLSQPWSLCILKTEYTPTACLWQDGVVEWIHLPHISPKVITPYDIFCTQLIIKGRHRSKELFSKDPDYIVVPYTKVQFDLLLQEKEDWPISLLGFLGEVHFHLPKDPLLTFTLQTAIIFPHMTSTTPLEKGIVIFTDGSANGRSVTYIQGREPIIKENTQNTAQQAEIVAVITAFEEVSQPFNLYTDSKYVTGLFPEIETATLSPRTKIYTELKHLQRLIHKRQEKFYIGHIRGHTGLPGPLAQGNAYADSLTRILTAAGKRTADGSEFEKRTADGSEFESPKKKAKVE

SEQ ID NO: 3161 - protein, 2114 aa, synthetic construct
MPAAKRVKLDGGDKKYSIGLDIGTNSVGWAVITDEYKVPSKKFKVLGNTDRHSIKKNLIGALLFDSGETAEATRLKRTARRRYTRRKNRICYLQEIFSNEMAKVDDSFFHRLEESFLVEEDKKHERHPIFGNIVDEVAYHEKYPTIYHLRKKLVDSTDKADLRLIYLALAHMIKFRGHFLIEGDLNPDNSDVDKLFIQLVQTYNQLFEENPINASGVDAKAILSARLSKSRRLENLIAQLPGEKKNGLFGNLIALSLGLTPNFKSNFDLAEDAKLQLSKDTYDDDLDNLLAQIGDQYADLFLAAKNLSDAILLSDILRVNTEITKAPLSASMIKRYDEHHQDLTLLKALVRQQLPEKYKEIFFDQSKNGYAGYIDGGASQEEFYKFIKPILEKMDGTEELLVKLNREDLLRKQRTFDNGSIPHQIHLGELHAILRRQEDFYPFLKDNREKIEKILTFRIPYYVGPLARGNSRFAWMTRKSEETITPWNFEEVVDKGASAQSFIERMTNFDKNLPNEKVLPKHSLLYEYFTVYNELTKVKYVTEGMRKPAFLSGEQKKAIVDLLFKTNRKVTVKQLKEDYFKKIECFDSVEISGVEDRFNASLGTYHDLLKIIKDKDFLDNEENEDILEDIVLTLTLFEDREMIEERLKTYAHLFDDKVMKQLKRRRYTGWGRLSRKLINGIRDKQSGKTILDFLKSDGFANRNFMQLIHDDSLTFKEDIQKAQVSGQGDSLHEHIANLAGSPAIKKGILQTVKVVDELVKVMGRHKPENIVIEMARENQTTQKGQKNSRERMKRIEEGIKELGSQILKEHPVENTQLQNEKLYLYYLQNGRDMYVDQELDINRLSDYDVDHIVPQSFLKDDSIDNKVLTRSDKARGKSDNVPSEEVVKKMKNYWRQLLNAKLITQRKFDNLTKAERGGLSELDKAGFIKRQLVETRQITKHVAQILDSRMNTKYDENDKLIREVKVITLKSKLVSDFRKDFQFYKVREINNYHHAHDAYLNAVVGTALIKKYPKLESEFVYGDYKVYDVRKMIAKSEQEIGKATAKYFFYSNIMNFFKTEITLANGEIRKRPLIETNGETGEIVWDKGRDFATVRKVLSMPQVNIVKKTEVQTGGFSKESILPKRNSDKLIARKKDWDPKKYGGFDSPTVAYSVLVVAKVEKGKSKKLKSVKELLGITIMERSSFEKNPIDFLEAKGYKEVKKDLIIKLPKYSLFELENGRKRMLASAGELQKGNELALPSKYVNFLYLASHYEKLKGSPEDNEQKQLFVEQHKHYLDEIIEQISEFSKRVILADANLDKVLSAYNKHRDKPIREQAENIIHLFTLTNLGAPAAFKYFDTTIDRKRYTSTKEVLDATLIHQSITGLYETRIDLSQLGGDGGPAPGSSGGSGGVQEISDSRPMLHIYLNGRRFLGLLDTGADKTCIAGRDWPANWPIHQTESSLQGLGMACGVARSSQPLRWQHEDKSGIIHPFVIPTLPFTLWGRDIMKDIKVRLMTDSPDDSQDLMIGAIESNLFADQISWKSDQPVWLNQWPLKQEKLQALQQLVTEQLQLGHLEESNSPWNTPVFVIKKKSGKWRLLQDLRAVNATMHDMGALQPGLPSPVAVPKGWEIIIIDLQDCFFNIKLHPEDCKRFAFSVPSPNFKRPYQRFQWKVLPQGMKNSPTLCQKFVDKAILTVRDKYQDSYIVHYMDDILLAHPSRSIVDEILTSMIQALNKHGLVVSTEKIQKYDNLKYLGTHIQGDSVSYQKLQIRTDKLRTLNDFQKLLGNINWIRPFLKLTTGELKPLFEILNGDSNPISTRKLTPEACKALQLMNERLSTARVKRLDLSQPWSLCILKTEYTPTACLWQDGVVEWIHLPHISPKVITPYDIFCTQLIIKGRHRSKELFSKDPDYIVVPYTKVQFDLLLQEKEDWPISLLGFLGEVHFHLPKDPLLTFTLQTAIIFPHMTSTTPLEKGIVIFTDGSANGRSVTYIQGREPIIKENTQNTAQQAEIVAVITAFEEVSQPFNLYTDSKYVTGLFPEIETATLSPRTKIYTELKHLQRLIHKRQEKFYIGHIRGHTGLPGPLAQGNAYADSLTRILTAAGKRTADGSEFEKRTADGSEFESPKKKAKVE

SEQ ID NO: 3162 - protein, 2116 aa, synthetic construct
MPAAKRVKLDGGDKKYSIGLDIGTNSVGWAVITDEYKVPSKKFKVLGNTDRHSIKKNLIGALLFDSGETAEATRLKRTARRRYTRRKNRICYLQEIFSNEMAKVDDSFFHRLEESFLVEEDKKHERHPIFGNIVDEVAYHEKYPTIYHLRKKLVDSTDKADLRLIYLALAHMIKFRGHFLIEGDLNPDNSDVDKLFIQLVQTYNQLFEENPINASGVDAKAILSARLSKSRRLENLIAQLPGEKKNGLFGNLIALSLGLTPNFKSNFDLAEDAKLQLSKDTYDDDLDNLLAQIGDQYADLFLAAKNLSDAILLSDILRVNTEITKAPLSASMIKRYDEHHQDLTLLKALVRQQLPEKYKEIFFDQSKNGYAGYIDGGASQEEFYKFIKPILEKMDGTEELLVKLNREDLLRKQRTFDNGSIPHQIHLGELHAILRRQEDFYPFLKDNREKIEKILTFRIPYYVGPLARGNSRFAWMTRKSEETITPWNFEEVVDKGASAQSFIERMTNFDKNLPNEKVLPKHSLLYEYFTVYNELTKVKYVTEGMRKPAFLSGEQKKAIVDLLFKTNRKVTVKQLKEDYFKKIECFDSVEISGVEDRFNASLGTYHDLLKIIKDKDFLDNEENEDILEDIVLTLTLFEDREMIEERLKTYAHLFDDKVMKQLKRRRYTGWGRLSRKLINGIRDKQSGKTILDFLKSDGFANRNFMQLIHDDSLTFKEDIQKAQVSGQGDSLHEHIANLAGSPAIKKGILQTVKVVDELVKVMGRHKPENIVIEMARENQTTQKGQKNSRERMKRIEEGIKELGSQILKEHPVENTQLQNEKLYLYYLQNGRDMYVDQELDINRLSDYDVDHIVPQSFLKDDSIDNKVLTRSDKARGKSDNVPSEEVVKKMKNYWRQLLNAKLITQRKFDNLTKAERGGLSELDKAGFIKRQLVETRQITKHVAQILDSRMNTKYDENDKLIREVKVITLKSKLVSDFRKDFQFYKVREINNYHHAHDAYLNAVVGTALIKKYPKLESEFVYGDYKVYDVRKMIAKSEQEIGKATAKYFFYSNIMNFFKTEITLANGEIRKRPLIETNGETGEIVWDKGRDFATVRKVLSMPQVNIVKKTEVQTGGFSKESILPKRNSDKLIARKKDWDPKKYGGFDSPTVAYSVLVVAKVEKGKSKKLKSVKELLGITIMERSSFEKNPIDFLEAKGYKEVKKDLIIKLPKYSLFELENGRKRMLASAGELQKGNELALPSKYVNFLYLASHYEKLKGSPEDNEQKQLFVEQHKHYLDEIIEQISEFSKRVILADANLDKVLSAYNKHRDKPIREQAENIIHLFTLTNLGAPAAFKYFDTTIDRKRYTSTKEVLDATLIHQSITGLYETRIDLSQLGGDGGGGSGGGEAAAKGGVQEISDSRPMLHIYLNGRRFLGLLDTGADKTCIAGRDWPANWPIHQTESSLQGLGMACGVARSSQPLRWQHEDKSGIIHPFVIPTLPFTLWGRDIMKDIKVRLMTDSPDDSQDLMIGAIESNLFADQISWKSDQPVWLNQWPLKQEKLQALQQLVTEQLQLGHLEESNSPWNTPVFVIKKKSGKWRLLQDLRAVNATMHDMGALQPGLPSPVAVPKGWEIIIIDLQDCFFNIKLHPEDCKRFAFSVPSPNFKRPYQRFQWKVLPQGMKNSPTLCQKFVDKAILTVRDKYQDSYIVHYMDDILLAHPSRSIVDEILTSMIQALNKHGLVVSTEKIQKYDNLKYLGTHIQGDSVSYQKLQIRTDKLRTLNDFQKLLGNINWIRPFLKLTTGELKPLFEILNGDSNPISTRKLTPEACKALQLMNERLSTARVKRLDLSQPWSLCILKTEYTPTACLWQDGVVEWIHLPHISPKVITPYDIFCTQLIIKGRHRSKELFSKDPDYIVVPYTKVQFDLLLQEKEDWPISLLGFLGEVHFHLPKDPLLTFTLQTAIIFPHMTSTTPLEKGIVIFTDGSANGRSVTYIQGREPIIKENTQNTAQQAEIVAVITAFEEVSQPFNLYTDSKYVTGLFPEIETATLSPRTKIYTELKHLQRLIHKRQEKFYIGHIRGHTGLPGPLAQGNAYADSLTRILTAAGKRTADGSEFEKRTADGSEFESPKKKAKVE

SEQ ID NO: 3163 - protein, 2116 aa, synthetic construct
MPAAKRVKLDGGDKKYSIGLDIGTNSVGWAVITDEYKVPSKKFKVLGNTDRHSIKKNLIGALLFDSGETAEATRLKRTARRRYTRRKNRICYLQEIFSNEMAKVDDSFFHRLEESFLVEEDKKHERHPIFGNIVDEVAYHEKYPTIYHLRKKLVDSTDKADLRLIYLALAHMIKFRGHFLIEGDLNPDNSDVDKLFIQLVQTYNQLFEENPINASGVDAKAILSARLSKSRRLENLIAQLPGEKKNGLFGNLIALSLGLTPNFKSNFDLAEDAKLQLSKDTYDDDLDNLLAQIGDQYADLFLAAKNLSDAILLSDILRVNTEITKAPLSASMIKRYDEHHQDLTLLKALVRQQLPEKYKEIFFDQSKNGYAGYIDGGASQEEFYKFIKPILEKMDGTEELLVKLNREDLLRKQRTFDNGSIPHQIHLGELHAILRRQEDFYPFLKDNREKIEKILTFRIPYYVGPLARGNSRFAWMTRKSEETITPWNFEEVVDKGASAQSFIERMTNFDKNLPNEKVLPKHSLLYEYFTVYNELTKVKYVTEGMRKPAFLSGEQKKAIVDLLFKTNRKVTVKQLKEDYFKKIECFDSVEISGVEDRFNASLGTYHDLLKIIKDKDFLDNEENEDILEDIVLTLTLFEDREMIEERLKTYAHLFDDKVMKQLKRRRYTGWGRLSRKLINGIRDKQSGKTILDFLKSDGFANRNFMQLIHDDSLTFKEDIQKAQVSGQGDSLHEHIANLAGSPAIKKGILQTVKVVDELVKVMGRHKPENIVIEMARENQTTQKGQKNSRERMKRIEEGIKELGSQILKEHPVENTQLQNEKLYLYYLQNGRDMYVDQELDINRLSDYDVDHIVPQSFLKDDSIDNKVLTRSDKARGKSDNVPSEEVVKKMKNYWRQLLNAKLITQRKFDNLTKAERGGLSELDKAGFIKRQLVETRQITKHVAQILDSRMNTKYDENDKLIREVKVITLKSKLVSDFRKDFQFYKVREINNYHHAHDAYLNAVVGTALIKKYPKLESEFVYGDYKVYDVRKMIAKSEQEIGKATAKYFFYSNIMNFFKTEITLANGEIRKRPLIETNGETGEIVWDKGRDFATVRKVLSMPQVNIVKKTEVQTGGFSKESILPKRNSDKLIARKKDWDPKKYGGFDSPTVAYSVLVVAKVEKGKSKKLKSVKELLGITIMERSSFEKNPIDFLEAKGYKEVKKDLIIKLPKYSLFELENGRKRMLASAGELQKGNELALPSKYVNFLYLASHYEKLKGSPEDNEQKQLFVEQHKHYLDEIIEQISEFSKRVILADANLDKVLSAYNKHRDKPIREQAENIIHLFTLTNLGAPAAFKYFDTTIDRKRYTSTKEVLDATLIHQSITGLYETRIDLSQLGGDGGGGGGSSEAAAKGGVQEISDSRPMLHIYLNGRRFLGLLDTGADKTCIAGRDWPANWPIHQTESSLQGLGMACGVARSSQPLRWQHEDKSGIIHPFVIPTLPFTLWGRDIMKDIKVRLMTDSPDDSQDLMIGAIESNLFADQISWKSDQPVWLNQWPLKQEKLQALQQLVTEQLQLGHLEESNSPWNTPVFVIKKKSGKWRLLQDLRAVNATMHDMGALQPGLPSPVAVPKGWEIIIIDLQDCFFNIKLHPEDCKRFAFSVPSPNFKRPYQRFQWKVLPQGMKNSPTLCQKFVDKAILTVRDKYQDSYIVHYMDDILLAHPSRSIVDEILTSMIQALNKHGLVVSTEKIQKYDNLKYLGTHIQGDSVSYQKLQIRTDKLRTLNDFQKLLGNINWIRPFLKLTTGELKPLFEILNGDSNPISTRKLTPEACKALQLMNERLSTARVKRLDLSQPWSLCILKTEYTPTACLWQDGVVEWIHLPHISPKVITPYDIFCTQLIIKGRHRSKELFSKDPDYIVVPYTKVQFDLLLQEKEDWPISLLGFLGEVHFHLPKDPLLTFTLQTAIIFPHMTSTTPLEKGIVIFTDGSANGRSVTYIQGREPIIKENTQNTAQQAEIVAVITAFEEVSQPFNLYTDSKYVTGLFPEIETATLSPRTKIYTELKHLQRLIHKRQEKFYIGHIRGHTGLPGPLAQGNAYADSLTRILTAAGKRTADGSEFEKRTADGSEFESPKKKAKVE

SEQ ID NO: 3164 - protein, 2116 aa, synthetic construct
MPAAKRVKLDGGDKKYSIGLDIGTNSVGWAVITDEYKVPSKKFKVLGNTDRHSIKKNLIGALLFDSGETAEATRLKRTARRRYTRRKNRICYLQEIFSNEMAKVDDSFFHRLEESFLVEEDKKHERHPIFGNIVDEVAYHEKYPTIYHLRKKLVDSTDKADLRLIYLALAHMIKFRGHFLIEGDLNPDNSDVDKLFIQLVQTYNQLFEENPINASGVDAKAILSARLSKSRRLENLIAQLPGEKKNGLFGNLIALSLGLTPNFKSNFDLAEDAKLQLSKDTYDDDLDNLLAQIGDQYADLFLAAKNLSDAILLSDILRVNTEITKAPLSASMIKRYDEHHQDLTLLKALVRQQLPEKYKEIFFDQSKNGYAGYIDGGASQEEFYKFIKPILEKMDGTEELLVKLNREDLLRKQRTFDNGSIPHQIHLGELHAILRRQEDFYPFLKDNREKIEKILTFRIPYYVGPLARGNSRFAWMTRKSEETITPWNFEEVVDKGASAQSFIERMTNFDKNLPNEKVLPKHSLLYEYFTVYNELTKVKYVTEGMRKPAFLSGEQKKAIVDLLFKTNRKVTVKQLKEDYFKKIECFDSVEISGVEDRFNASLGTYHDLLKIIKDKDFLDNEENEDILEDIVLTLTLFEDREMIEERLKTYAHLFDDKVMKQLKRRRYTGWGRLSRKLINGIRDKQSGKTILDFLKSDGFANRNFMQLIHDDSLTFKEDIQKAQVSGQGDSLHEHIANLAGSPAIKKGILQTVKVVDELVKVMGRHKPENIVIEMARENQTTQKGQKNSRERMKRIEEGIKELGSQILKEHPVENTQLQNEKLYLYYLQNGRDMYVDQELDINRLSDYDVDHIVPQSFLKDDSIDNKVLTRSDKARGKSDNVPSEEVVKKMKNYWRQLLNAKLITQRKFDNLTKAERGGLSELDKAGFIKRQLVETRQITKHVAQILDSRMNTKYDENDKLIREVKVITLKSKLVSDFRKDFQFYKVREINNYHHAHDAYLNAVVGTALIKKYPKLESEFVYGDYKVYDVRKMIAKSEQEIGKATAKYFFYSNIMNFFKTEITLANGEIRKRPLIETNGETGEIVWDKGRDFATVRKVLSMPQVNIVKKTEVQTGGFSKESILPKRNSDKLIARKKDWDPKKYGGFDSPTVAYSVLVVAKVEKGKSKKLKSVKELLGITIMERSSFEKNPIDFLEAKGYKEVKKDLIIKLPKYSLFELENGRKRMLASAGELQKGNELALPSKYVNFLYLASHYEKLKGSPEDNEQKQLFVEQHKHYLDEIIEQISEFSKRVILADANLDKVLSAYNKHRDKPIREQAENIIHLFTLTNLGAPAAFKYFDTTIDRKRYTSTKEVLDATLIHQSITGLYETRIDLSQLGGDGGGGSPAPEAAAKGGVQEISDSRPMLHIYLNGRRFLGLLDTGADKTCIAGRDWPANWPIHQTESSLQGLGMACGVARSSQPLRWQHEDKSGIIHPFVIPTLPFTLWGRDIMKDIKVRLMTDSPDDSQDLMIGAIESNLFADQISWKSDQPVWLNQWPLKQEKLQALQQLVTEQLQLGHLEESNSPWNTPVFVIKKKSGKWRLLQDLRAVNATMHDMGALQPGLPSPVAVPKGWEIIIIDLQDCFFNIKLHPEDCKRFAFSVPSPNFKRPYQRFQWKVLPQGMKNSPTLCQKFVDKAILTVRDKYQDSYIVHYMDDILLAHPSRSIVDEILTSMIQALNKHGLVVSTEKIQKYDNLKYLGTHIQGDSVSYQKLQIRTDKLRTLNDFQKLLGNINWIRPFLKLTTGELKPLFEILNGDSNPISTRKLTPEACKALQLMNERLSTARVKRLDLSQPWSLCILKTEYTPTACLWQDGVVEWIHLPHISPKVITPYDIFCTQLIIKGRHRSKELFSKDPDYIVVPYTKVQFDLLLQEKEDWPISLLGFLGEVHFHLPKDPLLTFTLQTAIIFPHMTSTTPLEKGIVIFTDGSANGRSVTYIQGREPIIKENTQNTAQQAEIVAVITAFEEVSQPFNLYTDSKYVTGLFPEIETATLSPRTKIYTELKHLQRLIHKRQEKFYIGHIRGHTGLPGPLAQGNAYADSLTRILTAAGKRTADGSEFEKRTADGSEFESPKKKAKVE

SEQ ID NO: 3165 - protein, 2117 aa, synthetic construct
MPAAKRVKLDGGDKKYSIGLDIGTNSVGWAVITDEYKVPSKKFKVLGNTDRHSIKKNLIGALLFDSGETAEATRLKRTARRRYTRRKNRICYLQEIFSNEMAKVDDSFFHRLEESFLVEEDKKHERHPIFGNIVDEVAYHEKYPTIYHLRKKLVDSTDKADLRLIYLALAHMIKFRGHFLIEGDLNPDNSDVDKLFIQLVQTYNQLFEENPINASGVDAKAILSARLSKSRRLENLIAQLPGEKKNGLFGNLIALSLGLTPNFKSNFDLAEDAKLQLSKDTYDDDLDNLLAQIGDQYADLFLAAKNLSDAILLSDILRVNTEITKAPLSASMIKRYDEHHQDLTLLKALVRQQLPEKYKEIFFDQSKNGYAGYIDGGASQEEFYKFIKPILEKMDGTEELLVKLNREDLLRKQRTFDNGSIPHQIHLGELHAILRRQEDFYPFLKDNREKIEKILTFRIPYYVGPLARGNSRFAWMTRKSEETITPWNFEEVVDKGASAQSFIERMTNFDKNLPNEKVLPKHSLLYEYFTVYNELTKVKYVTEGMRKPAFLSGEQKKAIVDLLFKTNRKVTVKQLKEDYFKKIECFDSVEISGVEDRFNASLGTYHDLLKIIKDKDFLDNEENEDILEDIVLTLTLFEDREMIEERLKTYAHLFDDKVMKQLKRRRYTGWGRLSRKLINGIRDKQSGKTILDFLKSDGFANRNFMQLIHDDSLTFKEDIQKAQVSGQGDSLHEHIANLAGSPAIKKGILQTVKVVDELVKVMGRHKPENIVIEMARENQTTQKGQKNSRERMKRIEEGIKELGSQILKEHPVENTQLQNEKLYLYYLQNGRDMYVDQELDINRLSDYDVDHIVPQSFLKDDSIDNKVLTRSDKARGKSDNVPSEEVVKKMKNYWRQLLNAKLITQRKFDNLTKAERGGLSELDKAGFIKRQLVETRQITKHVAQILDSRMNTKYDENDKLIREVKVITLKSKLVSDFRKDFQFYKVREINNYHHAHDAYLNAVVGTALIKKYPKLESEFVYGDYKVYDVRKMIAKSEQEIGKATAKYFFYSNIMNFFKTEITLANGEIRKRPLIETNGETGEIVWDKGRDFATVRKVLSMPQVNIVKKTEVQTGGFSKESILPKRNSDKLIARKKDWDPKKYGGFDSPTVAYSVLVVAKVEKGKSKKLKSVKELLGITIMERSSFEKNPIDFLEAKGYKEVKKDLIIKLPKYSLFELENGRKRMLASAGELQKGNELALPSKYVNFLYLASHYEKLKGSPEDNEQKQLFVEQHKHYLDEIIEQISEFSKRVILADANLDKVLSAYNKHRDKPIREQAENIIHLFTLTNLGAPAAFKYFDTTIDRKRYTSTKEVLDATLIHQSITGLYETRIDLSQLGGDGGGSAGSAAGSGEFGGVQEISDSRPMLHIYLNGRRFLGLLDTGADKTCIAGRDWPANWPIHQTESSLQGLGMACGVARSSQPLRWQHEDKSGIIHPFVIPTLPFTLWGRDIMKDIKVRLMTDSPDDSQDLMIGAIESNLFADQISWKSDQPVWLNQWPLKQEKLQALQQLVTEQLQLGHLEESNSPWNTPVFVIKKKSGKWRLLQDLRAVNATMHDMGALQPGLPSPVAVPKGWEIIIIDLQDCFFNIKLHPEDCKRFAFSVPSPNFKRPYQRFQWKVLPQGMKNSPTLCQKFVDKAILTVRDKYQDSYIVHYMDDILLAHPSRSIVDEILTSMIQALNKHGLVVSTEKIQKYDNLKYLGTHIQGDSVSYQKLQIRTDKLRTLNDFQKLLGNINWIRPFLKLTTGELKPLFEILNGDSNPISTRKLTPEACKALQLMNERLSTARVKRLDLSQPWSLCILKTEYTPTACLWQDGVVEWIHLPHISPKVITPYDIFCTQLIIKGRHRSKELFSKDPDYIVVPYTKVQFDLLLQEKEDWPISLLGFLGEVHFHLPKDPLLTFTLQTAIIFPHMTSTTPLEKGIVIFTDGSANGRSVTYIQGREPIIKENTQNTAQQAEIVAVITAFEEVSQPFNLYTDSKYVTGLFPEIETATLSPRTKIYTELKHLQRLIHKRQEKFYIGHIRGHTGLPGPLAQGNAYADSLTRILTAAGKRTADGSEFEKRTADGSEFESPKKKAKVE

SEQ ID NO: 3166 - protein, 2111 aa, synthetic construct
MPAAKRVKLDGGDKKYSIGLDIGTNSVGWAVITDEYKVPSKKFKVLGNTDRHSIKKNLIGALLFDSGETAEATRLKRTARRRYTRRKNRICYLQEIFSNEMAKVDDSFFHRLEESFLVEEDKKHERHPIFGNIVDEVAYHEKYPTIYHLRKKLVDSTDKADLRLIYLALAHMIKFRGHFLIEGDLNPDNSDVDKLFIQLVQTYNQLFEENPINASGVDAKAILSARLSKSRRLENLIAQLPGEKKNGLFGNLIALSLGLTPNFKSNFDLAEDAKLQLSKDTYDDDLDNLLAQIGDQYADLFLAAKNLSDAILLSDILRVNTEITKAPLSASMIKRYDEHHQDLTLLKALVRQQLPEKYKEIFFDQSKNGYAGYIDGGASQEEFYKFIKPILEKMDGTEELLVKLNREDLLRKQRTFDNGSIPHQIHLGELHAILRRQEDFYPFLKDNREKIEKILTFRIPYYVGPLARGNSRFAWMTRKSEETITPWNFEEVVDKGASAQSFIERMTNFDKNLPNEKVLPKHSLLYEYFTVYNELTKVKYVTEGMRKPAFLSGEQKKAIVDLLFKTNRKVTVKQLKEDYFKKIECFDSVEISGVEDRFNASLGTYHDLLKIIKDKDFLDNEENEDILEDIVLTLTLFEDREMIEERLKTYAHLFDDKVMKQLKRRRYTGWGRLSRKLINGIRDKQSGKTILDFLKSDGFANRNFMQLIHDDSLTFKEDIQKAQVSGQGDSLHEHIANLAGSPAIKKGILQTVKVVDELVKVMGRHKPENIVIEMARENQTTQKGQKNSRERMKRIEEGIKELGSQILKEHPVENTQLQNEKLYLYYLQNGRDMYVDQELDINRLSDYDVDHIVPQSFLKDDSIDNKVLTRSDKARGKSDNVPSEEVVKKMKNYWRQLLNAKLITQRKFDNLTKAERGGLSELDKAGFIKRQLVETRQITKHVAQILDSRMNTKYDENDKLIREVKVITLKSKLVSDFRKDFQFYKVREINNYHHAHDAYLNAVVGTALIKKYPKLESEFVYGDYKVYDVRKMIAKSEQEIGKATAKYFFYSNIMNFFKTEITLANGEIRKRPLIETNGETGEIVWDKGRDFATVRKVLSMPQVNIVKKTEVQTGGFSKESILPKRNSDKLIARKKDWDPKKYGGFDSPTVAYSVLVVAKVEKGKSKKLKSVKELLGITIMERSSFEKNPIDFLEAKGYKEVKKDLIIKLPKYSLFELENGRKRMLASAGELQKGNELALPSKYVNFLYLASHYEKLKGSPEDNEQKQLFVEQHKHYLDEIIEQISEFSKRVILADANLDKVLSAYNKHRDKPIREQAENIIHLFTLTNLGAPAAFKYFDTTIDRKRYTSTKEVLDATLIHQSITGLYETRIDLSQLGGDGGGGGGGSGGVQEISDSRPMLHIYLNGRRFLGLLDTGADKTCIAGRDWPANWPIHQTESSLQGLGMACGVARSSQPLRWQHEDKSGIIHPFVIPTLPFTLWGRDIMKDIKVRLMTDSPDDSQDLMIGAIESNLFADQISWKSDQPVWLNQWPLKQEKLQALQQLVTEQLQLGHLEESNSPWNTPVFVIKKKSGKWRLLQDLRAVNATMHDMGALQPGLPSPVAVPKGWEIIIIDLQDCFFNIKLHPEDCKRFAFSVPSPNFKRPYQRFQWKVLPQGMKNSPTLCQKFVDKAILTVRDKYQDSYIVHYMDDILLAHPSRSIVDEILTSMIQALNKHGLVVSTEKIQKYDNLKYLGTHIQGDSVSYQKLQIRTDKLRTLNDFQKLLGNINWIRPFLKLTTGELKPLFEILNGDSNPISTRKLTPEACKALQLMNERLSTARVKRLDLSQPWSLCILKTEYTPTACLWQDGVVEWIHLPHISPKVITPYDIFCTQLIIKGRHRSKELFSKDPDYIVVPYTKVQFDLLLQEKEDWPISLLGFLGEVHFHLPKDPLLTFTLQTAIIFPHMTSTTPLEKGIVIFTDGSANGRSVTYIQGREPIIKENTQNTAQQAEIVAVITAFEEVSQPFNLYTDSKYVTGLFPEIETATLSPRTKIYTELKHLQRLIHKRQEKFYIGHIRGHTGLPGPLAQGNAYADSLTRILTAAGKRTADGSEFEKRTADGSEFESPKKKAKVE

SEQ ID NO: 3167 - protein, 2113 aa, synthetic construct
MPAAKRVKLDGGDKKYSIGLDIGTNSVGWAVITDEYKVPSKKFKVLGNTDRHSIKKNLIGALLFDSGETAEATRLKRTARRRYTRRKNRICYLQEIFSNEMAKVDDSFFHRLEESFLVEEDKKHERHPIFGNIVDEVAYHEKYPTIYHLRKKLVDSTDKADLRLIYLALAHMIKFRGHFLIEGDLNPDNSDVDKLFIQLVQTYNQLFEENPINASGVDAKAILSARLSKSRRLENLIAQLPGEKKNGLFGNLIALSLGLTPNFKSNFDLAEDAKLQLSKDTYDDDLDNLLAQIGDQYADLFLAAKNLSDAILLSDILRVNTEITKAPLSASMIKRYDEHHQDLTLLKALVRQQLPEKYKEIFFDQSKNGYAGYIDGGASQEEFYKFIKPILEKMDGTEELLVKLNREDLLRKQRTFDNGSIPHQIHLGELHAILRRQEDFYPFLKDNREKIEKILTFRIPYYVGPLARGNSRFAWMTRKSEETITPWNFEEVVDKGASAQSFIERMTNFDKNLPNEKVLPKHSLLYEYFTVYNELTKVKYVTEGMRKPAFLSGEQKKAIVDLLFKTNRKVTVKQLKEDYFKKIECFDSVEISGVEDRFNASLGTYHDLLKIIKDKDFLDNEENEDILEDIVLTLTLFEDREMIEERLKTYAHLFDDKVMKQLKRRRYTGWGRLSRKLINGIRDKQSGKTILDFLKSDGFANRNFMQLIHDDSLTFKEDIQKAQVSGQGDSLHEHIANLAGSPAIKKGILQTVKVVDELVKVMGRHKPENIVIEMARENQTTQKGQKNSRERMKRIEEGIKELGSQILKEHPVENTQLQNEKLYLYYLQNGRDMYVDQELDINRLSDYDVDHIVPQSFLKDDSIDNKVLTRSDKARGKSDNVPSEEVVKKMKNYWRQLLNAKLITQRKFDNLTKAERGGLSELDKAGFIKRQLVETRQITKHVAQILDSRMNTKYDENDKLIREVKVITLKSKLVSDFRKDFQFYKVREINNYHHAHDAYLNAVVGTALIKKYPKLESEFVYGDYKVYDVRKMIAKSEQEIGKATAKYFFYSNIMNFFKTEITLANGEIRKRPLIETNGETGEIVWDKGRDFATVRKVLSMPQVNIVKKTEVQTGGFSKESILPKRNSDKLIARKKDWDPKKYGGFDSPTVAYSVLVVAKVEKGKSKKLKSVKELLGITIMERSSFEKNPIDFLEAKGYKEVKKDLIIKLPKYSLFELENGRKRMLASAGELQKGNELALPSKYVNFLYLASHYEKLKGSPEDNEQKQLFVEQHKHYLDEIIEQISEFSKRVILADANLDKVLSAYNKHRDKPIREQAENIIHLFTLTNLGAPAAFKYFDTTIDRKRYTSTKEVLDATLIHQSITGLYETRIDLSQLGGDGGGGGEAAAKGGVQEISDSRPMLHIYLNGRRFLGLLDTGADKTCIAGRDWPANWPIHQTESSLQGLGMACGVARSSQPLRWQHEDKSGIIHPFVIPTLPFTLWGRDIMKDIKVRLMTDSPDDSQDLMIGAIESNLFADQISWKSDQPVWLNQWPLKQEKLQALQQLVTEQLQLGHLEESNSPWNTPVFVIKKKSGKWRLLQDLRAVNATMHDMGALQPGLPSPVAVPKGWEIIIIDLQDCFFNIKLHPEDCKRFAFSVPSPNFKRPYQRFQWKVLPQGMKNSPTLCQKFVDKAILTVRDKYQDSYIVHYMDDILLAHPSRSIVDEILTSMIQALNKHGLVVSTEKIQKYDNLKYLGTHIQGDSVSYQKLQIRTDKLRTLNDFQKLLGNINWIRPFLKLTTGELKPLFEILNGDSNPISTRKLTPEACKALQLMNERLSTARVKRLDLSQPWSLCILKTEYTPTACLWQDGVVEWIHLPHISPKVITPYDIFCTQLIIKGRHRSKELFSKDPDYIVVPYTKVQFDLLLQEKEDWPISLLGFLGEVHFHLPKDPLLTFTLQTAIIFPHMTSTTPLEKGIVIFTDGSANGRSVTYIQGREPIIKENTQNTAQQAEIVAVITAFEEVSQPFNLYTDSKYVTGLFPEIETATLSPRTKIYTELKHLQRLIHKRQEKFYIGHIRGHTGLPGPLAQGNAYADSLTRILTAAGKRTADGSEFEKRTADGSEFESPKKKAKVE

SEQ ID NO: 3168 - protein, 2111 aa, synthetic construct
MPAAKRVKLDGGDKKYSIGLDIGTNSVGWAVITDEYKVPSKKFKVLGNTDRHSIKKNLIGALLFDSGETAEATRLKRTARRRYTRRKNRICYLQEIFSNEMAKVDDSFFHRLEESFLVEEDKKHERHPIFGNIVDEVAYHEKYPTIYHLRKKLVDSTDKADLRLIYLALAHMIKFRGHFLIEGDLNPDNSDVDKLFIQLVQTYNQLFEENPINASGVDAKAILSARLSKSRRLENLIAQLPGEKKNGLFGNLIALSLGLTPNFKSNFDLAEDAKLQLSKDTYDDDLDNLLAQIGDQYADLFLAAKNLSDAILLSDILRVNTEITKAPLSASMIKRYDEHHQDLTLLKALVRQQLPEKYKEIFFDQSKNGYAGYIDGGASQEEFYKFIKPILEKMDGTEELLVKLNREDLLRKQRTFDNGSIPHQIHLGELHAILRRQEDFYPFLKDNREKIEKILTFRIPYYVGPLARGNSRFAWMTRKSEETITPWNFEEVVDKGASAQSFIERMTNFDKNLPNEKVLPKHSLLYEYFTVYNELTKVKYVTEGMRKPAFLSGEQKKAIVDLLFKTNRKVTVKQLKEDYFKKIECFDSVEISGVEDRFNASLGTYHDLLKIIKDKDFLDNEENEDILEDIVLTLTLFEDREMIEERLKTYAHLFDDKVMKQLKRRRYTGWGRLSRKLINGIRDKQSGKTILDFLKSDGFANRNFMQLIHDDSLTFKEDIQKAQVSGQGDSLHEHIANLAGSPAIKKGILQTVKVVDELVKVMGRHKPENIVIEMARENQTTQKGQKNSRERMKRIEEGIKELGSQILKEHPVENTQLQNEKLYLYYLQNGRDMYVDQELDINRLSDYDVDHIVPQSFLKDDSIDNKVLTRSDKARGKSDNVPSEEVVKKMKNYWRQLLNAKLITQRKFDNLTKAERGGLSELDKAGFIKRQLVETRQITKHVAQILDSRMNTKYDENDKLIREVKVITLKSKLVSDFRKDFQFYKVREINNYHHAHDAYLNAVVGTALIKKYPKLESEFVYGDYKVYDVRKMIAKSEQEIGKATAKYFFYSNIMNFFKTEITLANGEIRKRPLIETNGETGEIVWDKGRDFATVRKVLSMPQVNIVKKTEVQTGGFSKESILPKRNSDKLIARKKDWDPKKYGGFDSPTVAYSVLVVAKVEKGKSKKLKSVKELLGITIMERSSFEKNPIDFLEAKGYKEVKKDLIIKLPKYSLFELENGRKRMLASAGELQKGNELALPSKYVNFLYLASHYEKLKGSPEDNEQKQLFVEQHKHYLDEIIEQISEFSKRVILADANLDKVLSAYNKHRDKPIREQAENIIHLFTLTNLGAPAAFKYFDTTIDRKRYTSTKEVLDATLIHQSITGLYETRIDLSQLGGDGGGGSGGSGGVQEISDSRPMLHIYLNGRRFLGLLDTGADKTCIAGRDWPANWPIHQTESSLQGLGMACGVARSSQPLRWQHEDKSGIIHPFVIPTLPFTLWGRDIMKDIKVRLMTDSPDDSQDLMIGAIESNLFADQISWKSDQPVWLNQWPLKQEKLQALQQLVTEQLQLGHLEESNSPWNTPVFVIKKKSGKWRLLQDLRAVNATMHDMGALQPGLPSPVAVPKGWEIIIIDLQDCFFNIKLHPEDCKRFAFSVPSPNFKRPYQRFQWKVLPQGMKNSPTLCQKFVDKAILTVRDKYQDSYIVHYMDDILLAHPSRSIVDEILTSMIQALNKHGLVVSTEKIQKYDNLKYLGTHIQGDSVSYQKLQIRTDKLRTLNDFQKLLGNINWIRPFLKLTTGELKPLFEILNGDSNPISTRKLTPEACKALQLMNERLSTARVKRLDLSQPWSLCILKTEYTPTACLWQDGVVEWIHLPHISPKVITPYDIFCTQLIIKGRHRSKELFSKDPDYIVVPYTKVQFDLLLQEKEDWPISLLGFLGEVHFHLPKDPLLTFTLQTAIIFPHMTSTTPLEKGIVIFTDGSANGRSVTYIQGREPIIKENTQNTAQQAEIVAVITAFEEVSQPFNLYTDSKYVTGLFPEIETATLSPRTKIYTELKHLQRLIHKRQEKFYIGHIRGHTGLPGPLAQGNAYADSLTRILTAAGKRTADGSEFEKRTADGSEFESPKKKAKVE

SEQ ID NO: 3169 - protein, 2116 aa, synthetic construct
MPAAKRVKLDGGDKKYSIGLDIGTNSVGWAVITDEYKVPSKKFKVLGNTDRHSIKKNLIGALLFDSGETAEATRLKRTARRRYTRRKNRICYLQEIFSNEMAKVDDSFFHRLEESFLVEEDKKHERHPIFGNIVDEVAYHEKYPTIYHLRKKLVDSTDKADLRLIYLALAHMIKFRGHFLIEGDLNPDNSDVDKLFIQLVQTYNQLFEENPINASGVDAKAILSARLSKSRRLENLIAQLPGEKKNGLFGNLIALSLGLTPNFKSNFDLAEDAKLQLSKDTYDDDLDNLLAQIGDQYADLFLAAKNLSDAILLSDILRVNTEITKAPLSASMIKRYDEHHQDLTLLKALVRQQLPEKYKEIFFDQSKNGYAGYIDGGASQEEFYKFIKPILEKMDGTEELLVKLNREDLLRKQRTFDNGSIPHQIHLGELHAILRRQEDFYPFLKDNREKIEKILTFRIPYYVGPLARGNSRFAWMTRKSEETITPWNFEEVVDKGASAQSFIERMTNFDKNLPNEKVLPKHSLLYEYFTVYNELTKVKYVTEGMRKPAFLSGEQKKAIVDLLFKTNRKVTVKQLKEDYFKKIECFDSVEISGVEDRFNASLGTYHDLLKIIKDKDFLDNEENEDILEDIVLTLTLFEDREMIEERLKTYAHLFDDKVMKQLKRRRYTGWGRLSRKLINGIRDKQSGKTILDFLKSDGFANRNFMQLIHDDSLTFKEDIQKAQVSGQGDSLHEHIANLAGSPAIKKGILQTVKVVDELVKVMGRHKPENIVIEMARENQTTQKGQKNSRERMKRIEEGIKELGSQILKEHPVENTQLQNEKLYLYYLQNGRDMYVDQELDINRLSDYDVDHIVPQSFLKDDSIDNKVLTRSDKARGKSDNVPSEEVVKKMKNYWRQLLNAKLITQRKFDNLTKAERGGLSELDKAGFIKRQLVETRQITKHVAQILDSRMNTKYDENDKLIREVKVITLKSKLVSDFRKDFQFYKVREINNYHHAHDAYLNAVVGTALIKKYPKLESEFVYGDYKVYDVRKMIAKSEQEIGKATAKYFFYSNIMNFFKTEITLANGEIRKRPLIETNGETGEIVWDKGRDFATVRKVLSMPQVNIVKKTEVQTGGFSKESILPKRNSDKLIARKKDWDPKKYGGFDSPTVAYSVLVVAKVEKGKSKKLKSVKELLGITIMERSSFEKNPIDFLEAKGYKEVKKDLIIKLPKYSLFELENGRKRMLASAGELQKGNELALPSKYVNFLYLASHYEKLKGSPEDNEQKQLFVEQHKHYLDEIIEQISEFSKRVILADANLDKVLSAYNKHRDKPIREQAENIIHLFTLTNLGAPAAFKYFDTTIDRKRYTSTKEVLDATLIHQSITGLYETRIDLSQLGGDGGPAPAPAPAPAPGGVQEISDSRPMLHIYLNGRRFLGLLDTGADKTCIAGRDWPANWPIHQTESSLQGLGMACGVARSSQPLRWQHEDKSGIIHPFVIPTLPFTLWGRDIMKDIKVRLMTDSPDDSQDLMIGAIESNLFADQISWKSDQPVWLNQWPLKQEKLQALQQLVTEQLQLGHLEESNSPWNTPVFVIKKKSGKWRLLQDLRAVNATMHDMGALQPGLPSPVAVPKGWEIIIIDLQDCFFNIKLHPEDCKRFAFSVPSPNFKRPYQRFQWKVLPQGMKNSPTLCQKFVDKAILTVRDKYQDSYIVHYMDDILLAHPSRSIVDEILTSMIQALNKHGLVVSTEKIQKYDNLKYLGTHIQGDSVSYQKLQIRTDKLRTLNDFQKLLGNINWIRPFLKLTTGELKPLFEILNGDSNPISTRKLTPEACKALQLMNERLSTARVKRLDLSQPWSLCILKTEYTPTACLWQDGVVEWIHLPHISPKVITPYDIFCTQLIIKGRHRSKELFSKDPDYIVVPYTKVQFDLLLQEKEDWPISLLGFLGEVHFHLPKDPLLTFTLQTAIIFPHMTSTTPLEKGIVIFTDGSANGRSVTYIQGREPIIKENTQNTAQQAEIVAVITAFEEVSQPFNLYTDSKYVTGLFPEIETATLSPRTKIYTELKHLQRLIHKRQEKFYIGHIRGHTGLPGPLAQGNAYADSLTRILTAAGKRTADGSEFEKRTADGSEFESPKKKAKVE

SEQ ID NO: 3170 - protein, 2116 aa, synthetic construct
MPAAKRVKLDGGDKKYSIGLDIGTNSVGWAVITDEYKVPSKKFKVLGNTDRHSIKKNLIGALLFDSGETAEATRLKRTARRRYTRRKNRICYLQEIFSNEMAKVDDSFFHRLEESFLVEEDKKHERHPIFGNIVDEVAYHEKYPTIYHLRKKLVDSTDKADLRLIYLALAHMIKFRGHFLIEGDLNPDNSDVDKLFIQLVQTYNQLFEENPINASGVDAKAILSARLSKSRRLENLIAQLPGEKKNGLFGNLIALSLGLTPNFKSNFDLAEDAKLQLSKDTYDDDLDNLLAQIGDQYADLFLAAKNLSDAILLSDILRVNTEITKAPLSASMIKRYDEHHQDLTLLKALVRQQLPEKYKEIFFDQSKNGYAGYIDGGASQEEFYKFIKPILEKMDGTEELLVKLNREDLLRKQRTFDNGSIPHQIHLGELHAILRRQEDFYPFLKDNREKIEKILTFRIPYYVGPLARGNSRFAWMTRKSEETITPWNFEEVVDKGASAQSFIERMTNFDKNLPNEKVLPKHSLLYEYFTVYNELTKVKYVTEGMRKPAFLSGEQKKAIVDLLFKTNRKVTVKQLKEDYFKKIECFDSVEISGVEDRFNASLGTYHDLLKIIKDKDFLDNEENEDILEDIVLTLTLFEDREMIEERLKTYAHLFDDKVMKQLKRRRYTGWGRLSRKLINGIRDKQSGKTILDFLKSDGFANRNFMQLIHDDSLTFKEDIQKAQVSGQGDSLHEHIANLAGSPAIKKGILQTVKVVDELVKVMGRHKPENIVIEMARENQTTQKGQKNSRERMKRIEEGIKELGSQILKEHPVENTQLQNEKLYLYYLQNGRDMYVDQELDINRLSDYDVDHIVPQSFLKDDSIDNKVLTRSDKARGKSDNVPSEEVVKKMKNYWRQLLNAKLITQRKFDNLTKAERGGLSELDKAGFIKRQLVETRQITKHVAQILDSRMNTKYDENDKLIREVKVITLKSKLVSDFRKDFQFYKVREINNYHHAHDAYLNAVVGTALIKKYPKLESEFVYGDYKVYDVRKMIAKSEQEIGKATAKYFFYSNIMNFFKTEITLANGEIRKRPLIETNGETGEIVWDKGRDFATVRKVLSMPQVNIVKKTEVQTGGFSKESILPKRNSDKLIARKKDWDPKKYGGFDSPTVAYSVLVVAKVEKGKSKKLKSVKELLGITIMERSSFEKNPIDFLEAKGYKEVKKDLIIKLPKYSLFELENGRKRMLASAGELQKGNELALPSKYVNFLYLASHYEKLKGSPEDNEQKQLFVEQHKHYLDEIIEQISEFSKRVILADANLDKVLSAYNKHRDKPIREQAENIIHLFTLTNLGAPAAFKYFDTTIDRKRYTSTKEVLDATLIHQSITGLYETRIDLSQLGGDGGGGSEAAAKPAPGGVQEISDSRPMLHIYLNGRRFLGLLDTGADKTCIAGRDWPANWPIHQTESSLQGLGMACGVARSSQPLRWQHEDKSGIIHPFVIPTLPFTLWGRDIMKDIKVRLMTDSPDDSQDLMIGAIESNLFADQISWKSDQPVWLNQWPLKQEKLQALQQLVTEQLQLGHLEESNSPWNTPVFVIKKKSGKWRLLQDLRAVNATMHDMGALQPGLPSPVAVPKGWEIIIIDLQDCFFNIKLHPEDCKRFAFSVPSPNFKRPYQRFQWKVLPQGMKNSPTLCQKFVDKAILTVRDKYQDSYIVHYMDDILLAHPSRSIVDEILTSMIQALNKHGLVVSTEKIQKYDNLKYLGTHIQGDSVSYQKLQIRTDKLRTLNDFQKLLGNINWIRPFLKLTTGELKPLFEILNGDSNPISTRKLTPEACKALQLMNERLSTARVKRLDLSQPWSLCILKTEYTPTACLWQDGVVEWIHLPHISPKVITPYDIFCTQLIIKGRHRSKELFSKDPDYIVVPYTKVQFDLLLQEKEDWPISLLGFLGEVHFHLPKDPLLTFTLQTAIIFPHMTSTTPLEKGIVIFTDGSANGRSVTYIQGREPIIKENTQNTAQQAEIVAVITAFEEVSQPFNLYTDSKYVTGLFPEIETATLSPRTKIYTELKHLQRLIHKRQEKFYIGHIRGHTGLPGPLAQGNAYADSLTRILTAAGKRTADGSEFEKRTADGSEFESPKKKAKVE

SEQ ID NO: 3171 - protein, 2116 aa, synthetic construct
MPAAKRVKLDGGDKKYSIGLDIGTNSVGWAVITDEYKVPSKKFKVLGNTDRHSIKKNLIGALLFDSGETAEATRLKRTARRRYTRRKNRICYLQEIFSNEMAKVDDSFFHRLEESFLVEEDKKHERHPIFGNIVDEVAYHEKYPTIYHLRKKLVDSTDKADLRLIYLALAHMIKFRGHFLIEGDLNPDNSDVDKLFIQLVQTYNQLFEENPINASGVDAKAILSARLSKSRRLENLIAQLPGEKKNGLFGNLIALSLGLTPNFKSNFDLAEDAKLQLSKDTYDDDLDNLLAQIGDQYADLFLAAKNLSDAILLSDILRVNTEITKAPLSASMIKRYDEHHQDLTLLKALVRQQLPEKYKEIFFDQSKNGYAGYIDGGASQEEFYKFIKPILEKMDGTEELLVKLNREDLLRKQRTFDNGSIPHQIHLGELHAILRRQEDFYPFLKDNREKIEKILTFRIPYYVGPLARGNSRFAWMTRKSEETITPWNFEEVVDKGASAQSFIERMTNFDKNLPNEKVLPKHSLLYEYFTVYNELTKVKYVTEGMRKPAFLSGEQKKAIVDLLFKTNRKVTVKQLKEDYFKKIECFDSVEISGVEDRFNASLGTYHDLLKIIKDKDFLDNEENEDILEDIVLTLTLFEDREMIEERLKTYAHLFDDKVMKQLKRRRYTGWGRLSRKLINGIRDKQSGKTILDFLKSDGFANRNFMQLIHDDSLTFKEDIQKAQVSGQGDSLHEHIANLAGSPAIKKGILQTVKVVDELVKVMGRHKPENIVIEMARENQTTQKGQKNSRERMKRIEEGIKELGSQILKEHPVENTQLQNEKLYLYYLQNGRDMYVDQELDINRLSDYDVDHIVPQSFLKDDSIDNKVLTRSDKARGKSDNVPSEEVVKKMKNYWRQLLNAKLITQRKFDNLTKAERGGLSELDKAGFIKRQLVETRQITKHVAQILDSRMNTKYDENDKLIREVKVITLKSKLVSDFRKDFQFYKVREINNYHHAHDAYLNAVVGTALIKKYPKLESEFVYGDYKVYDVRKMIAKSEQEIGKATAKYFFYSNIMNFFKTEITLANGEIRKRPLIETNGETGEIVWDKGRDFATVRKVLSMPQVNIVKKTEVQTGGFSKESILPKRNSDKLIARKKDWDPKKYGGFDSPTVAYSVLVVAKVEKGKSKKLKSVKELLGITIMERSSFEKNPIDFLEAKGYKEVKKDLIIKLPKYSLFELENGRKRMLASAGELQKGNELALPSKYVNFLYLASHYEKLKGSPEDNEQKQLFVEQHKHYLDEIIEQISEFSKRVILADANLDKVLSAYNKHRDKPIREQAENIIHLFTLTNLGAPAAFKYFDTTIDRKRYTSTKEVLDATLIHQSITGLYETRIDLSQLGGDGGEAAAKGSSGGSGGWVQEISDSRPMLHIYLNGRRFLGLLNTGADKTCIAGRDWPANWPIHQTESSLQGLGMACGVARSSQPLRWQHEDKSGIIHPFVIPTLPFTLWGRDIMKDIKVRLMTDSPDDSQDLMIGAIESNLFADQISWKSDQPVWLNQWPLKQEKLQALQQLVTEQLQLGHLEESNSPWNTPVFVIKKKSGKWRLLQDLRAVNATMHDMGALQPGLPSPVAVPKGWEIIIIDLQDCFFNIKLHPEDCKRFAFSVPSPNFKRPYQRFQWKVLPQGMKNSPTLCQKFVDKAILTVRDKYQDSYIVHYMDDILLAHPSRSIVDEILTSMIQALNKHGLVVSTEKIQKYDNLKYLGTHIQGDSVSYQKLQIRTDKLRTLNDFQKLLGNINWIRPFLKLTTGELKPLFEILNGDSNPISTRKLTPEACKALQLMNERLSTARVKRLDLSQPWSLCILKTEYTPTACLWQDGVVEWIHLPHISPKVITPYDIFCTQLIIKGRHRSKELFSKDPDYIVVPYTKVQFDLLLQEKEDWPISLLGFLGEVHFHLPKDPLLTFTLQTAIIFPHMTSTTPLEKGIVIFTDGSANGRSVTYIQGREPIIKENTQNTAQQAEIVAVITAFEEVSQPFNLYTDSKYVTGLFPEIETATLSPRTKIYTELKHLQRLIHKRQEKFYIGHIRGHTGLPGPLAQGNAYADSLTRILTAGKRTADGSEFEKRTADGSEFESPKKKAKVE

SEQ ID NO: 3172 - protein, 2135 aa, synthetic construct
MPAAKRVKLDGGDKKYSIGLDIGTNSVGWAVITDEYKVPSKKFKVLGNTDRHSIKKNLIGALLFDSGETAEATRLKRTARRRYTRRKNRICYLQEIFSNEMAKVDDSFFHRLEESFLVEEDKKHERHPIFGNIVDEVAYHEKYPTIYHLRKKLVDSTDKADLRLIYLALAHMIKFRGHFLIEGDLNPDNSDVDKLFIQLVQTYNQLFEENPINASGVDAKAILSARLSKSRRLENLIAQLPGEKKNGLFGNLIALSLGLTPNFKSNFDLAEDAKLQLSKDTYDDDLDNLLAQIGDQYADLFLAAKNLSDAILLSDILRVNTEITKAPLSASMIKRYDEHHQDLTLLKALVRQQLPEKYKEIFFDQSKNGYAGYIDGGASQEEFYKFIKPILEKMDGTEELLVKLNREDLLRKQRTFDNGSIPHQIHLGELHAILRRQEDFYPFLKDNREKIEKILTFRIPYYVGPLARGNSRFAWMTRKSEETITPWNFEEVVDKGASAQSFIERMTNFDKNLPNEKVLPKHSLLYEYFTVYNELTKVKYVTEGMRKPAFLSGEQKKAIVDLLFKTNRKVTVKQLKEDYFKKIECFDSVEISGVEDRFNASLGTYHDLLKIIKDKDFLDNEENEDILEDIVLTLTLFEDREMIEERLKTYAHLFDDKVMKQLKRRRYTGWGRLSRKLINGIRDKQSGKTILDFLKSDGFANRNFMQLIHDDSLTFKEDIQKAQVSGQGDSLHEHIANLAGSPAIKKGILQTVKVVDELVKVMGRHKPENIVIEMARENQTTQKGQKNSRERMKRIEEGIKELGSQILKEHPVENTQLQNEKLYLYYLQNGRDMYVDQELDINRLSDYDVDHIVPQSFLKDDSIDNKVLTRSDKARGKSDNVPSEEVVKKMKNYWRQLLNAKLITQRKFDNLTKAERGGLSELDKAGFIKRQLVETRQITKHVAQILDSRMNTKYDENDKLIREVKVITLKSKLVSDFRKDFQFYKVREINNYHHAHDAYLNAVVGTALIKKYPKLESEFVYGDYKVYDVRKMIAKSEQEIGKATAKYFFYSNIMNFFKTEITLANGEIRKRPLIETNGETGEIVWDKGRDFATVRKVLSMPQVNIVKKTEVQTGGFSKESILPKRNSDKLIARKKDWDPKKYGGFDSPTVAYSVLVVAKVEKGKSKKLKSVKELLGITIMERSSFEKNPIDFLEAKGYKEVKKDLIIKLPKYSLFELENGRKRMLASAGELQKGNELALPSKYVNFLYLASHYEKLKGSPEDNEQKQLFVEQHKHYLDEIIEQISEFSKRVILADANLDKVLSAYNKHRDKPIREQAENIIHLFTLTNLGAPAAFKYFDTTIDRKRYTSTKEVLDATLIHQSITGLYETRIDLSQLGGDGGEAAAKEAAAKEAAAKEAAAKEAAAKEAAAKGGWVQEISDSRPMLHIYLNGRRFLGLLNTGADKTCIAGRDWPANWPIHQTESSLQGLGMACGVARSSQPLRWQHEDKSGIIHPFVIPTLPFTLWGRDIMKDIKVRLMTDSPDDSQDLMIGAIESNLFADQISWKSDQPVWLNQWPLKQEKLQALQQLVTEQLQLGHLEESNSPWNTPVFVIKKKSGKWRLLQDLRAVNATMHDMGALQPGLPSPVAVPKGWEIIIIDLQDCFFNIKLHPEDCKRFAFSVPSPNFKRPYQRFQWKVLPQGMKNSPTLCQKFVDKAILTVRDKYQDSYIVHYMDDILLAHPSRSIVDEILTSMIQALNKHGLVVSTEKIQKYDNLKYLGTHIQGDSVSYQKLQIRTDKLRTLNDFQKLLGNINWIRPFLKLTTGELKPLFEILNGDSNPISTRKLTPEACKALQLMNERLSTARVKRLDLSQPWSLCILKTEYTPTACLWQDGVVEWIHLPHISPKVITPYDIFCTQLIIKGRHRSKELFSKDPDYIVVPYTKVQFDLLLQEKEDWPISLLGFLGEVHFHLPKDPLLTFTLQTAIIFPHMTSTTPLEKGIVIFTDGSANGRSVTYIQGREPIIKENTQNTAQQAEIVAVITAFEEVSQPFNLYTDSKYVTGLFPEIETATLSPRTKIYTELKHLQRLIHKRQEKFYIGHIRGHTGLPGPLAQGNAYADSLTRILTAGKRTADGSEFEKRTADGSEFESPKKKAKVE

SEQ ID NO: 3173 - protein, 2135 aa, synthetic construct
MPAAKRVKLDGGDKKYSIGLDIGTNSVGWAVITDEYKVPSKKFKVLGNTDRHSIKKNLIGALLFDSGETAEATRLKRTARRRYTRRKNRICYLQEIFSNEMAKVDDSFFHRLEESFLVEEDKKHERHPIFGNIVDEVAYHEKYPTIYHLRKKLVDSTDKADLRLIYLALAHMIKFRGHFLIEGDLNPDNSDVDKLFIQLVQTYNQLFEENPINASGVDAKAILSARLSKSRRLENLIAQLPGEKKNGLFGNLIALSLGLTPNFKSNFDLAEDAKLQLSKDTYDDDLDNLLAQIGDQYADLFLAAKNLSDAILLSDILRVNTEITKAPLSASMIKRYDEHHQDLTLLKALVRQQLPEKYKEIFFDQSKNGYAGYIDGGASQEEFYKFIKPILEKMDGTEELLVKLNREDLLRKQRTFDNGSIPHQIHLGELHAILRRQEDFYPFLKDNREKIEKILTFRIPYYVGPLARGNSRFAWMTRKSEETITPWNFEEVVDKGASAQSFIERMTNFDKNLPNEKVLPKHSLLYEYFTVYNELTKVKYVTEGMRKPAFLSGEQKKAIVDLLFKTNRKVTVKQLKEDYFKKIECFDSVEISGVEDRFNASLGTYHDLLKIIKDKDFLDNEENEDILEDIVLTLTLFEDREMIEERLKTYAHLFDDKVMKQLKRRRYTGWGRLSRKLINGIRDKQSGKTILDFLKSDGFANRNFMQLIHDDSLTFKEDIQKAQVSGQGDSLHEHIANLAGSPAIKKGILQTVKVVDELVKVMGRHKPENIVIEMARENQTTQKGQKNSRERMKRIEEGIKELGSQILKEHPVENTQLQNEKLYLYYLQNGRDMYVDQELDINRLSDYDVDHIVPQSFLKDDSIDNKVLTRSDKARGKSDNVPSEEVVKKMKNYWRQLLNAKLITQRKFDNLTKAERGGLSELDKAGFIKRQLVETRQITKHVAQILDSRMNTKYDENDKLIREVKVITLKSKLVSDFRKDFQFYKVREINNYHHAHDAYLNAVVGTALIKKYPKLESEFVYGDYKVYDVRKMIAKSEQEIGKATAKYFFYSNIMNFFKTEITLANGEIRKRPLIETNGETGEIVWDKGRDFATVRKVLSMPQVNIVKKTEVQTGGFSKESILPKRNSDKLIARKKDWDPKKYGGFDSPTVAYSVLVVAKVEKGKSKKLKSVKELLGITIMERSSFEKNPIDFLEAKGYKEVKKDLIIKLPKYSLFELENGRKRMLASAGELQKGNELALPSKYVNFLYLASHYEKLKGSPEDNEQKQLFVEQHKHYLDEIIEQISEFSKRVILADANLDKVLSAYNKHRDKPIREQAENIIHLFTLTNLGAPAAFKYFDTTIDRKRYTSTKEVLDATLIHQSITGLYETRIDLSQLGGDGGGGGGSGGGGSGGGGSGGGGSGGGGSGGGGSGGWVQEISDSRPMLHIYLNGRRFLGLLNTGADKTCIAGRDWPANWPIHQTESSLQGLGMACGVARSSQPLRWQHEDKSGIIHPFVIPTLPFTLWGRDIMKDIKVRLMTDSPDDSQDLMIGAIESNLFADQISWKSDQPVWLNQWPLKQEKLQALQQLVTEQLQLGHLEESNSPWNTPVFVIKKKSGKWRLLQDLRAVNATMHDMGALQPGLPSPVAVPKGWEIIIIDLQDCFFNIKLHPEDCKRFAFSVPSPNFKRPYQRFQWKVLPQGMKNSPTLCQKFVDKAILTVRDKYQDSYIVHYMDDILLAHPSRSIVDEILTSMIQALNKHGLVVSTEKIQKYDNLKYLGTHIQGDSVSYQKLQIRTDKLRTLNDFQKLLGNINWIRPFLKLTTGELKPLFEILNGDSNPISTRKLTPEACKALQLMNERLSTARVKRLDLSQPWSLCILKTEYTPTACLWQDGVVEWIHLPHISPKVITPYDIFCTQLIIKGRHRSKELFSKDPDYIVVPYTKVQFDLLLQEKEDWPISLLGFLGEVHFHLPKDPLLTFTLQTAIIFPHMTSTTPLEKGIVIFTDGSANGRSVTYIQGREPIIKENTQNTAQQAEIVAVITAFEEVSQPFNLYTDSKYVTGLFPEIETATLSPRTKIYTELKHLQRLIHKRQEKFYIGHIRGHTGLPGPLAQGNAYADSLTRILTAGKRTADGSEFEKRTADGSEFESPKKKAKVE

SEQ ID NO: 3174 - protein, 2130 aa, synthetic construct
MPAAKRVKLDGGDKKYSIGLDIGTNSVGWAVITDEYKVPSKKFKVLGNTDRHSIKKNLIGALLFDSGETAEATRLKRTARRRYTRRKNRICYLQEIFSNEMAKVDDSFFHRLEESFLVEEDKKHERHPIFGNIVDEVAYHEKYPTIYHLRKKLVDSTDKADLRLIYLALAHMIKFRGHFLIEGDLNPDNSDVDKLFIQLVQTYNQLFEENPINASGVDAKAILSARLSKSRRLENLIAQLPGEKKNGLFGNLIALSLGLTPNFKSNFDLAEDAKLQLSKDTYDDDLDNLLAQIGDQYADLFLAAKNLSDAILLSDILRVNTEITKAPLSASMIKRYDEHHQDLTLLKALVRQQLPEKYKEIFFDQSKNGYAGYIDGGASQEEFYKFIKPILEKMDGTEELLVKLNREDLLRKQRTFDNGSIPHQIHLGELHAILRRQEDFYPFLKDNREKIEKILTFRIPYYVGPLARGNSRFAWMTRKSEETITPWNFEEVVDKGASAQSFIERMTNFDKNLPNEKVLPKHSLLYEYFTVYNELTKVKYVTEGMRKPAFLSGEQKKAIVDLLFKTNRKVTVKQLKEDYFKKIECFDSVEISGVEDRFNASLGTYHDLLKIIKDKDFLDNEENEDILEDIVLTLTLFEDREMIEERLKTYAHLFDDKVMKQLKRRRYTGWGRLSRKLINGIRDKQSGKTILDFLKSDGFANRNFMQLIHDDSLTFKEDIQKAQVSGQGDSLHEHIANLAGSPAIKKGILQTVKVVDELVKVMGRHKPENIVIEMARENQTTQKGQKNSRERMKRIEEGIKELGSQILKEHPVENTQLQNEKLYLYYLQNGRDMYVDQELDINRLSDYDVDHIVPQSFLKDDSIDNKVLTRSDKARGKSDNVPSEEVVKKMKNYWRQLLNAKLITQRKFDNLTKAERGGLSELDKAGFIKRQLVETRQITKHVAQILDSRMNTKYDENDKLIREVKVITLKSKLVSDFRKDFQFYKVREINNYHHAHDAYLNAVVGTALIKKYPKLESEFVYGDYKVYDVRKMIAKSEQEIGKATAKYFFYSNIMNFFKTEITLANGEIRKRPLIETNGETGEIVWDKGRDFATVRKVLSMPQVNIVKKTEVQTGGFSKESILPKRNSDKLIARKKDWDPKKYGGFDSPTVAYSVLVVAKVEKGKSKKLKSVKELLGITIMERSSFEKNPIDFLEAKGYKEVKKDLIIKLPKYSLFELENGRKRMLASAGELQKGNELALPSKYVNFLYLASHYEKLKGSPEDNEQKQLFVEQHKHYLDEIIEQISEFSKRVILADANLDKVLSAYNKHRDKPIREQAENIIHLFTLTNLGAPAAFKYFDTTIDRKRYTSTKEVLDATLIHQSITGLYETRIDLSQLGGDGGEAAAKEAAAKEAAAKEAAAKEAAAKGGWVQEISDSRPMLHIYLNGRRFLGLLNTGADKTCIAGRDWPANWPIHQTESSLQGLGMACGVARSSQPLRWQHEDKSGIIHPFVIPTLPFTLWGRDIMKDIKVRLMTDSPDDSQDLMIGAIESNLFADQISWKSDQPVWLNQWPLKQEKLQALQQLVTEQLQLGHLEESNSPWNTPVFVIKKKSGKWRLLQDLRAVNATMHDMGALQPGLPSPVAVPKGWEIIIIDLQDCFFNIKLHPEDCKRFAFSVPSPNFKRPYQRFQWKVLPQGMKNSPTLCQKFVDKAILTVRDKYQDSYIVHYMDDILLAHPSRSIVDEILTSMIQALNKHGLVVSTEKIQKYDNLKYLGTHIQGDSVSYQKLQIRTDKLRTLNDFQKLLGNINWIRPFLKLTTGELKPLFEILNGDSNPISTRKLTPEACKALQLMNERLSTARVKRLDLSQPWSLCILKTEYTPTACLWQDGVVEWIHLPHISPKVITPYDIFCTQLIIKGRHRSKELFSKDPDYIVVPYTKVQFDLLLQEKEDWPISLLGFLGEVHFHLPKDPLLTFTLQTAIIFPHMTSTTPLEKGIVIFTDGSANGRSVTYIQGREPIIKENTQNTAQQAEIVAVITAFEEVSQPFNLYTDSKYVTGLFPEIETATLSPRTKIYTELKHLQRLIHKRQEKFYIGHIRGHTGLPGPLAQGNAYADSLTRILTAGKRTADGSEFEKRTADGSEFESPKKKAKVE

SEQ ID NO: 3175 - protein, 2116 aa, synthetic construct
MPAAKRVKLDGGDKKYSIGLDIGTNSVGWAVITDEYKVPSKKFKVLGNTDRHSIKKNLIGALLFDSGETAEATRLKRTARRRYTRRKNRICYLQEIFSNEMAKVDDSFFHRLEESFLVEEDKKHERHPIFGNIVDEVAYHEKYPTIYHLRKKLVDSTDKADLRLIYLALAHMIKFRGHFLIEGDLNPDNSDVDKLFIQLVQTYNQLFEENPINASGVDAKAILSARLSKSRRLENLIAQLPGEKKNGLFGNLIALSLGLTPNFKSNFDLAEDAKLQLSKDTYDDDLDNLLAQIGDQYADLFLAAKNLSDAILLSDILRVNTEITKAPLSASMIKRYDEHHQDLTLLKALVRQQLPEKYKEIFFDQSKNGYAGYIDGGASQEEFYKFIKPILEKMDGTEELLVKLNREDLLRKQRTFDNGSIPHQIHLGELHAILRRQEDFYPFLKDNREKIEKILTFRIPYYVGPLARGNSRFAWMTRKSEETITPWNFEEVVDKGASAQSFIERMTNFDKNLPNEKVLPKHSLLYEYFTVYNELTKVKYVTEGMRKPAFLSGEQKKAIVDLLFKTNRKVTVKQLKEDYFKKIECFDSVEISGVEDRFNASLGTYHDLLKIIKDKDFLDNEENEDILEDIVLTLTLFEDREMIEERLKTYAHLFDDKVMKQLKRRRYTGWGRLSRKLINGIRDKQSGKTILDFLKSDGFANRNFMQLIHDDSLTFKEDIQKAQVSGQGDSLHEHIANLAGSPAIKKGILQTVKVVDELVKVMGRHKPENIVIEMARENQTTQKGQKNSRERMKRIEEGIKELGSQILKEHPVENTQLQNEKLYLYYLQNGRDMYVDQELDINRLSDYDVDHIVPQSFLKDDSIDNKVLTRSDKARGKSDNVPSEEVVKKMKNYWRQLLNAKLITQRKFDNLTKAERGGLSELDKAGFIKRQLVETRQITKHVAQILDSRMNTKYDENDKLIREVKVITLKSKLVSDFRKDFQFYKVREINNYHHAHDAYLNAVVGTALIKKYPKLESEFVYGDYKVYDVRKMIAKSEQEIGKATAKYFFYSNIMNFFKTEITLANGEIRKRPLIETNGETGEIVWDKGRDFATVRKVLSMPQVNIVKKTEVQTGGFSKESILPKRNSDKLIARKKDWDPKKYGGFDSPTVAYSVLVVAKVEKGKSKKLKSVKELLGITIMERSSFEKNPIDFLEAKGYKEVKKDLIIKLPKYSLFELENGRKRMLASAGELQKGNELALPSKYVNFLYLASHYEKLKGSPEDNEQKQLFVEQHKHYLDEIIEQISEFSKRVILADANLDKVLSAYNKHRDKPIREQAENIIHLFTLTNLGAPAAFKYFDTTIDRKRYTSTKEVLDATLIHQSITGLYETRIDLSQLGGDGGPAPAPAPAPAPGGWVQEISDSRPMLHIYLNGRRFLGLLNTGADKTCIAGRDWPANWPIHQTESSLQGLGMACGVARSSQPLRWQHEDKSGIIHPFVIPTLPFTLWGRDIMKDIKVRLMTDSPDDSQDLMIGAIESNLFADQISWKSDQPVWLNQWPLKQEKLQALQQLVTEQLQLGHLEESNSPWNTPVFVIKKKSGKWRLLQDLRAVNATMHDMGALQPGLPSPVAVPKGWEIIIIDLQDCFFNIKLHPEDCKRFAFSVPSPNFKRPYQRFQWKVLPQGMKNSPTLCQKFVDKAILTVRDKYQDSYIVHYMDDILLAHPSRSIVDEILTSMIQALNKHGLVVSTEKIQKYDNLKYLGTHIQGDSVSYQKLQIRTDKLRTLNDFQKLLGNINWIRPFLKLTTGELKPLFEILNGDSNPISTRKLTPEACKALQLMNERLSTARVKRLDLSQPWSLCILKTEYTPTACLWQDGVVEWIHLPHISPKVITPYDIFCTQLIIKGRHRSKELFSKDPDYIVVPYTKVQFDLLLQEKEDWPISLLGFLGEVHFHLPKDPLLTFTLQTAIIFPHMTSTTPLEKGIVIFTDGSANGRSVTYIQGREPIIKENTQNTAQQAEIVAVITAFEEVSQPFNLYTDSKYVTGLFPEIETATLSPRTKIYTELKHLQRLIHKRQEKFYIGHIRGHTGLPGPLAQGNAYADSLTRILTAGKRTADGSEFEKRTADGSEFESPKKKAKVE

SEQ ID NO: 3176 - protein, 2114 aa, synthetic construct
MPAAKRVKLDGGDKKYSIGLDIGTNSVGWAVITDEYKVPSKKFKVLGNTDRHSIKKNLIGALLFDSGETAEATRLKRTARRRYTRRKNRICYLQEIFSNEMAKVDDSFFHRLEESFLVEEDKKHERHPIFGNIVDEVAYHEKYPTIYHLRKKLVDSTDKADLRLIYLALAHMIKFRGHFLIEGDLNPDNSDVDKLFIQLVQTYNQLFEENPINASGVDAKAILSARLSKSRRLENLIAQLPGEKKNGLFGNLIALSLGLTPNFKSNFDLAEDAKLQLSKDTYDDDLDNLLAQIGDQYADLFLAAKNLSDAILLSDILRVNTEITKAPLSASMIKRYDEHHQDLTLLKALVRQQLPEKYKEIFFDQSKNGYAGYIDGGASQEEFYKFIKPILEKMDGTEELLVKLNREDLLRKQRTFDNGSIPHQIHLGELHAILRRQEDFYPFLKDNREKIEKILTFRIPYYVGPLARGNSRFAWMTRKSEETITPWNFEEVVDKGASAQSFIERMTNFDKNLPNEKVLPKHSLLYEYFTVYNELTKVKYVTEGMRKPAFLSGEQKKAIVDLLFKTNRKVTVKQLKEDYFKKIECFDSVEISGVEDRFNASLGTYHDLLKIIKDKDFLDNEENEDILEDIVLTLTLFEDREMIEERLKTYAHLFDDKVMKQLKRRRYTGWGRLSRKLINGIRDKQSGKTILDFLKSDGFANRNFMQLIHDDSLTFKEDIQKAQVSGQGDSLHEHIANLAGSPAIKKGILQTVKVVDELVKVMGRHKPENIVIEMARENQTTQKGQKNSRERMKRIEEGIKELGSQILKEHPVENTQLQNEKLYLYYLQNGRDMYVDQELDINRLSDYDVDHIVPQSFLKDDSIDNKVLTRSDKARGKSDNVPSEEVVKKMKNYWRQLLNAKLITQRKFDNLTKAERGGLSELDKAGFIKRQLVETRQITKHVAQILDSRMNTKYDENDKLIREVKVITLKSKLVSDFRKDFQFYKVREINNYHHAHDAYLNAVVGTALIKKYPKLESEFVYGDYKVYDVRKMIAKSEQEIGKATAKYFFYSNIMNFFKTEITLANGEIRKRPLIETNGETGEIVWDKGRDFATVRKVLSMPQVNIVKKTEVQTGGFSKESILPKRNSDKLIARKKDWDPKKYGGFDSPTVAYSVLVVAKVEKGKSKKLKSVKELLGITIMERSSFEKNPIDFLEAKGYKEVKKDLIIKLPKYSLFELENGRKRMLASAGELQKGNELALPSKYVNFLYLASHYEKLKGSPEDNEQKQLFVEQHKHYLDEIIEQISEFSKRVILADANLDKVLSAYNKHRDKPIREQAENIIHLFTLTNLGAPAAFKYFDTTIDRKRYTSTKEVLDATLIHQSITGLYETRIDLSQLGGDGGPAPGSSGGSGGWVQEISDSRPMLHIYLNGRRFLGLLNTGADKTCIAGRDWPANWPIHQTESSLQGLGMACGVARSSQPLRWQHEDKSGIIHPFVIPTLPFTLWGRDIMKDIKVRLMTDSPDDSQDLMIGAIESNLFADQISWKSDQPVWLNQWPLKQEKLQALQQLVTEQLQLGHLEESNSPWNTPVFVIKKKSGKWRLLQDLRAVNATMHDMGALQPGLPSPVAVPKGWEIIIIDLQDCFFNIKLHPEDCKRFAFSVPSPNFKRPYQRFQWKVLPQGMKNSPTLCQKFVDKAILTVRDKYQDSYIVHYMDDILLAHPSRSIVDEILTSMIQALNKHGLVVSTEKIQKYDNLKYLGTHIQGDSVSYQKLQIRTDKLRTLNDFQKLLGNINWIRPFLKLTTGELKPLFEILNGDSNPISTRKLTPEACKALQLMNERLSTARVKRLDLSQPWSLCILKTEYTPTACLWQDGVVEWIHLPHISPKVITPYDIFCTQLIIKGRHRSKELFSKDPDYIVVPYTKVQFDLLLQEKEDWPISLLGFLGEVHFHLPKDPLLTFTLQTAIIFPHMTSTTPLEKGIVIFTDGSANGRSVTYIQGREPIIKENTQNTAQQAEIVAVITAFEEVSQPFNLYTDSKYVTGLFPEIETATLSPRTKIYTELKHLQRLIHKRQEKFYIGHIRGHTGLPGPLAQGNAYADSLTRILTAGKRTADGSEFEKRTADGSEFESPKKKAKVE

SEQ ID NO: 3177 - protein, 2113 aa, synthetic construct
MPAAKRVKLDGGDKKYSIGLDIGTNSVGWAVITDEYKVPSKKFKVLGNTDRHSIKKNLIGALLFDSGETAEATRLKRTARRRYTRRKNRICYLQEIFSNEMAKVDDSFFHRLEESFLVEEDKKHERHPIFGNIVDEVAYHEKYPTIYHLRKKLVDSTDKADLRLIYLALAHMIKFRGHFLIEGDLNPDNSDVDKLFIQLVQTYNQLFEENPINASGVDAKAILSARLSKSRRLENLIAQLPGEKKNGLFGNLIALSLGLTPNFKSNFDLAEDAKLQLSKDTYDDDLDNLLAQIGDQYADLFLAAKNLSDAILLSDILRVNTEITKAPLSASMIKRYDEHHQDLTLLKALVRQQLPEKYKEIFFDQSKNGYAGYIDGGASQEEFYKFIKPILEKMDGTEELLVKLNREDLLRKQRTFDNGSIPHQIHLGELHAILRRQEDFYPFLKDNREKIEKILTFRIPYYVGPLARGNSRFAWMTRKSEETITPWNFEEVVDKGASAQSFIERMTNFDKNLPNEKVLPKHSLLYEYFTVYNELTKVKYVTEGMRKPAFLSGEQKKAIVDLLFKTNRKVTVKQLKEDYFKKIECFDSVEISGVEDRFNASLGTYHDLLKIIKDKDFLDNEENEDILEDIVLTLTLFEDREMIEERLKTYAHLFDDKVMKQLKRRRYTGWGRLSRKLINGIRDKQSGKTILDFLKSDGFANRNFMQLIHDDSLTFKEDIQKAQVSGQGDSLHEHIANLAGSPAIKKGILQTVKVVDELVKVMGRHKPENIVIEMARENQTTQKGQKNSRERMKRIEEGIKELGSQILKEHPVENTQLQNEKLYLYYLQNGRDMYVDQELDINRLSDYDVDHIVPQSFLKDDSIDNKVLTRSDKARGKSDNVPSEEVVKKMKNYWRQLLNAKLITQRKFDNLTKAERGGLSELDKAGFIKRQLVETRQITKHVAQILDSRMNTKYDENDKLIREVKVITLKSKLVSDFRKDFQFYKVREINNYHHAHDAYLNAVVGTALIKKYPKLESEFVYGDYKVYDVRKMIAKSEQEIGKATAKYFFYSNIMNFFKTEITLANGEIRKRPLIETNGETGEIVWDKGRDFATVRKVLSMPQVNIVKKTEVQTGGFSKESILPKRNSDKLIARKKDWDPKKYGGFDSPTVAYSVLVVAKVEKGKSKKLKSVKELLGITIMERSSFEKNPIDFLEAKGYKEVKKDLIIKLPKYSLFELENGRKRMLASAGELQKGNELALPSKYVNFLYLASHYEKLKGSPEDNEQKQLFVEQHKHYLDEIIEQISEFSKRVILADANLDKVLSAYNKHRDKPIREQAENIIHLFTLTNLGAPAAFKYFDTTIDRKRYTSTKEVLDATLIHQSITGLYETRIDLSQLGGDGGGGGEAAAKGGWVQEISDSRPMLHIYLNGRRFLGLLNTGADKTCIAGRDWPANWPIHQTESSLQGLGMACGVARSSQPLRWQHEDKSGIIHPFVIPTLPFTLWGRDIMKDIKVRLMTDSPDDSQDLMIGAIESNLFADQISWKSDQPVWLNQWPLKQEKLQALQQLVTEQLQLGHLEESNSPWNTPVFVIKKKSGKWRLLQDLRAVNATMHDMGALQPGLPSPVAVPKGWEIIIIDLQDCFFNIKLHPEDCKRFAFSVPSPNFKRPYQRFQWKVLPQGMKNSPTLCQKFVDKAILTVRDKYQDSYIVHYMDDILLAHPSRSIVDEILTSMIQALNKHGLVVSTEKIQKYDNLKYLGTHIQGDSVSYQKLQIRTDKLRTLNDFQKLLGNINWIRPFLKLTTGELKPLFEILNGDSNPISTRKLTPEACKALQLMNERLSTARVKRLDLSQPWSLCILKTEYTPTACLWQDGVVEWIHLPHISPKVITPYDIFCTQLIIKGRHRSKELFSKDPDYIVVPYTKVQFDLLLQEKEDWPISLLGFLGEVHFHLPKDPLLTFTLQTAIIFPHMTSTTPLEKGIVIFTDGSANGRSVTYIQGREPIIKENTQNTAQQAEIVAVITAFEEVSQPFNLYTDSKYVTGLFPEIETATLSPRTKIYTELKHLQRLIHKRQEKFYIGHIRGHTGLPGPLAQGNAYADSLTRILTAGKRTADGSEFEKRTADGSEFESPKKKAKVE

SEQ ID NO: 3178 - protein, 2116 aa, synthetic construct
MPAAKRVKLDGGDKKYSIGLDIGTNSVGWAVITDEYKVPSKKFKVLGNTDRHSIKKNLIGALLFDSGETAEATRLKRTARRRYTRRKNRICYLQEIFSNEMAKVDDSFFHRLEESFLVEEDKKHERHPIFGNIVDEVAYHEKYPTIYHLRKKLVDSTDKADLRLIYLALAHMIKFRGHFLIEGDLNPDNSDVDKLFIQLVQTYNQLFEENPINASGVDAKAILSARLSKSRRLENLIAQLPGEKKNGLFGNLIALSLGLTPNFKSNFDLAEDAKLQLSKDTYDDDLDNLLAQIGDQYADLFLAAKNLSDAILLSDILRVNTEITKAPLSASMIKRYDEHHQDLTLLKALVRQQLPEKYKEIFFDQSKNGYAGYIDGGASQEEFYKFIKPILEKMDGTEELLVKLNREDLLRKQRTFDNGSIPHQIHLGELHAILRRQEDFYPFLKDNREKIEKILTFRIPYYVGPLARGNSRFAWMTRKSEETITPWNFEEVVDKGASAQSFIERMTNFDKNLPNEKVLPKHSLLYEYFTVYNELTKVKYVTEGMRKPAFLSGEQKKAIVDLLFKTNRKVTVKQLKEDYFKKIECFDSVEISGVEDRFNASLGTYHDLLKIIKDKDFLDNEENEDILEDIVLTLTLFEDREMIEERLKTYAHLFDDKVMKQLKRRRYTGWGRLSRKLINGIRDKQSGKTILDFLKSDGFANRNFMQLIHDDSLTFKEDIQKAQVSGQGDSLHEHIANLAGSPAIKKGILQTVKVVDELVKVMGRHKPENIVIEMARENQTTQKGQKNSRERMKRIEEGIKELGSQILKEHPVENTQLQNEKLYLYYLQNGRDMYVDQELDINRLSDYDVDHIVPQSFLKDDSIDNKVLTRSDKARGKSDNVPSEEVVKKMKNYWRQLLNAKLITQRKFDNLTKAERGGLSELDKAGFIKRQLVETRQITKHVAQILDSRMNTKYDENDKLIREVKVITLKSKLVSDFRKDFQFYKVREINNYHHAHDAYLNAVVGTALIKKYPKLESEFVYGDYKVYDVRKMIAKSEQEIGKATAKYFFYSNIMNFFKTEITLANGEIRKRPLIETNGETGEIVWDKGRDFATVRKVLSMPQVNIVKKTEVQTGGFSKESILPKRNSDKLIARKKDWDPKKYGGFDSPTVAYSVLVVAKVEKGKSKKLKSVKELLGITIMERSSFEKNPIDFLEAKGYKEVKKDLIIKLPKYSLFELENGRKRMLASAGELQKGNELALPSKYVNFLYLASHYEKLKGSPEDNEQKQLFVEQHKHYLDEIIEQISEFSKRVILADANLDKVLSAYNKHRDKPIREQAENIIHLFTLTNLGAPAAFKYFDTTIDRKRYTSTKEVLDATLIHQSITGLYETRIDLSQLGGDGGGGSPAPEAAAKGGWVQEISDSRPMLHIYLNGRRFLGLLNTGADKTCIAGRDWPANWPIHQTESSLQGLGMACGVARSSQPLRWQHEDKSGIIHPFVIPTLPFTLWGRDIMKDIKVRLMTDSPDDSQDLMIGAIESNLFADQISWKSDQPVWLNQWPLKQEKLQALQQLVTEQLQLGHLEESNSPWNTPVFVIKKKSGKWRLLQDLRAVNATMHDMGALQPGLPSPVAVPKGWEIIIIDLQDCFFNIKLHPEDCKRFAFSVPSPNFKRPYQRFQWKVLPQGMKNSPTLCQKFVDKAILTVRDKYQDSYIVHYMDDILLAHPSRSIVDEILTSMIQALNKHGLVVSTEKIQKYDNLKYLGTHIQGDSVSYQKLQIRTDKLRTLNDFQKLLGNINWIRPFLKLTTGELKPLFEILNGDSNPISTRKLTPEACKALQLMNERLSTARVKRLDLSQPWSLCILKTEYTPTACLWQDGVVEWIHLPHISPKVITPYDIFCTQLIIKGRHRSKELFSKDPDYIVVPYTKVQFDLLLQEKEDWPISLLGFLGEVHFHLPKDPLLTFTLQTAIIFPHMTSTTPLEKGIVIFTDGSANGRSVTYIQGREPIIKENTQNTAQQAEIVAVITAFEEVSQPFNLYTDSKYVTGLFPEIETATLSPRTKIYTELKHLQRLIHKRQEKFYIGHIRGHTGLPGPLAQGNAYADSLTRILTAGKRTADGSEFEKRTADGSEFESPKKKAKVE

SEQ ID NO: 3179 - protein, 2114 aa, synthetic construct
MPAAKRVKLDGGDKKYSIGLDIGTNSVGWAVITDEYKVPSKKFKVLGNTDRHSIKKNLIGALLFDSGETAEATRLKRTARRRYTRRKNRICYLQEIFSNEMAKVDDSFFHRLEESFLVEEDKKHERHPIFGNIVDEVAYHEKYPTIYHLRKKLVDSTDKADLRLIYLALAHMIKFRGHFLIEGDLNPDNSDVDKLFIQLVQTYNQLFEENPINASGVDAKAILSARLSKSRRLENLIAQLPGEKKNGLFGNLIALSLGLTPNFKSNFDLAEDAKLQLSKDTYDDDLDNLLAQIGDQYADLFLAAKNLSDAILLSDILRVNTEITKAPLSASMIKRYDEHHQDLTLLKALVRQQLPEKYKEIFFDQSKNGYAGYIDGGASQEEFYKFIKPILEKMDGTEELLVKLNREDLLRKQRTFDNGSIPHQIHLGELHAILRRQEDFYPFLKDNREKIEKILTFRIPYYVGPLARGNSRFAWMTRKSEETITPWNFEEVVDKGASAQSFIERMTNFDKNLPNEKVLPKHSLLYEYFTVYNELTKVKYVTEGMRKPAFLSGEQKKAIVDLLFKTNRKVTVKQLKEDYFKKIECFDSVEISGVEDRFNASLGTYHDLLKIIKDKDFLDNEENEDILEDIVLTLTLFEDREMIEERLKTYAHLFDDKVMKQLKRRRYTGWGRLSRKLINGIRDKQSGKTILDFLKSDGFANRNFMQLIHDDSLTFKEDIQKAQVSGQGDSLHEHIANLAGSPAIKKGILQTVKVVDELVKVMGRHKPENIVIEMARENQTTQKGQKNSRERMKRIEEGIKELGSQILKEHPVENTQLQNEKLYLYYLQNGRDMYVDQELDINRLSDYDVDHIVPQSFLKDDSIDNKVLTRSDKARGKSDNVPSEEVVKKMKNYWRQLLNAKLITQRKFDNLTKAERGGLSELDKAGFIKRQLVETRQITKHVAQILDSRMNTKYDENDKLIREVKVITLKSKLVSDFRKDFQFYKVREINNYHHAHDAYLNAVVGTALIKKYPKLESEFVYGDYKVYDVRKMIAKSEQEIGKATAKYFFYSNIMNFFKTEITLANGEIRKRPLIETNGETGEIVWDKGRDFATVRKVLSMPQVNIVKKTEVQTGGFSKESILPKRNSDKLIARKKDWDPKKYGGFDSPTVAYSVLVVAKVEKGKSKKLKSVKELLGITIMERSSFEKNPIDFLEAKGYKEVKKDLIIKLPKYSLFELENGRKRMLASAGELQKGNELALPSKYVNFLYLASHYEKLKGSPEDNEQKQLFVEQHKHYLDEIIEQISEFSKRVILADANLDKVLSAYNKHRDKPIREQAENIIHLFTLTNLGAPAAFKYFDTTIDRKRYTSTKEVLDATLIHQSITGLYETRIDLSQLGGDGGGGSGSSGGGGGWVQEISDSRPMLHIYLNGRRFLGLLNTGADKTCIAGRDWPANWPIHQTESSLQGLGMACGVARSSQPLRWQHEDKSGIIHPFVIPTLPFTLWGRDIMKDIKVRLMTDSPDDSQDLMIGAIESNLFADQISWKSDQPVWLNQWPLKQEKLQALQQLVTEQLQLGHLEESNSPWNTPVFVIKKKSGKWRLLQDLRAVNATMHDMGALQPGLPSPVAVPKGWEIIIIDLQDCFFNIKLHPEDCKRFAFSVPSPNFKRPYQRFQWKVLPQGMKNSPTLCQKFVDKAILTVRDKYQDSYIVHYMDDILLAHPSRSIVDEILTSMIQALNKHGLVVSTEKIQKYDNLKYLGTHIQGDSVSYQKLQIRTDKLRTLNDFQKLLGNINWIRPFLKLTTGELKPLFEILNGDSNPISTRKLTPEACKALQLMNERLSTARVKRLDLSQPWSLCILKTEYTPTACLWQDGVVEWIHLPHISPKVITPYDIFCTQLIIKGRHRSKELFSKDPDYIVVPYTKVQFDLLLQEKEDWPISLLGFLGEVHFHLPKDPLLTFTLQTAIIFPHMTSTTPLEKGIVIFTDGSANGRSVTYIQGREPIIKENTQNTAQQAEIVAVITAFEEVSQPFNLYTDSKYVTGLFPEIETATLSPRTKIYTELKHLQRLIHKRQEKFYIGHIRGHTGLPGPLAQGNAYADSLTRILTAGKRTADGSEFEKRTADGSEFESPKKKAKVE

SEQ ID NO: 3180 - protein, 2114 aa, synthetic construct
MPAAKRVKLDGGDKKYSIGLDIGTNSVGWAVITDEYKVPSKKFKVLGNTDRHSIKKNLIGALLFDSGETAEATRLKRTARRRYTRRKNRICYLQEIFSNEMAKVDDSFFHRLEESFLVEEDKKHERHPIFGNIVDEVAYHEKYPTIYHLRKKLVDSTDKADLRLIYLALAHMIKFRGHFLIEGDLNPDNSDVDKLFIQLVQTYNQLFEENPINASGVDAKAILSARLSKSRRLENLIAQLPGEKKNGLFGNLIALSLGLTPNFKSNFDLAEDAKLQLSKDTYDDDLDNLLAQIGDQYADLFLAAKNLSDAILLSDILRVNTEITKAPLSASMIKRYDEHHQDLTLLKALVRQQLPEKYKEIFFDQSKNGYAGYIDGGASQEEFYKFIKPILEKMDGTEELLVKLNREDLLRKQRTFDNGSIPHQIHLGELHAILRRQEDFYPFLKDNREKIEKILTFRIPYYVGPLARGNSRFAWMTRKSEETITPWNFEEVVDKGASAQSFIERMTNFDKNLPNEKVLPKHSLLYEYFTVYNELTKVKYVTEGMRKPAFLSGEQKKAIVDLLFKTNRKVTVKQLKEDYFKKIECFDSVEISGVEDRFNASLGTYHDLLKIIKDKDFLDNEENEDILEDIVLTLTLFEDREMIEERLKTYAHLFDDKVMKQLKRRRYTGWGRLSRKLINGIRDKQSGKTILDFLKSDGFANRNFMQLIHDDSLTFKEDIQKAQVSGQGDSLHEHIANLAGSPAIKKGILQTVKVVDELVKVMGRHKPENIVIEMARENQTTQKGQKNSRERMKRIEEGIKELGSQILKEHPVENTQLQNEKLYLYYLQNGRDMYVDQELDINRLSDYDVDHIVPQSFLKDDSIDNKVLTRSDKARGKSDNVPSEEVVKKMKNYWRQLLNAKLITQRKFDNLTKAERGGLSELDKAGFIKRQLVETRQITKHVAQILDSRMNTKYDENDKLIREVKVITLKSKLVSDFRKDFQFYKVREINNYHHAHDAYLNAVVGTALIKKYPKLESEFVYGDYKVYDVRKMIAKSEQEIGKATAKYFFYSNIMNFFKTEITLANGEIRKRPLIETNGETGEIVWDKGRDFATVRKVLSMPQVNIVKKTEVQTGGFSKESILPKRNSDKLIARKKDWDPKKYGGFDSPTVAYSVLVVAKVEKGKSKKLKSVKELLGITIMERSSFEKNPIDFLEAKGYKEVKKDLIIKLPKYSLFELENGRKRMLASAGELQKGNELALPSKYVNFLYLASHYEKLKGSPEDNEQKQLFVEQHKHYLDEIIEQISEFSKRVILADANLDKVLSAYNKHRDKPIREQAENIIHLFTLTNLGAPAAFKYFDTTIDRKRYTSTKEVLDATLIHQSITGLYETRIDLSQLGGDGGPAPAPAPAPGGWVQEISDSRPMLHIYLNGRRFLGLLNTGADKTCIAGRDWPANWPIHQTESSLQGLGMACGVARSSQPLRWQHEDKSGIIHPFVIPTLPFTLWGRDIMKDIKVRLMTDSPDDSQDLMIGAIESNLFADQISWKSDQPVWLNQWPLKQEKLQALQQLVTEQLQLGHLEESNSPWNTPVFVIKKKSGKWRLLQDLRAVNATMHDMGALQPGLPSPVAVPKGWEIIIIDLQDCFFNIKLHPEDCKRFAFSVPSPNFKRPYQRFQWKVLPQGMKNSPTLCQKFVDKAILTVRDKYQDSYIVHYMDDILLAHPSRSIVDEILTSMIQALNKHGLVVSTEKIQKYDNLKYLGTHIQGDSVSYQKLQIRTDKLRTLNDFQKLLGNINWIRPFLKLTTGELKPLFEILNGDSNPISTRKLTPEACKALQLMNERLSTARVKRLDLSQPWSLCILKTEYTPTACLWQDGVVEWIHLPHISPKVITPYDIFCTQLIIKGRHRSKELFSKDPDYIVVPYTKVQFDLLLQEKEDWPISLLGFLGEVHFHLPKDPLLTFTLQTAIIFPHMTSTTPLEKGIVIFTDGSANGRSVTYIQGREPIIKENTQNTAQQAEIVAVITAFEEVSQPFNLYTDSKYVTGLFPEIETATLSPRTKIYTELKHLQRLIHKRQEKFYIGHIRGHTGLPGPLAQGNAYADSLTRILTAGKRTADGSEFEKRTADGSEFESPKKKAKVE

SEQ ID NO: 3181 - protein, 2116 aa, synthetic construct
MPAAKRVKLDGGDKKYSIGLDIGTNSVGWAVITDEYKVPSKKFKVLGNTDRHSIKKNLIGALLFDSGETAEATRLKRTARRRYTRRKNRICYLQEIFSNEMAKVDDSFFHRLEESFLVEEDKKHERHPIFGNIVDEVAYHEKYPTIYHLRKKLVDSTDKADLRLIYLALAHMIKFRGHFLIEGDLNPDNSDVDKLFIQLVQTYNQLFEENPINASGVDAKAILSARLSKSRRLENLIAQLPGEKKNGLFGNLIALSLGLTPNFKSNFDLAEDAKLQLSKDTYDDDLDNLLAQIGDQYADLFLAAKNLSDAILLSDILRVNTEITKAPLSASMIKRYDEHHQDLTLLKALVRQQLPEKYKEIFFDQSKNGYAGYIDGGASQEEFYKFIKPILEKMDGTEELLVKLNREDLLRKQRTFDNGSIPHQIHLGELHAILRRQEDFYPFLKDNREKIEKILTFRIPYYVGPLARGNSRFAWMTRKSEETITPWNFEEVVDKGASAQSFIERMTNFDKNLPNEKVLPKHSLLYEYFTVYNELTKVKYVTEGMRKPAFLSGEQKKAIVDLLFKTNRKVTVKQLKEDYFKKIECFDSVEISGVEDRFNASLGTYHDLLKIIKDKDFLDNEENEDILEDIVLTLTLFEDREMIEERLKTYAHLFDDKVMKQLKRRRYTGWGRLSRKLINGIRDKQSGKTILDFLKSDGFANRNFMQLIHDDSLTFKEDIQKAQVSGQGDSLHEHIANLAGSPAIKKGILQTVKVVDELVKVMGRHKPENIVIEMARENQTTQKGQKNSRERMKRIEEGIKELGSQILKEHPVENTQLQNEKLYLYYLQNGRDMYVDQELDINRLSDYDVDHIVPQSFLKDDSIDNKVLTRSDKARGKSDNVPSEEVVKKMKNYWRQLLNAKLITQRKFDNLTKAERGGLSELDKAGFIKRQLVETRQITKHVAQILDSRMNTKYDENDKLIREVKVITLKSKLVSDFRKDFQFYKVREINNYHHAHDAYLNAVVGTALIKKYPKLESEFVYGDYKVYDVRKMIAKSEQEIGKATAKYFFYSNIMNFFKTEITLANGEIRKRPLIETNGETGEIVWDKGRDFATVRKVLSMPQVNIVKKTEVQTGGFSKESILPKRNSDKLIARKKDWDPKKYGGFDSPTVAYSVLVVAKVEKGKSKKLKSVKELLGITIMERSSFEKNPIDFLEAKGYKEVKKDLIIKLPKYSLFELENGRKRMLASAGELQKGNELALPSKYVNFLYLASHYEKLKGSPEDNEQKQLFVEQHKHYLDEIIEQISEFSKRVILADANLDKVLSAYNKHRDKPIREQAENIIHLFTLTNLGAPAAFKYFDTTIDRKRYTSTKEVLDATLIHQSITGLYETRIDLSQLGGDGGGSSGGGEAAAKGGWVQEISDSRPMLHIYLNGRRFLGLLNTGADKTCIAGRDWPANWPIHQTESSLQGLGMACGVARSSQPLRWQHEDKSGIIHPFVIPTLPFTLWGRDIMKDIKVRLMTDSPDDSQDLMIGAIESNLFADQISWKSDQPVWLNQWPLKQEKLQALQQLVTEQLQLGHLEESNSPWNTPVFVIKKKSGKWRLLQDLRAVNATMHDMGALQPGLPSPVAVPKGWEIIIIDLQDCFFNIKLHPEDCKRFAFSVPSPNFKRPYQRFQWKVLPQGMKNSPTLCQKFVDKAILTVRDKYQDSYIVHYMDDILLAHPSRSIVDEILTSMIQALNKHGLVVSTEKIQKYDNLKYLGTHIQGDSVSYQKLQIRTDKLRTLNDFQKLLGNINWIRPFLKLTTGELKPLFEILNGDSNPISTRKLTPEACKALQLMNERLSTARVKRLDLSQPWSLCILKTEYTPTACLWQDGVVEWIHLPHISPKVITPYDIFCTQLIIKGRHRSKELFSKDPDYIVVPYTKVQFDLLLQEKEDWPISLLGFLGEVHFHLPKDPLLTFTLQTAIIFPHMTSTTPLEKGIVIFTDGSANGRSVTYIQGREPIIKENTQNTAQQAEIVAVITAFEEVSQPFNLYTDSKYVTGLFPEIETATLSPRTKIYTELKHLQRLIHKRQEKFYIGHIRGHTGLPGPLAQGNAYADSLTRILTAGKRTADGSEFEKRTADGSEFESPKKKAKVE

SEQ ID NO: 3182 - protein, 2116 aa, synthetic construct
MPAAKRVKLDGGDKKYSIGLDIGTNSVGWAVITDEYKVPSKKFKVLGNTDRHSIKKNLIGALLFDSGETAEATRLKRTARRRYTRRKNRICYLQEIFSNEMAKVDDSFFHRLEESFLVEEDKKHERHPIFGNIVDEVAYHEKYPTIYHLRKKLVDSTDKADLRLIYLALAHMIKFRGHFLIEGDLNPDNSDVDKLFIQLVQTYNQLFEENPINASGVDAKAILSARLSKSRRLENLIAQLPGEKKNGLFGNLIALSLGLTPNFKSNFDLAEDAKLQLSKDTYDDDLDNLLAQIGDQYADLFLAAKNLSDAILLSDILRVNTEITKAPLSASMIKRYDEHHQDLTLLKALVRQQLPEKYKEIFFDQSKNGYAGYIDGGASQEEFYKFIKPILEKMDGTEELLVKLNREDLLRKQRTFDNGSIPHQIHLGELHAILRRQEDFYPFLKDNREKIEKILTFRIPYYVGPLARGNSRFAWMTRKSEETITPWNFEEVVDKGASAQSFIERMTNFDKNLPNEKVLPKHSLLYEYFTVYNELTKVKYVTEGMRKPAFLSGEQKKAIVDLLFKTNRKVTVKQLKEDYFKKIECFDSVEISGVEDRFNASLGTYHDLLKIIKDKDFLDNEENEDILEDIVLTLTLFEDREMIEERLKTYAHLFDDKVMKQLKRRRYTGWGRLSRKLINGIRDKQSGKTILDFLKSDGFANRNFMQLIHDDSLTFKEDIQKAQVSGQGDSLHEHIANLAGSPAIKKGILQTVKVVDELVKVMGRHKPENIVIEMARENQTTQKGQKNSRERMKRIEEGIKELGSQILKEHPVENTQLQNEKLYLYYLQNGRDMYVDQELDINRLSDYDVDHIVPQSFLKDDSIDNKVLTRSDKARGKSDNVPSEEVVKKMKNYWRQLLNAKLITQRKFDNLTKAERGGLSELDKAGFIKRQLVETRQITKHVAQILDSRMNTKYDENDKLIREVKVITLKSKLVSDFRKDFQFYKVREINNYHHAHDAYLNAVVGTALIKKYPKLESEFVYGDYKVYDVRKMIAKSEQEIGKATAKYFFYSNIMNFFKTEITLANGEIRKRPLIETNGETGEIVWDKGRDFATVRKVLSMPQVNIVKKTEVQTGGFSKESILPKRNSDKLIARKKDWDPKKYGGFDSPTVAYSVLVVAKVEKGKSKKLKSVKELLGITIMERSSFEKNPIDFLEAKGYKEVKKDLIIKLPKYSLFELENGRKRMLASAGELQKGNELALPSKYVNFLYLASHYEKLKGSPEDNEQKQLFVEQHKHYLDEIIEQISEFSKRVILADANLDKVLSAYNKHRDKPIREQAENIIHLFTLTNLGAPAAFKYFDTTIDRKRYTSTKEVLDATLIHQSITGLYETRIDLSQLGGDGGGSSEAAAKPAPGGWVQEISDSRPMLHIYLNGRRFLGLLNTGADKTCIAGRDWPANWPIHQTESSLQGLGMACGVARSSQPLRWQHEDKSGIIHPFVIPTLPFTLWGRDIMKDIKVRLMTDSPDDSQDLMIGAIESNLFADQISWKSDQPVWLNQWPLKQEKLQALQQLVTEQLQLGHLEESNSPWNTPVFVIKKKSGKWRLLQDLRAVNATMHDMGALQPGLPSPVAVPKGWEIIIIDLQDCFFNIKLHPEDCKRFAFSVPSPNFKRPYQRFQWKVLPQGMKNSPTLCQKFVDKAILTVRDKYQDSYIVHYMDDILLAHPSRSIVDEILTSMIQALNKHGLVVSTEKIQKYDNLKYLGTHIQGDSVSYQKLQIRTDKLRTLNDFQKLLGNINWIRPFLKLTTGELKPLFEILNGDSNPISTRKLTPEACKALQLMNERLSTARVKRLDLSQPWSLCILKTEYTPTACLWQDGVVEWIHLPHISPKVITPYDIFCTQLIIKGRHRSKELFSKDPDYIVVPYTKVQFDLLLQEKEDWPISLLGFLGEVHFHLPKDPLLTFTLQTAIIFPHMTSTTPLEKGIVIFTDGSANGRSVTYIQGREPIIKENTQNTAQQAEIVAVITAFEEVSQPFNLYTDSKYVTGLFPEIETATLSPRTKIYTELKHLQRLIHKRQEKFYIGHIRGHTGLPGPLAQGNAYADSLTRILTAGKRTADGSEFEKRTADGSEFESPKKKAKVE

SEQ ID NO: 3183 - protein, 2111 aa, synthetic construct
MPAAKRVKLDGGDKKYSIGLDIGTNSVGWAVITDEYKVPSKKFKVLGNTDRHSIKKNLIGALLFDSGETAEATRLKRTARRRYTRRKNRICYLQEIFSNEMAKVDDSFFHRLEESFLVEEDKKHERHPIFGNIVDEVAYHEKYPTIYHLRKKLVDSTDKADLRLIYLALAHMIKFRGHFLIEGDLNPDNSDVDKLFIQLVQTYNQLFEENPINASGVDAKAILSARLSKSRRLENLIAQLPGEKKNGLFGNLIALSLGLTPNFKSNFDLAEDAKLQLSKDTYDDDLDNLLAQIGDQYADLFLAAKNLSDAILLSDILRVNTEITKAPLSASMIKRYDEHHQDLTLLKALVRQQLPEKYKEIFFDQSKNGYAGYIDGGASQEEFYKFIKPILEKMDGTEELLVKLNREDLLRKQRTFDNGSIPHQIHLGELHAILRRQEDFYPFLKDNREKIEKILTFRIPYYVGPLARGNSRFAWMTRKSEETITPWNFEEVVDKGASAQSFIERMTNFDKNLPNEKVLPKHSLLYEYFTVYNELTKVKYVTEGMRKPAFLSGEQKKAIVDLLFKTNRKVTVKQLKEDYFKKIECFDSVEISGVEDRFNASLGTYHDLLKIIKDKDFLDNEENEDILEDIVLTLTLFEDREMIEERLKTYAHLFDDKVMKQLKRRRYTGWGRLSRKLINGIRDKQSGKTILDFLKSDGFANRNFMQLIHDDSLTFKEDIQKAQVSGQGDSLHEHIANLAGSPAIKKGILQTVKVVDELVKVMGRHKPENIVIEMARENQTTQKGQKNSRERMKRIEEGIKELGSQILKEHPVENTQLQNEKLYLYYLQNGRDMYVDQELDINRLSDYDVDHIVPQSFLKDDSIDNKVLTRSDKARGKSDNVPSEEVVKKMKNYWRQLLNAKLITQRKFDNLTKAERGGLSELDKAGFIKRQLVETRQITKHVAQILDSRMNTKYDENDKLIREVKVITLKSKLVSDFRKDFQFYKVREINNYHHAHDAYLNAVVGTALIKKYPKLESEFVYGDYKVYDVRKMIAKSEQEIGKATAKYFFYSNIMNFFKTEITLANGEIRKRPLIETNGETGEIVWDKGRDFATVRKVLSMPQVNIVKKTEVQTGGFSKESILPKRNSDKLIARKKDWDPKKYGGFDSPTVAYSVLVVAKVEKGKSKKLKSVKELLGITIMERSSFEKNPIDFLEAKGYKEVKKDLIIKLPKYSLFELENGRKRMLASAGELQKGNELALPSKYVNFLYLASHYEKLKGSPEDNEQKQLFVEQHKHYLDEIIEQISEFSKRVILADANLDKVLSAYNKHRDKPIREQAENIIHLFTLTNLGAPAAFKYFDTTIDRKRYTSTKEVLDATLIHQSITGLYETRIDLSQLGGDGGGGSGSSGGWVQEISDSRPMLHIYLNGRRFLGLLNTGADKTCIAGRDWPANWPIHQTESSLQGLGMACGVARSSQPLRWQHEDKSGIIHPFVIPTLPFTLWGRDIMKDIKVRLMTDSPDDSQDLMIGAIESNLFADQISWKSDQPVWLNQWPLKQEKLQALQQLVTEQLQLGHLEESNSPWNTPVFVIKKKSGKWRLLQDLRAVNATMHDMGALQPGLPSPVAVPKGWEIIIIDLQDCFFNIKLHPEDCKRFAFSVPSPNFKRPYQRFQWKVLPQGMKNSPTLCQKFVDKAILTVRDKYQDSYIVHYMDDILLAHPSRSIVDEILTSMIQALNKHGLVVSTEKIQKYDNLKYLGTHIQGDSVSYQKLQIRTDKLRTLNDFQKLLGNINWIRPFLKLTTGELKPLFEILNGDSNPISTRKLTPEACKALQLMNERLSTARVKRLDLSQPWSLCILKTEYTPTACLWQDGVVEWIHLPHISPKVITPYDIFCTQLIIKGRHRSKELFSKDPDYIVVPYTKVQFDLLLQEKEDWPISLLGFLGEVHFHLPKDPLLTFTLQTAIIFPHMTSTTPLEKGIVIFTDGSANGRSVTYIQGREPIIKENTQNTAQQAEIVAVITAFEEVSQPFNLYTDSKYVTGLFPEIETATLSPRTKIYTELKHLQRLIHKRQEKFYIGHIRGHTGLPGPLAQGNAYADSLTRILTAGKRTADGSEFEKRTADGSEFESPKKKAKVE

SEQ ID NO: 3184 - protein, 2114 aa, synthetic construct
MPAAKRVKLDGGDKKYSIGLDIGTNSVGWAVITDEYKVPSKKFKVLGNTDRHSIKKNLIGALLFDSGETAEATRLKRTARRRYTRRKNRICYLQEIFSNEMAKVDDSFFHRLEESFLVEEDKKHERHPIFGNIVDEVAYHEKYPTIYHLRKKLVDSTDKADLRLIYLALAHMIKFRGHFLIEGDLNPDNSDVDKLFIQLVQTYNQLFEENPINASGVDAKAILSARLSKSRRLENLIAQLPGEKKNGLFGNLIALSLGLTPNFKSNFDLAEDAKLQLSKDTYDDDLDNLLAQIGDQYADLFLAAKNLSDAILLSDILRVNTEITKAPLSASMIKRYDEHHQDLTLLKALVRQQLPEKYKEIFFDQSKNGYAGYIDGGASQEEFYKFIKPILEKMDGTEELLVKLNREDLLRKQRTFDNGSIPHQIHLGELHAILRRQEDFYPFLKDNREKIEKILTFRIPYYVGPLARGNSRFAWMTRKSEETITPWNFEEVVDKGASAQSFIERMTNFDKNLPNEKVLPKHSLLYEYFTVYNELTKVKYVTEGMRKPAFLSGEQKKAIVDLLFKTNRKVTVKQLKEDYFKKIECFDSVEISGVEDRFNASLGTYHDLLKIIKDKDFLDNEENEDILEDIVLTLTLFEDREMIEERLKTYAHLFDDKVMKQLKRRRYTGWGRLSRKLINGIRDKQSGKTILDFLKSDGFANRNFMQLIHDDSLTFKEDIQKAQVSGQGDSLHEHIANLAGSPAIKKGILQTVKVVDELVKVMGRHKPENIVIEMARENQTTQKGQKNSRERMKRIEEGIKELGSQILKEHPVENTQLQNEKLYLYYLQNGRDMYVDQELDINRLSDYDVDHIVPQSFLKDDSIDNKVLTRSDKARGKSDNVPSEEVVKKMKNYWRQLLNAKLITQRKFDNLTKAERGGLSELDKAGFIKRQLVETRQITKHVAQILDSRMNTKYDENDKLIREVKVITLKSKLVSDFRKDFQFYKVREINNYHHAHDAYLNAVVGTALIKKYPKLESEFVYGDYKVYDVRKMIAKSEQEIGKATAKYFFYSNIMNFFKTEITLANGEIRKRPLIETNGETGEIVWDKGRDFATVRKVLSMPQVNIVKKTEVQTGGFSKESILPKRNSDKLIARKKDWDPKKYGGFDSPTVAYSVLVVAKVEKGKSKKLKSVKELLGITIMERSSFEKNPIDFLEAKGYKEVKKDLIIKLPKYSLFELENGRKRMLASAGELQKGNELALPSKYVNFLYLASHYEKLKGSPEDNEQKQLFVEQHKHYLDEIIEQISEFSKRVILADANLDKVLSAYNKHRDKPIREQAENIIHLFTLTNLGAPAAFKYFDTTIDRKRYTSTKEVLDATLIHQSITGLYETRIDLSQLGGDGGGGGGSSGGSGGWVQEISDSRPMLHIYLNGRRFLGLLNTGADKTCIAGRDWPANWPIHQTESSLQGLGMACGVARSSQPLRWQHEDKSGIIHPFVIPTLPFTLWGRDIMKDIKVRLMTDSPDDSQDLMIGAIESNLFADQISWKSDQPVWLNQWPLKQEKLQALQQLVTEQLQLGHLEESNSPWNTPVFVIKKKSGKWRLLQDLRAVNATMHDMGALQPGLPSPVAVPKGWEIIIIDLQDCFFNIKLHPEDCKRFAFSVPSPNFKRPYQRFQWKVLPQGMKNSPTLCQKFVDKAILTVRDKYQDSYIVHYMDDILLAHPSRSIVDEILTSMIQALNKHGLVVSTEKIQKYDNLKYLGTHIQGDSVSYQKLQIRTDKLRTLNDFQKLLGNINWIRPFLKLTTGELKPLFEILNGDSNPISTRKLTPEACKALQLMNERLSTARVKRLDLSQPWSLCILKTEYTPTACLWQDGVVEWIHLPHISPKVITPYDIFCTQLIIKGRHRSKELFSKDPDYIVVPYTKVQFDLLLQEKEDWPISLLGFLGEVHFHLPKDPLLTFTLQTAIIFPHMTSTTPLEKGIVIFTDGSANGRSVTYIQGREPIIKENTQNTAQQAEIVAVITAFEEVSQPFNLYTDSKYVTGLFPEIETATLSPRTKIYTELKHLQRLIHKRQEKFYIGHIRGHTGLPGPLAQGNAYADSLTRILTAGKRTADGSEFEKRTADGSEFESPKKKAKVE

SEQ ID NO: 3185 - protein, 2120 aa, synthetic construct
MPAAKRVKLDGGDKKYSIGLDIGTNSVGWAVITDEYKVPSKKFKVLGNTDRHSIKKNLIGALLFDSGETAEATRLKRTARRRYTRRKNRICYLQEIFSNEMAKVDDSFFHRLEESFLVEEDKKHERHPIFGNIVDEVAYHEKYPTIYHLRKKLVDSTDKADLRLIYLALAHMIKFRGHFLIEGDLNPDNSDVDKLFIQLVQTYNQLFEENPINASGVDAKAILSARLSKSRRLENLIAQLPGEKKNGLFGNLIALSLGLTPNFKSNFDLAEDAKLQLSKDTYDDDLDNLLAQIGDQYADLFLAAKNLSDAILLSDILRVNTEITKAPLSASMIKRYDEHHQDLTLLKALVRQQLPEKYKEIFFDQSKNGYAGYIDGGASQEEFYKFIKPILEKMDGTEELLVKLNREDLLRKQRTFDNGSIPHQIHLGELHAILRRQEDFYPFLKDNREKIEKILTFRIPYYVGPLARGNSRFAWMTRKSEETITPWNFEEVVDKGASAQSFIERMTNFDKNLPNEKVLPKHSLLYEYFTVYNELTKVKYVTEGMRKPAFLSGEQKKAIVDLLFKTNRKVTVKQLKEDYFKKIECFDSVEISGVEDRFNASLGTYHDLLKIIKDKDFLDNEENEDILEDIVLTLTLFEDREMIEERLKTYAHLFDDKVMKQLKRRRYTGWGRLSRKLINGIRDKQSGKTILDFLKSDGFANRNFMQLIHDDSLTFKEDIQKAQVSGQGDSLHEHIANLAGSPAIKKGILQTVKVVDELVKVMGRHKPENIVIEMARENQTTQKGQKNSRERMKRIEEGIKELGSQILKEHPVENTQLQNEKLYLYYLQNGRDMYVDQELDINRLSDYDVDHIVPQSFLKDDSIDNKVLTRSDKARGKSDNVPSEEVVKKMKNYWRQLLNAKLITQRKFDNLTKAERGGLSELDKAGFIKRQLVETRQITKHVAQILDSRMNTKYDENDKLIREVKVITLKSKLVSDFRKDFQFYKVREINNYHHAHDAYLNAVVGTALIKKYPKLESEFVYGDYKVYDVRKMIAKSEQEIGKATAKYFFYSNIMNFFKTEITLANGEIRKRPLIETNGETGEIVWDKGRDFATVRKVLSMPQVNIVKKTEVQTGGFSKESILPKRNSDKLIARKKDWDPKKYGGFDSPTVAYSVLVVAKVEKGKSKKLKSVKELLGITIMERSSFEKNPIDFLEAKGYKEVKKDLIIKLPKYSLFELENGRKRMLASAGELQKGNELALPSKYVNFLYLASHYEKLKGSPEDNEQKQLFVEQHKHYLDEIIEQISEFSKRVILADANLDKVLSAYNKHRDKPIREQAENIIHLFTLTNLGAPAAFKYFDTTIDRKRYTSTKEVLDATLIHQSITGLYETRIDLSQLGGDGGEAAAKGGGGSEAAAKGGWVQEISDSRPMLHIYLNGRRFLGLLNTGADKTCIAGRDWPANWPIHQTESSLQGLGMACGVARSSQPLRWQHEDKSGIIHPFVIPTLPFTLWGRDIMKDIKVRLMTDSPDDSQDLMIGAIESNLFADQISWKSDQPVWLNQWPLKQEKLQALQQLVTEQLQLGHLEESNSPWNTPVFVIKKKSGKWRLLQDLRAVNATMHDMGALQPGLPSPVAVPKGWEIIIIDLQDCFFNIKLHPEDCKRFAFSVPSPNFKRPYQRFQWKVLPQGMKNSPTLCQKFVDKAILTVRDKYQDSYIVHYMDDILLAHPSRSIVDEILTSMIQALNKHGLVVSTEKIQKYDNLKYLGTHIQGDSVSYQKLQIRTDKLRTLNDFQKLLGNINWIRPFLKLTTGELKPLFEILNGDSNPISTRKLTPEACKALQLMNERLSTARVKRLDLSQPWSLCILKTEYTPTACLWQDGVVEWIHLPHISPKVITPYDIFCTQLIIKGRHRSKELFSKDPDYIVVPYTKVQFDLLLQEKEDWPISLLGFLGEVHFHLPKDPLLTFTLQTAIIFPHMTSTTPLEKGIVIFTDGSANGRSVTYIQGREPIIKENTQNTAQQAEIVAVITAFEEVSQPFNLYTDSKYVTGLFPEIETATLSPRTKIYTELKHLQRLIHKRQEKFYIGHIRGHTGLPGPLAQGNAYADSLTRILTAGKRTADGSEFEKRTADGSEFESPKKKAKVE

SEQ ID NO: 3186 - protein, 2108 aa, synthetic construct
MPAAKRVKLDGGDKKYSIGLDIGTNSVGWAVITDEYKVPSKKFKVLGNTDRHSIKKNLIGALLFDSGETAEATRLKRTARRRYTRRKNRICYLQEIFSNEMAKVDDSFFHRLEESFLVEEDKKHERHPIFGNIVDEVAYHEKYPTIYHLRKKLVDSTDKADLRLIYLALAHMIKFRGHFLIEGDLNPDNSDVDKLFIQLVQTYNQLFEENPINASGVDAKAILSARLSKSRRLENLIAQLPGEKKNGLFGNLIALSLGLTPNFKSNFDLAEDAKLQLSKDTYDDDLDNLLAQIGDQYADLFLAAKNLSDAILLSDILRVNTEITKAPLSASMIKRYDEHHQDLTLLKALVRQQLPEKYKEIFFDQSKNGYAGYIDGGASQEEFYKFIKPILEKMDGTEELLVKLNREDLLRKQRTFDNGSIPHQIHLGELHAILRRQEDFYPFLKDNREKIEKILTFRIPYYVGPLARGNSRFAWMTRKSEETITPWNFEEVVDKGASAQSFIERMTNFDKNLPNEKVLPKHSLLYEYFTVYNELTKVKYVTEGMRKPAFLSGEQKKAIVDLLFKTNRKVTVKQLKEDYFKKIECFDSVEISGVEDRFNASLGTYHDLLKIIKDKDFLDNEENEDILEDIVLTLTLFEDREMIEERLKTYAHLFDDKVMKQLKRRRYTGWGRLSRKLINGIRDKQSGKTILDFLKSDGFANRNFMQLIHDDSLTFKEDIQKAQVSGQGDSLHEHIANLAGSPAIKKGILQTVKVVDELVKVMGRHKPENIVIEMARENQTTQKGQKNSRERMKRIEEGIKELGSQILKEHPVENTQLQNEKLYLYYLQNGRDMYVDQELDINRLSDYDVDHIVPQSFLKDDSIDNKVLTRSDKARGKSDNVPSEEVVKKMKNYWRQLLNAKLITQRKFDNLTKAERGGLSELDKAGFIKRQLVETRQITKHVAQILDSRMNTKYDENDKLIREVKVITLKSKLVSDFRKDFQFYKVREINNYHHAHDAYLNAVVGTALIKKYPKLESEFVYGDYKVYDVRKMIAKSEQEIGKATAKYFFYSNIMNFFKTEITLANGEIRKRPLIETNGETGEIVWDKGRDFATVRKVLSMPQVNIVKKTEVQTGGFSKESILPKRNSDKLIARKKDWDPKKYGGFDSPTVAYSVLVVAKVEKGKSKKLKSVKELLGITIMERSSFEKNPIDFLEAKGYKEVKKDLIIKLPKYSLFELENGRKRMLASAGELQKGNELALPSKYVNFLYLASHYEKLKGSPEDNEQKQLFVEQHKHYLDEIIEQISEFSKRVILADANLDKVLSAYNKHRDKPIREQAENIIHLFTLTNLGAPAAFKYFDTTIDRKRYTSTKEVLDATLIHQSITGLYETRIDLSQLGGDGGGGSGGWVQEISDSRPMLHIYLNGRRFLGLLNTGADKTCIAGRDWPANWPIHQTESSLQGLGMACGVARSSQPLRWQHEDKSGIIHPFVIPTLPFTLWGRDIMKDIKVRLMTDSPDDSQDLMIGAIESNLFADQISWKSDQPVWLNQWPLKQEKLQALQQLVTEQLQLGHLEESNSPWNTPVFVIKKKSGKWRLLQDLRAVNATMHDMGALQPGLPSPVAVPKGWEIIIIDLQDCFFNIKLHPEDCKRFAFSVPSPNFKRPYQRFQWKVLPQGMKNSPTLCQKFVDKAILTVRDKYQDSYIVHYMDDILLAHPSRSIVDEILTSMIQALNKHGLVVSTEKIQKYDNLKYLGTHIQGDSVSYQKLQIRTDKLRTLNDFQKLLGNINWIRPFLKLTTGELKPLFEILNGDSNPISTRKLTPEACKALQLMNERLSTARVKRLDLSQPWSLCILKTEYTPTACLWQDGVVEWIHLPHISPKVITPYDIFCTQLIIKGRHRSKELFSKDPDYIVVPYTKVQFDLLLQEKEDWPISLLGFLGEVHFHLPKDPLLTFTLQTAIIFPHMTSTTPLEKGIVIFTDGSANGRSVTYIQGREPIIKENTQNTAQQAEIVAVITAFEEVSQPFNLYTDSKYVTGLFPEIETATLSPRTKIYTELKHLQRLIHKRQEKFYIGHIRGHTGLPGPLAQGNAYADSLTRILTAGKRTADGSEFEKRTADGSEFESPKKKAKVE

SEQ ID NO: 3187 - protein, 2114 aa, synthetic construct
MPAAKRVKLDGGDKKYSIGLDIGTNSVGWAVITDEYKVPSKKFKVLGNTDRHSIKKNLIGALLFDSGETAEATRLKRTARRRYTRRKNRICYLQEIFSNEMAKVDDSFFHRLEESFLVEEDKKHERHPIFGNIVDEVAYHEKYPTIYHLRKKLVDSTDKADLRLIYLALAHMIKFRGHFLIEGDLNPDNSDVDKLFIQLVQTYNQLFEENPINASGVDAKAILSARLSKSRRLENLIAQLPGEKKNGLFGNLIALSLGLTPNFKSNFDLAEDAKLQLSKDTYDDDLDNLLAQIGDQYADLFLAAKNLSDAILLSDILRVNTEITKAPLSASMIKRYDEHHQDLTLLKALVRQQLPEKYKEIFFDQSKNGYAGYIDGGASQEEFYKFIKPILEKMDGTEELLVKLNREDLLRKQRTFDNGSIPHQIHLGELHAILRRQEDFYPFLKDNREKIEKILTFRIPYYVGPLARGNSRFAWMTRKSEETITPWNFEEVVDKGASAQSFIERMTNFDKNLPNEKVLPKHSLLYEYFTVYNELTKVKYVTEGMRKPAFLSGEQKKAIVDLLFKTNRKVTVKQLKEDYFKKIECFDSVEISGVEDRFNASLGTYHDLLKIIKDKDFLDNEENEDILEDIVLTLTLFEDREMIEERLKTYAHLFDDKVMKQLKRRRYTGWGRLSRKLINGIRDKQSGKTILDFLKSDGFANRNFMQLIHDDSLTFKEDIQKAQVSGQGDSLHEHIANLAGSPAIKKGILQTVKVVDELVKVMGRHKPENIVIEMARENQTTQKGQKNSRERMKRIEEGIKELGSQILKEHPVENTQLQNEKLYLYYLQNGRDMYVDQELDINRLSDYDVDHIVPQSFLKDDSIDNKVLTRSDKARGKSDNVPSEEVVKKMKNYWRQLLNAKLITQRKFDNLTKAERGGLSELDKAGFIKRQLVETRQITKHVAQILDSRMNTKYDENDKLIREVKVITLKSKLVSDFRKDFQFYKVREINNYHHAHDAYLNAVVGTALIKKYPKLESEFVYGDYKVYDVRKMIAKSEQEIGKATAKYFFYSNIMNFFKTEITLANGEIRKRPLIETNGETGEIVWDKGRDFATVRKVLSMPQVNIVKKTEVQTGGFSKESILPKRNSDKLIARKKDWDPKKYGGFDSPTVAYSVLVVAKVEKGKSKKLKSVKELLGITIMERSSFEKNPIDFLEAKGYKEVKKDLIIKLPKYSLFELENGRKRMLASAGELQKGNELALPSKYVNFLYLASHYEKLKGSPEDNEQKQLFVEQHKHYLDEIIEQISEFSKRVILADANLDKVLSAYNKHRDKPIREQAENIIHLFTLTNLGAPAAFKYFDTTIDRKRYTSTKEVLDATLIHQSITGLYETRIDLSQLGGDGGGSSPAPGGGGGWVQEISDSRPMLHIYLNGRRFLGLLNTGADKTCIAGRDWPANWPIHQTESSLQGLGMACGVARSSQPLRWQHEDKSGIIHPFVIPTLPFTLWGRDIMKDIKVRLMTDSPDDSQDLMIGAIESNLFADQISWKSDQPVWLNQWPLKQEKLQALQQLVTEQLQLGHLEESNSPWNTPVFVIKKKSGKWRLLQDLRAVNATMHDMGALQPGLPSPVAVPKGWEIIIIDLQDCFFNIKLHPEDCKRFAFSVPSPNFKRPYQRFQWKVLPQGMKNSPTLCQKFVDKAILTVRDKYQDSYIVHYMDDILLAHPSRSIVDEILTSMIQALNKHGLVVSTEKIQKYDNLKYLGTHIQGDSVSYQKLQIRTDKLRTLNDFQKLLGNINWIRPFLKLTTGELKPLFEILNGDSNPISTRKLTPEACKALQLMNERLSTARVKRLDLSQPWSLCILKTEYTPTACLWQDGVVEWIHLPHISPKVITPYDIFCTQLIIKGRHRSKELFSKDPDYIVVPYTKVQFDLLLQEKEDWPISLLGFLGEVHFHLPKDPLLTFTLQTAIIFPHMTSTTPLEKGIVIFTDGSANGRSVTYIQGREPIIKENTQNTAQQAEIVAVITAFEEVSQPFNLYTDSKYVTGLFPEIETATLSPRTKIYTELKHLQRLIHKRQEKFYIGHIRGHTGLPGPLAQGNAYADSLTRILTAGKRTADGSEFEKRTADGSEFESPKKKAKVE

SEQ ID NO: 3188 - protein, 2114 aa, synthetic construct
MPAAKRVKLDGGDKKYSIGLDIGTNSVGWAVITDEYKVPSKKFKVLGNTDRHSIKKNLIGALLFDSGETAEATRLKRTARRRYTRRKNRICYLQEIFSNEMAKVDDSFFHRLEESFLVEEDKKHERHPIFGNIVDEVAYHEKYPTIYHLRKKLVDSTDKADLRLIYLALAHMIKFRGHFLIEGDLNPDNSDVDKLFIQLVQTYNQLFEENPINASGVDAKAILSARLSKSRRLENLIAQLPGEKKNGLFGNLIALSLGLTPNFKSNFDLAEDAKLQLSKDTYDDDLDNLLAQIGDQYADLFLAAKNLSDAILLSDILRVNTEITKAPLSASMIKRYDEHHQDLTLLKALVRQQLPEKYKEIFFDQSKNGYAGYIDGGASQEEFYKFIKPILEKMDGTEELLVKLNREDLLRKQRTFDNGSIPHQIHLGELHAILRRQEDFYPFLKDNREKIEKILTFRIPYYVGPLARGNSRFAWMTRKSEETITPWNFEEVVDKGASAQSFIERMTNFDKNLPNEKVLPKHSLLYEYFTVYNELTKVKYVTEGMRKPAFLSGEQKKAIVDLLFKTNRKVTVKQLKEDYFKKIECFDSVEISGVEDRFNASLGTYHDLLKIIKDKDFLDNEENEDILEDIVLTLTLFEDREMIEERLKTYAHLFDDKVMKQLKRRRYTGWGRLSRKLINGIRDKQSGKTILDFLKSDGFANRNFMQLIHDDSLTFKEDIQKAQVSGQGDSLHEHIANLAGSPAIKKGILQTVKVVDELVKVMGRHKPENIVIEMARENQTTQKGQKNSRERMKRIEEGIKELGSQILKEHPVENTQLQNEKLYLYYLQNGRDMYVDQELDINRLSDYDVDHIVPQSFLKDDSIDNKVLTRSDKARGKSDNVPSEEVVKKMKNYWRQLLNAKLITQRKFDNLTKAERGGLSELDKAGFIKRQLVETRQITKHVAQILDSRMNTKYDENDKLIREVKVITLKSKLVSDFRKDFQFYKVREINNYHHAHDAYLNAVVGTALIKKYPKLESEFVYGDYKVYDVRKMIAKSEQEIGKATAKYFFYSNIMNFFKTEITLANGEIRKRPLIETNGETGEIVWDKGRDFATVRKVLSMPQVNIVKKTEVQTGGFSKESILPKRNSDKLIARKKDWDPKKYGGFDSPTVAYSVLVVAKVEKGKSKKLKSVKELLGITIMERSSFEKNPIDFLEAKGYKEVKKDLIIKLPKYSLFELENGRKRMLASAGELQKGNELALPSKYVNFLYLASHYEKLKGSPEDNEQKQLFVEQHKHYLDEIIEQISEFSKRVILADANLDKVLSAYNKHRDKPIREQAENIIHLFTLTNLGAPAAFKYFDTTIDRKRYTSTKEVLDATLIHQSITGLYETRIDLSQLGGDGGPAPGSSGGGGGWVQEISDSRPMLHIYLNGRRFLGLLNTGADKTCIAGRDWPANWPIHQTESSLQGLGMACGVARSSQPLRWQHEDKSGIIHPFVIPTLPFTLWGRDIMKDIKVRLMTDSPDDSQDLMIGAIESNLFADQISWKSDQPVWLNQWPLKQEKLQALQQLVTEQLQLGHLEESNSPWNTPVFVIKKKSGKWRLLQDLRAVNATMHDMGALQPGLPSPVAVPKGWEIIIIDLQDCFFNIKLHPEDCKRFAFSVPSPNFKRPYQRFQWKVLPQGMKNSPTLCQKFVDKAILTVRDKYQDSYIVHYMDDILLAHPSRSIVDEILTSMIQALNKHGLVVSTEKIQKYDNLKYLGTHIQGDSVSYQKLQIRTDKLRTLNDFQKLLGNINWIRPFLKLTTGELKPLFEILNGDSNPISTRKLTPEACKALQLMNERLSTARVKRLDLSQPWSLCILKTEYTPTACLWQDGVVEWIHLPHISPKVITPYDIFCTQLIIKGRHRSKELFSKDPDYIVVPYTKVQFDLLLQEKEDWPISLLGFLGEVHFHLPKDPLLTFTLQTAIIFPHMTSTTPLEKGIVIFTDGSANGRSVTYIQGREPIIKENTQNTAQQAEIVAVITAFEEVSQPFNLYTDSKYVTGLFPEIETATLSPRTKIYTELKHLQRLIHKRQEKFYIGHIRGHTGLPGPLAQGNAYADSLTRILTAGKRTADGSEFEKRTADGSEFESPKKKAKVE

SEQ ID NO: 3189 - protein, 2116 aa, synthetic construct
MPAAKRVKLDGGDKKYSIGLDIGTNSVGWAVITDEYKVPSKKFKVLGNTDRHSIKKNLIGALLFDSGETAEATRLKRTARRRYTRRKNRICYLQEIFSNEMAKVDDSFFHRLEESFLVEEDKKHERHPIFGNIVDEVAYHEKYPTIYHLRKKLVDSTDKADLRLIYLALAHMIKFRGHFLIEGDLNPDNSDVDKLFIQLVQTYNQLFEENPINASGVDAKAILSARLSKSRRLENLIAQLPGEKKNGLFGNLIALSLGLTPNFKSNFDLAEDAKLQLSKDTYDDDLDNLLAQIGDQYADLFLAAKNLSDAILLSDILRVNTEITKAPLSASMIKRYDEHHQDLTLLKALVRQQLPEKYKEIFFDQSKNGYAGYIDGGASQEEFYKFIKPILEKMDGTEELLVKLNREDLLRKQRTFDNGSIPHQIHLGELHAILRRQEDFYPFLKDNREKIEKILTFRIPYYVGPLARGNSRFAWMTRKSEETITPWNFEEVVDKGASAQSFIERMTNFDKNLPNEKVLPKHSLLYEYFTVYNELTKVKYVTEGMRKPAFLSGEQKKAIVDLLFKTNRKVTVKQLKEDYFKKIECFDSVEISGVEDRFNASLGTYHDLLKIIKDKDFLDNEENEDILEDIVLTLTLFEDREMIEERLKTYAHLFDDKVMKQLKRRRYTGWGRLSRKLINGIRDKQSGKTILDFLKSDGFANRNFMQLIHDDSLTFKEDIQKAQVSGQGDSLHEHIANLAGSPAIKKGILQTVKVVDELVKVMGRHKPENIVIEMARENQTTQKGQKNSRERMKRIEEGIKELGSQILKEHPVENTQLQNEKLYLYYLQNGRDMYVDQELDINRLSDYDVDHIVPQSFLKDDSIDNKVLTRSDKARGKSDNVPSEEVVKKMKNYWRQLLNAKLITQRKFDNLTKAERGGLSELDKAGFIKRQLVETRQITKHVAQILDSRMNTKYDENDKLIREVKVITLKSKLVSDFRKDFQFYKVREINNYHHAHDAYLNAVVGTALIKKYPKLESEFVYGDYKVYDVRKMIAKSEQEIGKATAKYFFYSNIMNFFKTEITLANGEIRKRPLIETNGETGEIVWDKGRDFATVRKVLSMPQVNIVKKTEVQTGGFSKESILPKRNSDKLIARKKDWDPKKYGGFDSPTVAYSVLVVAKVEKGKSKKLKSVKELLGITIMERSSFEKNPIDFLEAKGYKEVKKDLIIKLPKYSLFELENGRKRMLASAGELQKGNELALPSKYVNFLYLASHYEKLKGSPEDNEQKQLFVEQHKHYLDEIIEQISEFSKRVILADANLDKVLSAYNKHRDKPIREQAENIIHLFTLTNLGAPAAFKYFDTTIDRKRYTSTKEVLDATLIHQSITGLYETRIDLSQLGGDGGEAAAKGGSPAPGGWVQEISDSRPMLHIYLNGRRFLGLLNTGADKTCIAGRDWPANWPIHQTESSLQGLGMACGVARSSQPLRWQHEDKSGIIHPFVIPTLPFTLWGRDIMKDIKVRLMTDSPDDSQDLMIGAIESNLFADQISWKSDQPVWLNQWPLKQEKLQALQQLVTEQLQLGHLEESNSPWNTPVFVIKKKSGKWRLLQDLRAVNATMHDMGALQPGLPSPVAVPKGWEIIIIDLQDCFFNIKLHPEDCKRFAFSVPSPNFKRPYQRFQWKVLPQGMKNSPTLCQKFVDKAILTVRDKYQDSYIVHYMDDILLAHPSRSIVDEILTSMIQALNKHGLVVSTEKIQKYDNLKYLGTHIQGDSVSYQKLQIRTDKLRTLNDFQKLLGNINWIRPFLKLTTGELKPLFEILNGDSNPISTRKLTPEACKALQLMNERLSTARVKRLDLSQPWSLCILKTEYTPTACLWQDGVVEWIHLPHISPKVITPYDIFCTQLIIKGRHRSKELFSKDPDYIVVPYTKVQFDLLLQEKEDWPISLLGFLGEVHFHLPKDPLLTFTLQTAIIFPHMTSTTPLEKGIVIFTDGSANGRSVTYIQGREPIIKENTQNTAQQAEIVAVITAFEEVSQPFNLYTDSKYVTGLFPEIETATLSPRTKIYTELKHLQRLIHKRQEKFYIGHIRGHTGLPGPLAQGNAYADSLTRILTAGKRTADGSEFEKRTADGSEFESPKKKAKVE

SEQ ID NO: 3190 - protein, 2114 aa, synthetic construct
MPAAKRVKLDGGDKKYSIGLDIGTNSVGWAVITDEYKVPSKKFKVLGNTDRHSIKKNLIGALLFDSGETAEATRLKRTARRRYTRRKNRICYLQEIFSNEMAKVDDSFFHRLEESFLVEEDKKHERHPIFGNIVDEVAYHEKYPTIYHLRKKLVDSTDKADLRLIYLALAHMIKFRGHFLIEGDLNPDNSDVDKLFIQLVQTYNQLFEENPINASGVDAKAILSARLSKSRRLENLIAQLPGEKKNGLFGNLIALSLGLTPNFKSNFDLAEDAKLQLSKDTYDDDLDNLLAQIGDQYADLFLAAKNLSDAILLSDILRVNTEITKAPLSASMIKRYDEHHQDLTLLKALVRQQLPEKYKEIFFDQSKNGYAGYIDGGASQEEFYKFIKPILEKMDGTEELLVKLNREDLLRKQRTFDNGSIPHQIHLGELHAILRRQEDFYPFLKDNREKIEKILTFRIPYYVGPLARGNSRFAWMTRKSEETITPWNFEEVVDKGASAQSFIERMTNFDKNLPNEKVLPKHSLLYEYFTVYNELTKVKYVTEGMRKPAFLSGEQKKAIVDLLFKTNRKVTVKQLKEDYFKKIECFDSVEISGVEDRFNASLGTYHDLLKIIKDKDFLDNEENEDILEDIVLTLTLFEDREMIEERLKTYAHLFDDKVMKQLKRRRYTGWGRLSRKLINGIRDKQSGKTILDFLKSDGFANRNFMQLIHDDSLTFKEDIQKAQVSGQGDSLHEHIANLAGSPAIKKGILQTVKVVDELVKVMGRHKPENIVIEMARENQTTQKGQKNSRERMKRIEEGIKELGSQILKEHPVENTQLQNEKLYLYYLQNGRDMYVDQELDINRLSDYDVDHIVPQSFLKDDSIDNKVLTRSDKARGKSDNVPSEEVVKKMKNYWRQLLNAKLITQRKFDNLTKAERGGLSELDKAGFIKRQLVETRQITKHVAQILDSRMNTKYDENDKLIREVKVITLKSKLVSDFRKDFQFYKVREINNYHHAHDAYLNAVVGTALIKKYPKLESEFVYGDYKVYDVRKMIAKSEQEIGKATAKYFFYSNIMNFFKTEITLANGEIRKRPLIETNGETGEIVWDKGRDFATVRKVLSMPQVNIVKKTEVQTGGFSKESILPKRNSDKLIARKKDWDPKKYGGFDSPTVAYSVLVVAKVEKGKSKKLKSVKELLGITIMERSSFEKNPIDFLEAKGYKEVKKDLIIKLPKYSLFELENGRKRMLASAGELQKGNELALPSKYVNFLYLASHYEKLKGSPEDNEQKQLFVEQHKHYLDEIIEQISEFSKRVILADANLDKVLSAYNKHRDKPIREQAENIIHLFTLTNLGAPAAFKYFDTTIDRKRYTSTKEVLDATLIHQSITGLYETRIDLSQLGGDGGGSSGGSGGGGGWVQEISDSRPMLHIYLNGRRFLGLLNTGADKTCIAGRDWPANWPIHQTESSLQGLGMACGVARSSQPLRWQHEDKSGIIHPFVIPTLPFTLWGRDIMKDIKVRLMTDSPDDSQDLMIGAIESNLFADQISWKSDQPVWLNQWPLKQEKLQALQQLVTEQLQLGHLEESNSPWNTPVFVIKKKSGKWRLLQDLRAVNATMHDMGALQPGLPSPVAVPKGWEIIIIDLQDCFFNIKLHPEDCKRFAFSVPSPNFKRPYQRFQWKVLPQGMKNSPTLCQKFVDKAILTVRDKYQDSYIVHYMDDILLAHPSRSIVDEILTSMIQALNKHGLVVSTEKIQKYDNLKYLGTHIQGDSVSYQKLQIRTDKLRTLNDFQKLLGNINWIRPFLKLTTGELKPLFEILNGDSNPISTRKLTPEACKALQLMNERLSTARVKRLDLSQPWSLCILKTEYTPTACLWQDGVVEWIHLPHISPKVITPYDIFCTQLIIKGRHRSKELFSKDPDYIVVPYTKVQFDLLLQEKEDWPISLLGFLGEVHFHLPKDPLLTFTLQTAIIFPHMTSTTPLEKGIVIFTDGSANGRSVTYIQGREPIIKENTQNTAQQAEIVAVITAFEEVSQPFNLYTDSKYVTGLFPEIETATLSPRTKIYTELKHLQRLIHKRQEKFYIGHIRGHTGLPGPLAQGNAYADSLTRILTAGKRTADGSEFEKRTADGSEFESPKKKAKVE

SEQ ID NO: 3191 - protein, 2116 aa, synthetic construct
MPAAKRVKLDGGDKKYSIGLDIGTNSVGWAVITDEYKVPSKKFKVLGNTDRHSIKKNLIGALLFDSGETAEATRLKRTARRRYTRRKNRICYLQEIFSNEMAKVDDSFFHRLEESFLVEEDKKHERHPIFGNIVDEVAYHEKYPTIYHLRKKLVDSTDKADLRLIYLALAHMIKFRGHFLIEGDLNPDNSDVDKLFIQLVQTYNQLFEENPINASGVDAKAILSARLSKSRRLENLIAQLPGEKKNGLFGNLIALSLGLTPNFKSNFDLAEDAKLQLSKDTYDDDLDNLLAQIGDQYADLFLAAKNLSDAILLSDILRVNTEITKAPLSASMIKRYDEHHQDLTLLKALVRQQLPEKYKEIFFDQSKNGYAGYIDGGASQEEFYKFIKPILEKMDGTEELLVKLNREDLLRKQRTFDNGSIPHQIHLGELHAILRRQEDFYPFLKDNREKIEKILTFRIPYYVGPLARGNSRFAWMTRKSEETITPWNFEEVVDKGASAQSFIERMTNFDKNLPNEKVLPKHSLLYEYFTVYNELTKVKYVTEGMRKPAFLSGEQKKAIVDLLFKTNRKVTVKQLKEDYFKKIECFDSVEISGVEDRFNASLGTYHDLLKIIKDKDFLDNEENEDILEDIVLTLTLFEDREMIEERLKTYAHLFDDKVMKQLKRRRYTGWGRLSRKLINGIRDKQSGKTILDFLKSDGFANRNFMQLIHDDSLTFKEDIQKAQVSGQGDSLHEHIANLAGSPAIKKGILQTVKVVDELVKVMGRHKPENIVIEMARENQTTQKGQKNSRERMKRIEEGIKELGSQILKEHPVENTQLQNEKLYLYYLQNGRDMYVDQELDINRLSDYDVDHIVPQSFLKDDSIDNKVLTRSDKARGKSDNVPSEEVVKKMKNYWRQLLNAKLITQRKFDNLTKAERGGLSELDKAGFIKRQLVETRQITKHVAQILDSRMNTKYDENDKLIREVKVITLKSKLVSDFRKDFQFYKVREINNYHHAHDAYLNAVVGTALIKKYPKLESEFVYGDYKVYDVRKMIAKSEQEIGKATAKYFFYSNIMNFFKTEITLANGEIRKRPLIETNGETGEIVWDKGRDFATVRKVLSMPQVNIVKKTEVQTGGFSKESILPKRNSDKLIARKKDWDPKKYGGFDSPTVAYSVLVVAKVEKGKSKKLKSVKELLGITIMERSSFEKNPIDFLEAKGYKEVKKDLIIKLPKYSLFELENGRKRMLASAGELQKGNELALPSKYVNFLYLASHYEKLKGSPEDNEQKQLFVEQHKHYLDEIIEQISEFSKRVILADANLDKVLSAYNKHRDKPIREQAENIIHLFTLTNLGAPAAFKYFDTTIDRKRYTSTKEVLDATLIHQSITGLYETRIDLSQLGGDGGGGGEAAAKPAPGGWVQEISDSRPMLHIYLNGRRFLGLLNTGADKTCIAGRDWPANWPIHQTESSLQGLGMACGVARSSQPLRWQHEDKSGIIHPFVIPTLPFTLWGRDIMKDIKVRLMTDSPDDSQDLMIGAIESNLFADQISWKSDQPVWLNQWPLKQEKLQALQQLVTEQLQLGHLEESNSPWNTPVFVIKKKSGKWRLLQDLRAVNATMHDMGALQPGLPSPVAVPKGWEIIIIDLQDCFFNIKLHPEDCKRFAFSVPSPNFKRPYQRFQWKVLPQGMKNSPTLCQKFVDKAILTVRDKYQDSYIVHYMDDILLAHPSRSIVDEILTSMIQALNKHGLVVSTEKIQKYDNLKYLGTHIQGDSVSYQKLQIRTDKLRTLNDFQKLLGNINWIRPFLKLTTGELKPLFEILNGDSNPISTRKLTPEACKALQLMNERLSTARVKRLDLSQPWSLCILKTEYTPTACLWQDGVVEWIHLPHISPKVITPYDIFCTQLIIKGRHRSKELFSKDPDYIVVPYTKVQFDLLLQEKEDWPISLLGFLGEVHFHLPKDPLLTFTLQTAIIFPHMTSTTPLEKGIVIFTDGSANGRSVTYIQGREPIIKENTQNTAQQAEIVAVITAFEEVSQPFNLYTDSKYVTGLFPEIETATLSPRTKIYTELKHLQRLIHKRQEKFYIGHIRGHTGLPGPLAQGNAYADSLTRILTAGKRTADGSEFEKRTADGSEFESPKKKAKVE

SEQ ID NO: 3192 - protein, 2116 aa, synthetic construct
MPAAKRVKLDGGDKKYSIGLDIGTNSVGWAVITDEYKVPSKKFKVLGNTDRHSIKKNLIGALLFDSGETAEATRLKRTARRRYTRRKNRICYLQEIFSNEMAKVDDSFFHRLEESFLVEEDKKHERHPIFGNIVDEVAYHEKYPTIYHLRKKLVDSTDKADLRLIYLALAHMIKFRGHFLIEGDLNPDNSDVDKLFIQLVQTYNQLFEENPINASGVDAKAILSARLSKSRRLENLIAQLPGEKKNGLFGNLIALSLGLTPNFKSNFDLAEDAKLQLSKDTYDDDLDNLLAQIGDQYADLFLAAKNLSDAILLSDILRVNTEITKAPLSASMIKRYDEHHQDLTLLKALVRQQLPEKYKEIFFDQSKNGYAGYIDGGASQEEFYKFIKPILEKMDGTEELLVKLNREDLLRKQRTFDNGSIPHQIHLGELHAILRRQEDFYPFLKDNREKIEKILTFRIPYYVGPLARGNSRFAWMTRKSEETITPWNFEEVVDKGASAQSFIERMTNFDKNLPNEKVLPKHSLLYEYFTVYNELTKVKYVTEGMRKPAFLSGEQKKAIVDLLFKTNRKVTVKQLKEDYFKKIECFDSVEISGVEDRFNASLGTYHDLLKIIKDKDFLDNEENEDILEDIVLTLTLFEDREMIEERLKTYAHLFDDKVMKQLKRRRYTGWGRLSRKLINGIRDKQSGKTILDFLKSDGFANRNFMQLIHDDSLTFKEDIQKAQVSGQGDSLHEHIANLAGSPAIKKGILQTVKVVDELVKVMGRHKPENIVIEMARENQTTQKGQKNSRERMKRIEEGIKELGSQILKEHPVENTQLQNEKLYLYYLQNGRDMYVDQELDINRLSDYDVDHIVPQSFLKDDSIDNKVLTRSDKARGKSDNVPSEEVVKKMKNYWRQLLNAKLITQRKFDNLTKAERGGLSELDKAGFIKRQLVETRQITKHVAQILDSRMNTKYDENDKLIREVKVITLKSKLVSDFRKDFQFYKVREINNYHHAHDAYLNAVVGTALIKKYPKLESEFVYGDYKVYDVRKMIAKSEQEIGKATAKYFFYSNIMNFFKTEITLANGEIRKRPLIETNGETGEIVWDKGRDFATVRKVLSMPQVNIVKKTEVQTGGFSKESILPKRNSDKLIARKKDWDPKKYGGFDSPTVAYSVLVVAKVEKGKSKKLKSVKELLGITIMERSSFEKNPIDFLEAKGYKEVKKDLIIKLPKYSLFELENGRKRMLASAGELQKGNELALPSKYVNFLYLASHYEKLKGSPEDNEQKQLFVEQHKHYLDEIIEQISEFSKRVILADANLDKVLSAYNKHRDKPIREQAENIIHLFTLTNLGAPAAFKYFDTTIDRKRYTSTKEVLDATLIHQSITGLYETRIDLSQLGGDGGGSSEAAAKGGSGGWVQEISDSRPMLHIYLNGRRFLGLLNTGADKTCIAGRDWPANWPIHQTESSLQGLGMACGVARSSQPLRWQHEDKSGIIHPFVIPTLPFTLWGRDIMKDIKVRLMTDSPDDSQDLMIGAIESNLFADQISWKSDQPVWLNQWPLKQEKLQALQQLVTEQLQLGHLEESNSPWNTPVFVIKKKSGKWRLLQDLRAVNATMHDMGALQPGLPSPVAVPKGWEIIIIDLQDCFFNIKLHPEDCKRFAFSVPSPNFKRPYQRFQWKVLPQGMKNSPTLCQKFVDKAILTVRDKYQDSYIVHYMDDILLAHPSRSIVDEILTSMIQALNKHGLVVSTEKIQKYDNLKYLGTHIQGDSVSYQKLQIRTDKLRTLNDFQKLLGNINWIRPFLKLTTGELKPLFEILNGDSNPISTRKLTPEACKALQLMNERLSTARVKRLDLSQPWSLCILKTEYTPTACLWQDGVVEWIHLPHISPKVITPYDIFCTQLIIKGRHRSKELFSKDPDYIVVPYTKVQFDLLLQEKEDWPISLLGFLGEVHFHLPKDPLLTFTLQTAIIFPHMTSTTPLEKGIVIFTDGSANGRSVTYIQGREPIIKENTQNTAQQAEIVAVITAFEEVSQPFNLYTDSKYVTGLFPEIETATLSPRTKIYTELKHLQRLIHKRQEKFYIGHIRGHTGLPGPLAQGNAYADSLTRILTAGKRTADGSEFEKRTADGSEFESPKKKAKVE

SEQ ID NO: 3193 - protein, 2125 aa, synthetic construct
MPAAKRVKLDGGDKKYSIGLDIGTNSVGWAVITDEYKVPSKKFKVLGNTDRHSIKKNLIGALLFDSGETAEATRLKRTARRRYTRRKNRICYLQEIFSNEMAKVDDSFFHRLEESFLVEEDKKHERHPIFGNIVDEVAYHEKYPTIYHLRKKLVDSTDKADLRLIYLALAHMIKFRGHFLIEGDLNPDNSDVDKLFIQLVQTYNQLFEENPINASGVDAKAILSARLSKSRRLENLIAQLPGEKKNGLFGNLIALSLGLTPNFKSNFDLAEDAKLQLSKDTYDDDLDNLLAQIGDQYADLFLAAKNLSDAILLSDILRVNTEITKAPLSASMIKRYDEHHQDLTLLKALVRQQLPEKYKEIFFDQSKNGYAGYIDGGASQEEFYKFIKPILEKMDGTEELLVKLNREDLLRKQRTFDNGSIPHQIHLGELHAILRRQEDFYPFLKDNREKIEKILTFRIPYYVGPLARGNSRFAWMTRKSEETITPWNFEEVVDKGASAQSFIERMTNFDKNLPNEKVLPKHSLLYEYFTVYNELTKVKYVTEGMRKPAFLSGEQKKAIVDLLFKTNRKVTVKQLKEDYFKKIECFDSVEISGVEDRFNASLGTYHDLLKIIKDKDFLDNEENEDILEDIVLTLTLFEDREMIEERLKTYAHLFDDKVMKQLKRRRYTGWGRLSRKLINGIRDKQSGKTILDFLKSDGFANRNFMQLIHDDSLTFKEDIQKAQVSGQGDSLHEHIANLAGSPAIKKGILQTVKVVDELVKVMGRHKPENIVIEMARENQTTQKGQKNSRERMKRIEEGIKELGSQILKEHPVENTQLQNEKLYLYYLQNGRDMYVDQELDINRLSDYDVDHIVPQSFLKDDSIDNKVLTRSDKARGKSDNVPSEEVVKKMKNYWRQLLNAKLITQRKFDNLTKAERGGLSELDKAGFIKRQLVETRQITKHVAQILDSRMNTKYDENDKLIREVKVITLKSKLVSDFRKDFQFYKVREINNYHHAHDAYLNAVVGTALIKKYPKLESEFVYGDYKVYDVRKMIAKSEQEIGKATAKYFFYSNIMNFFKTEITLANGEIRKRPLIETNGETGEIVWDKGRDFATVRKVLSMPQVNIVKKTEVQTGGFSKESILPKRNSDKLIARKKDWDPKKYGGFDSPTVAYSVLVVAKVEKGKSKKLKSVKELLGITIMERSSFEKNPIDFLEAKGYKEVKKDLIIKLPKYSLFELENGRKRMLASAGELQKGNELALPSKYVNFLYLASHYEKLKGSPEDNEQKQLFVEQHKHYLDEIIEQISEFSKRVILADANLDKVLSAYNKHRDKPIREQAENIIHLFTLTNLGAPAAFKYFDTTIDRKRYTSTKEVLDATLIHQSITGLYETRIDLSQLGGDGGGGGGSGGGGSGGGGSGGGGSGGWVQEISDSRPMLHIYLNGRRFLGLLNTGADKTCIAGRDWPANWPIHQTESSLQGLGMACGVARSSQPLRWQHEDKSGIIHPFVIPTLPFTLWGRDIMKDIKVRLMTDSPDDSQDLMIGAIESNLFADQISWKSDQPVWLNQWPLKQEKLQALQQLVTEQLQLGHLEESNSPWNTPVFVIKKKSGKWRLLQDLRAVNATMHDMGALQPGLPSPVAVPKGWEIIIIDLQDCFFNIKLHPEDCKRFAFSVPSPNFKRPYQRFQWKVLPQGMKNSPTLCQKFVDKAILTVRDKYQDSYIVHYMDDILLAHPSRSIVDEILTSMIQALNKHGLVVSTEKIQKYDNLKYLGTHIQGDSVSYQKLQIRTDKLRTLNDFQKLLGNINWIRPFLKLTTGELKPLFEILNGDSNPISTRKLTPEACKALQLMNERLSTARVKRLDLSQPWSLCILKTEYTPTACLWQDGVVEWIHLPHISPKVITPYDIFCTQLIIKGRHRSKELFSKDPDYIVVPYTKVQFDLLLQEKEDWPISLLGFLGEVHFHLPKDPLLTFTLQTAIIFPHMTSTTPLEKGIVIFTDGSANGRSVTYIQGREPIIKENTQNTAQQAEIVAVITAFEEVSQPFNLYTDSKYVTGLFPEIETATLSPRTKIYTELKHLQRLIHKRQEKFYIGHIRGHTGLPGPLAQGNAYADSLTRILTAGKRTADGSEFEKRTADGSEFESPKKKAKVE

SEQ ID NO: 3194 - protein, 2115 aa, synthetic construct
MPAAKRVKLDGGDKKYSIGLDIGTNSVGWAVITDEYKVPSKKFKVLGNTDRHSIKKNLIGALLFDSGETAEATRLKRTARRRYTRRKNRICYLQEIFSNEMAKVDDSFFHRLEESFLVEEDKKHERHPIFGNIVDEVAYHEKYPTIYHLRKKLVDSTDKADLRLIYLALAHMIKFRGHFLIEGDLNPDNSDVDKLFIQLVQTYNQLFEENPINASGVDAKAILSARLSKSRRLENLIAQLPGEKKNGLFGNLIALSLGLTPNFKSNFDLAEDAKLQLSKDTYDDDLDNLLAQIGDQYADLFLAAKNLSDAILLSDILRVNTEITKAPLSASMIKRYDEHHQDLTLLKALVRQQLPEKYKEIFFDQSKNGYAGYIDGGASQEEFYKFIKPILEKMDGTEELLVKLNREDLLRKQRTFDNGSIPHQIHLGELHAILRRQEDFYPFLKDNREKIEKILTFRIPYYVGPLARGNSRFAWMTRKSEETITPWNFEEVVDKGASAQSFIERMTNFDKNLPNEKVLPKHSLLYEYFTVYNELTKVKYVTEGMRKPAFLSGEQKKAIVDLLFKTNRKVTVKQLKEDYFKKIECFDSVEISGVEDRFNASLGTYHDLLKIIKDKDFLDNEENEDILEDIVLTLTLFEDREMIEERLKTYAHLFDDKVMKQLKRRRYTGWGRLSRKLINGIRDKQSGKTILDFLKSDGFANRNFMQLIHDDSLTFKEDIQKAQVSGQGDSLHEHIANLAGSPAIKKGILQTVKVVDELVKVMGRHKPENIVIEMARENQTTQKGQKNSRERMKRIEEGIKELGSQILKEHPVENTQLQNEKLYLYYLQNGRDMYVDQELDINRLSDYDVDHIVPQSFLKDDSIDNKVLTRSDKARGKSDNVPSEEVVKKMKNYWRQLLNAKLITQRKFDNLTKAERGGLSELDKAGFIKRQLVETRQITKHVAQILDSRMNTKYDENDKLIREVKVITLKSKLVSDFRKDFQFYKVREINNYHHAHDAYLNAVVGTALIKKYPKLESEFVYGDYKVYDVRKMIAKSEQEIGKATAKYFFYSNIMNFFKTEITLANGEIRKRPLIETNGETGEIVWDKGRDFATVRKVLSMPQVNIVKKTEVQTGGFSKESILPKRNSDKLIARKKDWDPKKYGGFDSPTVAYSVLVVAKVEKGKSKKLKSVKELLGITIMERSSFEKNPIDFLEAKGYKEVKKDLIIKLPKYSLFELENGRKRMLASAGELQKGNELALPSKYVNFLYLASHYEKLKGSPEDNEQKQLFVEQHKHYLDEIIEQISEFSKRVILADANLDKVLSAYNKHRDKPIREQAENIIHLFTLTNLGAPAAFKYFDTTIDRKRYTSTKEVLDATLIHQSITGLYETRIDLSQLGGDGGGGGGSGGGGSGGWVQEISDSRPMLHIYLNGRRFLGLLNTGADKTCIAGRDWPANWPIHQTESSLQGLGMACGVARSSQPLRWQHEDKSGIIHPFVIPTLPFTLWGRDIMKDIKVRLMTDSPDDSQDLMIGAIESNLFADQISWKSDQPVWLNQWPLKQEKLQALQQLVTEQLQLGHLEESNSPWNTPVFVIKKKSGKWRLLQDLRAVNATMHDMGALQPGLPSPVAVPKGWEIIIIDLQDCFFNIKLHPEDCKRFAFSVPSPNFKRPYQRFQWKVLPQGMKNSPTLCQKFVDKAILTVRDKYQDSYIVHYMDDILLAHPSRSIVDEILTSMIQALNKHGLVVSTEKIQKYDNLKYLGTHIQGDSVSYQKLQIRTDKLRTLNDFQKLLGNINWIRPFLKLTTGELKPLFEILNGDSNPISTRKLTPEACKALQLMNERLSTARVKRLDLSQPWSLCILKTEYTPTACLWQDGVVEWIHLPHISPKVITPYDIFCTQLIIKGRHRSKELFSKDPDYIVVPYTKVQFDLLLQEKEDWPISLLGFLGEVHFHLPKDPLLTFTLQTAIIFPHMTSTTPLEKGIVIFTDGSANGRSVTYIQGREPIIKENTQNTAQQAEIVAVITAFEEVSQPFNLYTDSKYVTGLFPEIETATLSPRTKIYTELKHLQRLIHKRQEKFYIGHIRGHTGLPGPLAQGNAYADSLTRILTAGKRTADGSEFEKRTADGSEFESPKKKAKVE

SEQ ID NO: 3195 - protein, 2114 aa, synthetic construct
MPAAKRVKLDGGDKKYSIGLDIGTNSVGWAVITDEYKVPSKKFKVLGNTDRHSIKKNLIGALLFDSGETAEATRLKRTARRRYTRRKNRICYLQEIFSNEMAKVDDSFFHRLEESFLVEEDKKHERHPIFGNIVDEVAYHEKYPTIYHLRKKLVDSTDKADLRLIYLALAHMIKFRGHFLIEGDLNPDNSDVDKLFIQLVQTYNQLFEENPINASGVDAKAILSARLSKSRRLENLIAQLPGEKKNGLFGNLIALSLGLTPNFKSNFDLAEDAKLQLSKDTYDDDLDNLLAQIGDQYADLFLAAKNLSDAILLSDILRVNTEITKAPLSASMIKRYDEHHQDLTLLKALVRQQLPEKYKEIFFDQSKNGYAGYIDGGASQEEFYKFIKPILEKMDGTEELLVKLNREDLLRKQRTFDNGSIPHQIHLGELHAILRRQEDFYPFLKDNREKIEKILTFRIPYYVGPLARGNSRFAWMTRKSEETITPWNFEEVVDKGASAQSFIERMTNFDKNLPNEKVLPKHSLLYEYFTVYNELTKVKYVTEGMRKPAFLSGEQKKAIVDLLFKTNRKVTVKQLKEDYFKKIECFDSVEISGVEDRFNASLGTYHDLLKIIKDKDFLDNEENEDILEDIVLTLTLFEDREMIEERLKTYAHLFDDKVMKQLKRRRYTGWGRLSRKLINGIRDKQSGKTILDFLKSDGFANRNFMQLIHDDSLTFKEDIQKAQVSGQGDSLHEHIANLAGSPAIKKGILQTVKVVDELVKVMGRHKPENIVIEMARENQTTQKGQKNSRERMKRIEEGIKELGSQILKEHPVENTQLQNEKLYLYYLQNGRDMYVDQELDINRLSDYDVDHIVPQSFLKDDSIDNKVLTRSDKARGKSDNVPSEEVVKKMKNYWRQLLNAKLITQRKFDNLTKAERGGLSELDKAGFIKRQLVETRQITKHVAQILDSRMNTKYDENDKLIREVKVITLKSKLVSDFRKDFQFYKVREINNYHHAHDAYLNAVVGTALIKKYPKLESEFVYGDYKVYDVRKMIAKSEQEIGKATAKYFFYSNIMNFFKTEITLANGEIRKRPLIETNGETGEIVWDKGRDFATVRKVLSMPQVNIVKKTEVQTGGFSKESILPKRNSDKLIARKKDWDPKKYGGFDSPTVAYSVLVVAKVEKGKSKKLKSVKELLGITIMERSSFEKNPIDFLEAKGYKEVKKDLIIKLPKYSLFELENGRKRMLASAGELQKGNELALPSKYVNFLYLASHYEKLKGSPEDNEQKQLFVEQHKHYLDEIIEQISEFSKRVILADANLDKVLSAYNKHRDKPIREQAENIIHLFTLTNLGAPAAFKYFDTTIDRKRYTSTKEVLDATLIHQSITGLYETRIDLSQLGGDGGPAPGGGGSSGGWVQEISDSRPMLHIYLNGRRFLGLLNTGADKTCIAGRDWPANWPIHQTESSLQGLGMACGVARSSQPLRWQHEDKSGIIHPFVIPTLPFTLWGRDIMKDIKVRLMTDSPDDSQDLMIGAIESNLFADQISWKSDQPVWLNQWPLKQEKLQALQQLVTEQLQLGHLEESNSPWNTPVFVIKKKSGKWRLLQDLRAVNATMHDMGALQPGLPSPVAVPKGWEIIIIDLQDCFFNIKLHPEDCKRFAFSVPSPNFKRPYQRFQWKVLPQGMKNSPTLCQKFVDKAILTVRDKYQDSYIVHYMDDILLAHPSRSIVDEILTSMIQALNKHGLVVSTEKIQKYDNLKYLGTHIQGDSVSYQKLQIRTDKLRTLNDFQKLLGNINWIRPFLKLTTGELKPLFEILNGDSNPISTRKLTPEACKALQLMNERLSTARVKRLDLSQPWSLCILKTEYTPTACLWQDGVVEWIHLPHISPKVITPYDIFCTQLIIKGRHRSKELFSKDPDYIVVPYTKVQFDLLLQEKEDWPISLLGFLGEVHFHLPKDPLLTFTLQTAIIFPHMTSTTPLEKGIVIFTDGSANGRSVTYIQGREPIIKENTQNTAQQAEIVAVITAFEEVSQPFNLYTDSKYVTGLFPEIETATLSPRTKIYTELKHLQRLIHKRQEKFYIGHIRGHTGLPGPLAQGNAYADSLTRILTAGKRTADGSEFEKRTADGSEFESPKKKAKVE

SEQ ID NO: 3196 - protein, 2024 aa, synthetic construct
MPAAKRVKLDGGDKKYSIGLDIGTNSVGWAVITDEYKVPSKKFKVLGNTDRHSIKKNLIGALLFDSGETAEATRLKRTARRRYTRRKNRICYLQEIFSNEMAKVDDSFFHRLEESFLVEEDKKHERHPIFGNIVDEVAYHEKYPTIYHLRKKLVDSTDKADLRLIYLALAHMIKFRGHFLIEGDLNPDNSDVDKLFIQLVQTYNQLFEENPINASGVDAKAILSARLSKSRRLENLIAQLPGEKKNGLFGNLIALSLGLTPNFKSNFDLAEDAKLQLSKDTYDDDLDNLLAQIGDQYADLFLAAKNLSDAILLSDILRVNTEITKAPLSASMIKRYDEHHQDLTLLKALVRQQLPEKYKEIFFDQSKNGYAGYIDGGASQEEFYKFIKPILEKMDGTEELLVKLNREDLLRKQRTFDNGSIPHQIHLGELHAILRRQEDFYPFLKDNREKIEKILTFRIPYYVGPLARGNSRFAWMTRKSEETITPWNFEEVVDKGASAQSFIERMTNFDKNLPNEKVLPKHSLLYEYFTVYNELTKVKYVTEGMRKPAFLSGEQKKAIVDLLFKTNRKVTVKQLKEDYFKKIECFDSVEISGVEDRFNASLGTYHDLLKIIKDKDFLDNEENEDILEDIVLTLTLFEDREMIEERLKTYAHLFDDKVMKQLKRRRYTGWGRLSRKLINGIRDKQSGKTILDFLKSDGFANRNFMQLIHDDSLTFKEDIQKAQVSGQGDSLHEHIANLAGSPAIKKGILQTVKVVDELVKVMGRHKPENIVIEMARENQTTQKGQKNSRERMKRIEEGIKELGSQILKEHPVENTQLQNEKLYLYYLQNGRDMYVDQELDINRLSDYDVDHIVPQSFLKDDSIDNKVLTRSDKARGKSDNVPSEEVVKKMKNYWRQLLNAKLITQRKFDNLTKAERGGLSELDKAGFIKRQLVETRQITKHVAQILDSRMNTKYDENDKLIREVKVITLKSKLVSDFRKDFQFYKVREINNYHHAHDAYLNAVVGTALIKKYPKLESEFVYGDYKVYDVRKMIAKSEQEIGKATAKYFFYSNIMNFFKTEITLANGEIRKRPLIETNGETGEIVWDKGRDFATVRKVLSMPQVNIVKKTEVQTGGFSKESILPKRNSDKLIARKKDWDPKKYGGFDSPTVAYSVLVVAKVEKGKSKKLKSVKELLGITIMERSSFEKNPIDFLEAKGYKEVKKDLIIKLPKYSLFELENGRKRMLASAGELQKGNELALPSKYVNFLYLASHYEKLKGSPEDNEQKQLFVEQHKHYLDEIIEQISEFSKRVILADANLDKVLSAYNKHRDKPIREQAENIIHLFTLTNLGAPAAFKYFDTTIDRKRYTSTKEVLDATLIHQSITGLYETRIDLSQLGGDGGGGGPAPEAAAKGGGRDIMKDIKVRLMTDSPDDSQDLMIGAIESNLFADQISWKSDQPVWLNQWPLKQEKLQALQQLVTEQLQLGHLEESNSPWNTPVFVIKKKSGKWRLLQDLRAVNATMHDMGALQPGLPSPVAVPKGWEIIIIDLQDCFFNIKLHPEDCKRFAFSVPSPNFKRPYQRFQWKVLPQGMKNSPTLCQKFVDKAILTVRDKYQDSYIVHYMDDILLAHPSRSIVDEILTSMIQALNKHGLVVSTEKIQKYDNLKYLGTHIQGDSVSYQKLQIRTDKLRTLNDFQKLLGNINWIRPFLKLTTGELKPLFEILNGDSNPISTRKLTPEACKALQLMNERLSTARVKRLDLSQPWSLCILKTEYTPTACLWQDGVVEWIHLPHISPKVITPYDIFCTQLIIKGRHRSKELFSKDPDYIVVPYTKVQFDLLLQEKEDWPISLLGFLGEVHFHLPKDPLLTFTLQTAIIFPHMTSTTPLEKGIVIFTDGSANGRSVTYIQGREPIIKENTQNTAQQAEIVAVITAFEEVSQPFNLYTDSKYVTGLFPEIETATLSPRTKIYTELKHLQRLIHKRQEKFYIGHIRGHTGLPGPLAQGNAYADSLTRILTAGKRTADGSEFEKRTADGSEFESPKKKAKVE

SEQ ID NO: 3197 - protein, 2059 aa, synthetic construct
MPAAKRVKLDGGDKKYSIGLDIGTNSVGWAVITDEYKVPSKKFKVLGNTDRHSIKKNLIGALLFDSGETAEATRLKRTARRRYTRRKNRICYLQEIFSNEMAKVDDSFFHRLEESFLVEEDKKHERHPIFGNIVDEVAYHEKYPTIYHLRKKLVDSTDKADLRLIYLALAHMIKFRGHFLIEGDLNPDNSDVDKLFIQLVQTYNQLFEENPINASGVDAKAILSARLSKSRRLENLIAQLPGEKKNGLFGNLIALSLGLTPNFKSNFDLAEDAKLQLSKDTYDDDLDNLLAQIGDQYADLFLAAKNLSDAILLSDILRVNTEITKAPLSASMIKRYDEHHQDLTLLKALVRQQLPEKYKEIFFDQSKNGYAGYIDGGASQEEFYKFIKPILEKMDGTEELLVKLNREDLLRKQRTFDNGSIPHQIHLGELHAILRRQEDFYPFLKDNREKIEKILTFRIPYYVGPLARGNSRFAWMTRKSEETITPWNFEEVVDKGASAQSFIERMTNFDKNLPNEKVLPKHSLLYEYFTVYNELTKVKYVTEGMRKPAFLSGEQKKAIVDLLFKTNRKVTVKQLKEDYFKKIECFDSVEISGVEDRFNASLGTYHDLLKIIKDKDFLDNEENEDILEDIVLTLTLFEDREMIEERLKTYAHLFDDKVMKQLKRRRYTGWGRLSRKLINGIRDKQSGKTILDFLKSDGFANRNFMQLIHDDSLTFKEDIQKAQVSGQGDSLHEHIANLAGSPAIKKGILQTVKVVDELVKVMGRHKPENIVIEMARENQTTQKGQKNSRERMKRIEEGIKELGSQILKEHPVENTQLQNEKLYLYYLQNGRDMYVDQELDINRLSDYDVDHIVPQSFLKDDSIDNKVLTRSDKARGKSDNVPSEEVVKKMKNYWRQLLNAKLITQRKFDNLTKAERGGLSELDKAGFIKRQLVETRQITKHVAQILDSRMNTKYDENDKLIREVKVITLKSKLVSDFRKDFQFYKVREINNYHHAHDAYLNAVVGTALIKKYPKLESEFVYGDYKVYDVRKMIAKSEQEIGKATAKYFFYSNIMNFFKTEITLANGEIRKRPLIETNGETGEIVWDKGRDFATVRKVLSMPQVNIVKKTEVQTGGFSKESILPKRNSDKLIARKKDWDPKKYGGFDSPTVAYSVLVVAKVEKGKSKKLKSVKELLGITIMERSSFEKNPIDFLEAKGYKEVKKDLIIKLPKYSLFELENGRKRMLASAGELQKGNELALPSKYVNFLYLASHYEKLKGSPEDNEQKQLFVEQHKHYLDEIIEQISEFSKRVILADANLDKVLSAYNKHRDKPIREQAENIIHLFTLTNLGAPAAFKYFDTTIDRKRYTSTKEVLDATLIHQSITGLYETRIDLSQLGGDGGAEAAAKEAAAKEAAAKEAAAKALEAEAAAKEAAAKEAAAKEAAAKAGGGRDIMKDIKVRLMTDSPDDSQDLMIGAIESNLFADQISWKSDQPVWLNQWPLKQEKLQALQQLVTEQLQLGHLEESNSPWNTPVFVIKKKSGKWRLLQDLRAVNATMHDMGALQPGLPSPVAVPKGWEIIIIDLQDCFFNIKLHPEDCKRFAFSVPSPNFKRPYQRFQWKVLPQGMKNSPTLCQKFVDKAILTVRDKYQDSYIVHYMDDILLAHPSRSIVDEILTSMIQALNKHGLVVSTEKIQKYDNLKYLGTHIQGDSVSYQKLQIRTDKLRTLNDFQKLLGNINWIRPFLKLTTGELKPLFEILNGDSNPISTRKLTPEACKALQLMNERLSTARVKRLDLSQPWSLCILKTEYTPTACLWQDGVVEWIHLPHISPKVITPYDIFCTQLIIKGRHRSKELFSKDPDYIVVPYTKVQFDLLLQEKEDWPISLLGFLGEVHFHLPKDPLLTFTLQTAIIFPHMTSTTPLEKGIVIFTDGSANGRSVTYIQGREPIIKENTQNTAQQAEIVAVITAFEEVSQPFNLYTDSKYVTGLFPEIETATLSPRTKIYTELKHLQRLIHKRQEKFYIGHIRGHTGLPGPLAQGNAYADSLTRILTAGKRTADGSEFEKRTADGSEFESPKKKAKVE

SEQ ID NO: 3198 - protein, 2024 aa, synthetic construct
MPAAKRVKLDGGDKKYSIGLDIGTNSVGWAVITDEYKVPSKKFKVLGNTDRHSIKKNLIGALLFDSGETAEATRLKRTARRRYTRRKNRICYLQEIFSNEMAKVDDSFFHRLEESFLVEEDKKHERHPIFGNIVDEVAYHEKYPTIYHLRKKLVDSTDKADLRLIYLALAHMIKFRGHFLIEGDLNPDNSDVDKLFIQLVQTYNQLFEENPINASGVDAKAILSARLSKSRRLENLIAQLPGEKKNGLFGNLIALSLGLTPNFKSNFDLAEDAKLQLSKDTYDDDLDNLLAQIGDQYADLFLAAKNLSDAILLSDILRVNTEITKAPLSASMIKRYDEHHQDLTLLKALVRQQLPEKYKEIFFDQSKNGYAGYIDGGASQEEFYKFIKPILEKMDGTEELLVKLNREDLLRKQRTFDNGSIPHQIHLGELHAILRRQEDFYPFLKDNREKIEKILTFRIPYYVGPLARGNSRFAWMTRKSEETITPWNFEEVVDKGASAQSFIERMTNFDKNLPNEKVLPKHSLLYEYFTVYNELTKVKYVTEGMRKPAFLSGEQKKAIVDLLFKTNRKVTVKQLKEDYFKKIECFDSVEISGVEDRFNASLGTYHDLLKIIKDKDFLDNEENEDILEDIVLTLTLFEDREMIEERLKTYAHLFDDKVMKQLKRRRYTGWGRLSRKLINGIRDKQSGKTILDFLKSDGFANRNFMQLIHDDSLTFKEDIQKAQVSGQGDSLHEHIANLAGSPAIKKGILQTVKVVDELVKVMGRHKPENIVIEMARENQTTQKGQKNSRERMKRIEEGIKELGSQILKEHPVENTQLQNEKLYLYYLQNGRDMYVDQELDINRLSDYDVDHIVPQSFLKDDSIDNKVLTRSDKARGKSDNVPSEEVVKKMKNYWRQLLNAKLITQRKFDNLTKAERGGLSELDKAGFIKRQLVETRQITKHVAQILDSRMNTKYDENDKLIREVKVITLKSKLVSDFRKDFQFYKVREINNYHHAHDAYLNAVVGTALIKKYPKLESEFVYGDYKVYDVRKMIAKSEQEIGKATAKYFFYSNIMNFFKTEITLANGEIRKRPLIETNGETGEIVWDKGRDFATVRKVLSMPQVNIVKKTEVQTGGFSKESILPKRNSDKLIARKKDWDPKKYGGFDSPTVAYSVLVVAKVEKGKSKKLKSVKELLGITIMERSSFEKNPIDFLEAKGYKEVKKDLIIKLPKYSLFELENGRKRMLASAGELQKGNELALPSKYVNFLYLASHYEKLKGSPEDNEQKQLFVEQHKHYLDEIIEQISEFSKRVILADANLDKVLSAYNKHRDKPIREQAENIIHLFTLTNLGAPAAFKYFDTTIDRKRYTSTKEVLDATLIHQSITGLYETRIDLSQLGGDGGPAPGSSEAAAKGGGRDIMKDIKVRLMTDSPDDSQDLMIGAIESNLFADQISWKSDQPVWLNQWPLKQEKLQALQQLVTEQLQLGHLEESNSPWNTPVFVIKKKSGKWRLLQDLRAVNATMHDMGALQPGLPSPVAVPKGWEIIIIDLQDCFFNIKLHPEDCKRFAFSVPSPNFKRPYQRFQWKVLPQGMKNSPTLCQKFVDKAILTVRDKYQDSYIVHYMDDILLAHPSRSIVDEILTSMIQALNKHGLVVSTEKIQKYDNLKYLGTHIQGDSVSYQKLQIRTDKLRTLNDFQKLLGNINWIRPFLKLTTGELKPLFEILNGDSNPISTRKLTPEACKALQLMNERLSTARVKRLDLSQPWSLCILKTEYTPTACLWQDGVVEWIHLPHISPKVITPYDIFCTQLIIKGRHRSKELFSKDPDYIVVPYTKVQFDLLLQEKEDWPISLLGFLGEVHFHLPKDPLLTFTLQTAIIFPHMTSTTPLEKGIVIFTDGSANGRSVTYIQGREPIIKENTQNTAQQAEIVAVITAFEEVSQPFNLYTDSKYVTGLFPEIETATLSPRTKIYTELKHLQRLIHKRQEKFYIGHIRGHTGLPGPLAQGNAYADSLTRILTAGKRTADGSEFEKRTADGSEFESPKKKAKVE

SEQ ID NO: 3199 - protein, 2022 aa, synthetic construct
MPAAKRVKLDGGDKKYSIGLDIGTNSVGWAVITDEYKVPSKKFKVLGNTDRHSIKKNLIGALLFDSGETAEATRLKRTARRRYTRRKNRICYLQEIFSNEMAKVDDSFFHRLEESFLVEEDKKHERHPIFGNIVDEVAYHEKYPTIYHLRKKLVDSTDKADLRLIYLALAHMIKFRGHFLIEGDLNPDNSDVDKLFIQLVQTYNQLFEENPINASGVDAKAILSARLSKSRRLENLIAQLPGEKKNGLFGNLIALSLGLTPNFKSNFDLAEDAKLQLSKDTYDDDLDNLLAQIGDQYADLFLAAKNLSDAILLSDILRVNTEITKAPLSASMIKRYDEHHQDLTLLKALVRQQLPEKYKEIFFDQSKNGYAGYIDGGASQEEFYKFIKPILEKMDGTEELLVKLNREDLLRKQRTFDNGSIPHQIHLGELHAILRRQEDFYPFLKDNREKIEKILTFRIPYYVGPLARGNSRFAWMTRKSEETITPWNFEEVVDKGASAQSFIERMTNFDKNLPNEKVLPKHSLLYEYFTVYNELTKVKYVTEGMRKPAFLSGEQKKAIVDLLFKTNRKVTVKQLKEDYFKKIECFDSVEISGVEDRFNASLGTYHDLLKIIKDKDFLDNEENEDILEDIVLTLTLFEDREMIEERLKTYAHLFDDKVMKQLKRRRYTGWGRLSRKLINGIRDKQSGKTILDFLKSDGFANRNFMQLIHDDSLTFKEDIQKAQVSGQGDSLHEHIANLAGSPAIKKGILQTVKVVDELVKVMGRHKPENIVIEMARENQTTQKGQKNSRERMKRIEEGIKELGSQILKEHPVENTQLQNEKLYLYYLQNGRDMYVDQELDINRLSDYDVDHIVPQSFLKDDSIDNKVLTRSDKARGKSDNVPSEEVVKKMKNYWRQLLNAKLITQRKFDNLTKAERGGLSELDKAGFIKRQLVETRQITKHVAQILDSRMNTKYDENDKLIREVKVITLKSKLVSDFRKDFQFYKVREINNYHHAHDAYLNAVVGTALIKKYPKLESEFVYGDYKVYDVRKMIAKSEQEIGKATAKYFFYSNIMNFFKTEITLANGEIRKRPLIETNGETGEIVWDKGRDFATVRKVLSMPQVNIVKKTEVQTGGFSKESILPKRNSDKLIARKKDWDPKKYGGFDSPTVAYSVLVVAKVEKGKSKKLKSVKELLGITIMERSSFEKNPIDFLEAKGYKEVKKDLIIKLPKYSLFELENGRKRMLASAGELQKGNELALPSKYVNFLYLASHYEKLKGSPEDNEQKQLFVEQHKHYLDEIIEQISEFSKRVILADANLDKVLSAYNKHRDKPIREQAENIIHLFTLTNLGAPAAFKYFDTTIDRKRYTSTKEVLDATLIHQSITGLYETRIDLSQLGGDGGGGSGGGGSSGGGRDIMKDIKVRLMTDSPDDSQDLMIGAIESNLFADQISWKSDQPVWLNQWPLKQEKLQALQQLVTEQLQLGHLEESNSPWNTPVFVIKKKSGKWRLLQDLRAVNATMHDMGALQPGLPSPVAVPKGWEIIIIDLQDCFFNIKLHPEDCKRFAFSVPSPNFKRPYQRFQWKVLPQGMKNSPTLCQKFVDKAILTVRDKYQDSYIVHYMDDILLAHPSRSIVDEILTSMIQALNKHGLVVSTEKIQKYDNLKYLGTHIQGDSVSYQKLQIRTDKLRTLNDFQKLLGNINWIRPFLKLTTGELKPLFEILNGDSNPISTRKLTPEACKALQLMNERLSTARVKRLDLSQPWSLCILKTEYTPTACLWQDGVVEWIHLPHISPKVITPYDIFCTQLIIKGRHRSKELFSKDPDYIVVPYTKVQFDLLLQEKEDWPISLLGFLGEVHFHLPKDPLLTFTLQTAIIFPHMTSTTPLEKGIVIFTDGSANGRSVTYIQGREPIIKENTQNTAQQAEIVAVITAFEEVSQPFNLYTDSKYVTGLFPEIETATLSPRTKIYTELKHLQRLIHKRQEKFYIGHIRGHTGLPGPLAQGNAYADSLTRILTAGKRTADGSEFEKRTADGSEFESPKKKAKVE

SEQ ID NO: 3200 - protein, 2024 aa, synthetic construct
MPAAKRVKLDGGDKKYSIGLDIGTNSVGWAVITDEYKVPSKKFKVLGNTDRHSIKKNLIGALLFDSGETAEATRLKRTARRRYTRRKNRICYLQEIFSNEMAKVDDSFFHRLEESFLVEEDKKHERHPIFGNIVDEVAYHEKYPTIYHLRKKLVDSTDKADLRLIYLALAHMIKFRGHFLIEGDLNPDNSDVDKLFIQLVQTYNQLFEENPINASGVDAKAILSARLSKSRRLENLIAQLPGEKKNGLFGNLIALSLGLTPNFKSNFDLAEDAKLQLSKDTYDDDLDNLLAQIGDQYADLFLAAKNLSDAILLSDILRVNTEITKAPLSASMIKRYDEHHQDLTLLKALVRQQLPEKYKEIFFDQSKNGYAGYIDGGASQEEFYKFIKPILEKMDGTEELLVKLNREDLLRKQRTFDNGSIPHQIHLGELHAILRRQEDFYPFLKDNREKIEKILTFRIPYYVGPLARGNSRFAWMTRKSEETITPWNFEEVVDKGASAQSFIERMTNFDKNLPNEKVLPKHSLLYEYFTVYNELTKVKYVTEGMRKPAFLSGEQKKAIVDLLFKTNRKVTVKQLKEDYFKKIECFDSVEISGVEDRFNASLGTYHDLLKIIKDKDFLDNEENEDILEDIVLTLTLFEDREMIEERLKTYAHLFDDKVMKQLKRRRYTGWGRLSRKLINGIRDKQSGKTILDFLKSDGFANRNFMQLIHDDSLTFKEDIQKAQVSGQGDSLHEHIANLAGSPAIKKGILQTVKVVDELVKVMGRHKPENIVIEMARENQTTQKGQKNSRERMKRIEEGIKELGSQILKEHPVENTQLQNEKLYLYYLQNGRDMYVDQELDINRLSDYDVDHIVPQSFLKDDSIDNKVLTRSDKARGKSDNVPSEEVVKKMKNYWRQLLNAKLITQRKFDNLTKAERGGLSELDKAGFIKRQLVETRQITKHVAQILDSRMNTKYDENDKLIREVKVITLKSKLVSDFRKDFQFYKVREINNYHHAHDAYLNAVVGTALIKKYPKLESEFVYGDYKVYDVRKMIAKSEQEIGKATAKYFFYSNIMNFFKTEITLANGEIRKRPLIETNGETGEIVWDKGRDFATVRKVLSMPQVNIVKKTEVQTGGFSKESILPKRNSDKLIARKKDWDPKKYGGFDSPTVAYSVLVVAKVEKGKSKKLKSVKELLGITIMERSSFEKNPIDFLEAKGYKEVKKDLIIKLPKYSLFELENGRKRMLASAGELQKGNELALPSKYVNFLYLASHYEKLKGSPEDNEQKQLFVEQHKHYLDEIIEQISEFSKRVILADANLDKVLSAYNKHRDKPIREQAENIIHLFTLTNLGAPAAFKYFDTTIDRKRYTSTKEVLDATLIHQSITGLYETRIDLSQLGGDGGPAPEAAAKGGGGGGRDIMKDIKVRLMTDSPDDSQDLMIGAIESNLFADQISWKSDQPVWLNQWPLKQEKLQALQQLVTEQLQLGHLEESNSPWNTPVFVIKKKSGKWRLLQDLRAVNATMHDMGALQPGLPSPVAVPKGWEIIIIDLQDCFFNIKLHPEDCKRFAFSVPSPNFKRPYQRFQWKVLPQGMKNSPTLCQKFVDKAILTVRDKYQDSYIVHYMDDILLAHPSRSIVDEILTSMIQALNKHGLVVSTEKIQKYDNLKYLGTHIQGDSVSYQKLQIRTDKLRTLNDFQKLLGNINWIRPFLKLTTGELKPLFEILNGDSNPISTRKLTPEACKALQLMNERLSTARVKRLDLSQPWSLCILKTEYTPTACLWQDGVVEWIHLPHISPKVITPYDIFCTQLIIKGRHRSKELFSKDPDYIVVPYTKVQFDLLLQEKEDWPISLLGFLGEVHFHLPKDPLLTFTLQTAIIFPHMTSTTPLEKGIVIFTDGSANGRSVTYIQGREPIIKENTQNTAQQAEIVAVITAFEEVSQPFNLYTDSKYVTGLFPEIETATLSPRTKIYTELKHLQRLIHKRQEKFYIGHIRGHTGLPGPLAQGNAYADSLTRILTAGKRTADGSEFEKRTADGSEFESPKKKAKVE

SEQ ID NO: 3201 - protein, 2028 aa, synthetic construct
MPAAKRVKLDGGDKKYSIGLDIGTNSVGWAVITDEYKVPSKKFKVLGNTDRHSIKKNLIGALLFDSGETAEATRLKRTARRRYTRRKNRICYLQEIFSNEMAKVDDSFFHRLEESFLVEEDKKHERHPIFGNIVDEVAYHEKYPTIYHLRKKLVDSTDKADLRLIYLALAHMIKFRGHFLIEGDLNPDNSDVDKLFIQLVQTYNQLFEENPINASGVDAKAILSARLSKSRRLENLIAQLPGEKKNGLFGNLIALSLGLTPNFKSNFDLAEDAKLQLSKDTYDDDLDNLLAQIGDQYADLFLAAKNLSDAILLSDILRVNTEITKAPLSASMIKRYDEHHQDLTLLKALVRQQLPEKYKEIFFDQSKNGYAGYIDGGASQEEFYKFIKPILEKMDGTEELLVKLNREDLLRKQRTFDNGSIPHQIHLGELHAILRRQEDFYPFLKDNREKIEKILTFRIPYYVGPLARGNSRFAWMTRKSEETITPWNFEEVVDKGASAQSFIERMTNFDKNLPNEKVLPKHSLLYEYFTVYNELTKVKYVTEGMRKPAFLSGEQKKAIVDLLFKTNRKVTVKQLKEDYFKKIECFDSVEISGVEDRFNASLGTYHDLLKIIKDKDFLDNEENEDILEDIVLTLTLFEDREMIEERLKTYAHLFDDKVMKQLKRRRYTGWGRLSRKLINGIRDKQSGKTILDFLKSDGFANRNFMQLIHDDSLTFKEDIQKAQVSGQGDSLHEHIANLAGSPAIKKGILQTVKVVDELVKVMGRHKPENIVIEMARENQTTQKGQKNSRERMKRIEEGIKELGSQILKEHPVENTQLQNEKLYLYYLQNGRDMYVDQELDINRLSDYDVDHIVPQSFLKDDSIDNKVLTRSDKARGKSDNVPSEEVVKKMKNYWRQLLNAKLITQRKFDNLTKAERGGLSELDKAGFIKRQLVETRQITKHVAQILDSRMNTKYDENDKLIREVKVITLKSKLVSDFRKDFQFYKVREINNYHHAHDAYLNAVVGTALIKKYPKLESEFVYGDYKVYDVRKMIAKSEQEIGKATAKYFFYSNIMNFFKTEITLANGEIRKRPLIETNGETGEIVWDKGRDFATVRKVLSMPQVNIVKKTEVQTGGFSKESILPKRNSDKLIARKKDWDPKKYGGFDSPTVAYSVLVVAKVEKGKSKKLKSVKELLGITIMERSSFEKNPIDFLEAKGYKEVKKDLIIKLPKYSLFELENGRKRMLASAGELQKGNELALPSKYVNFLYLASHYEKLKGSPEDNEQKQLFVEQHKHYLDEIIEQISEFSKRVILADANLDKVLSAYNKHRDKPIREQAENIIHLFTLTNLGAPAAFKYFDTTIDRKRYTSTKEVLDATLIHQSITGLYETRIDLSQLGGDGGEAAAKGGGGSEAAAKGGGRDIMKDIKVRLMTDSPDDSQDLMIGAIESNLFADQISWKSDQPVWLNQWPLKQEKLQALQQLVTEQLQLGHLEESNSPWNTPVFVIKKKSGKWRLLQDLRAVNATMHDMGALQPGLPSPVAVPKGWEIIIIDLQDCFFNIKLHPEDCKRFAFSVPSPNFKRPYQRFQWKVLPQGMKNSPTLCQKFVDKAILTVRDKYQDSYIVHYMDDILLAHPSRSIVDEILTSMIQALNKHGLVVSTEKIQKYDNLKYLGTHIQGDSVSYQKLQIRTDKLRTLNDFQKLLGNINWIRPFLKLTTGELKPLFEILNGDSNPISTRKLTPEACKALQLMNERLSTARVKRLDLSQPWSLCILKTEYTPTACLWQDGVVEWIHLPHISPKVITPYDIFCTQLIIKGRHRSKELFSKDPDYIVVPYTKVQFDLLLQEKEDWPISLLGFLGEVHFHLPKDPLLTFTLQTAIIFPHMTSTTPLEKGIVIFTDGSANGRSVTYIQGREPIIKENTQNTAQQAEIVAVITAFEEVSQPFNLYTDSKYVTGLFPEIETATLSPRTKIYTELKHLQRLIHKRQEKFYIGHIRGHTGLPGPLAQGNAYADSLTRILTAGKRTADGSEFEKRTADGSEFESPKKKAKVE

SEQ ID NO: 3202 - protein, 2019 aa, synthetic construct
MPAAKRVKLDGGDKKYSIGLDIGTNSVGWAVITDEYKVPSKKFKVLGNTDRHSIKKNLIGALLFDSGETAEATRLKRTARRRYTRRKNRICYLQEIFSNEMAKVDDSFFHRLEESFLVEEDKKHERHPIFGNIVDEVAYHEKYPTIYHLRKKLVDSTDKADLRLIYLALAHMIKFRGHFLIEGDLNPDNSDVDKLFIQLVQTYNQLFEENPINASGVDAKAILSARLSKSRRLENLIAQLPGEKKNGLFGNLIALSLGLTPNFKSNFDLAEDAKLQLSKDTYDDDLDNLLAQIGDQYADLFLAAKNLSDAILLSDILRVNTEITKAPLSASMIKRYDEHHQDLTLLKALVRQQLPEKYKEIFFDQSKNGYAGYIDGGASQEEFYKFIKPILEKMDGTEELLVKLNREDLLRKQRTFDNGSIPHQIHLGELHAILRRQEDFYPFLKDNREKIEKILTFRIPYYVGPLARGNSRFAWMTRKSEETITPWNFEEVVDKGASAQSFIERMTNFDKNLPNEKVLPKHSLLYEYFTVYNELTKVKYVTEGMRKPAFLSGEQKKAIVDLLFKTNRKVTVKQLKEDYFKKIECFDSVEISGVEDRFNASLGTYHDLLKIIKDKDFLDNEENEDILEDIVLTLTLFEDREMIEERLKTYAHLFDDKVMKQLKRRRYTGWGRLSRKLINGIRDKQSGKTILDFLKSDGFANRNFMQLIHDDSLTFKEDIQKAQVSGQGDSLHEHIANLAGSPAIKKGILQTVKVVDELVKVMGRHKPENIVIEMARENQTTQKGQKNSRERMKRIEEGIKELGSQILKEHPVENTQLQNEKLYLYYLQNGRDMYVDQELDINRLSDYDVDHIVPQSFLKDDSIDNKVLTRSDKARGKSDNVPSEEVVKKMKNYWRQLLNAKLITQRKFDNLTKAERGGLSELDKAGFIKRQLVETRQITKHVAQILDSRMNTKYDENDKLIREVKVITLKSKLVSDFRKDFQFYKVREINNYHHAHDAYLNAVVGTALIKKYPKLESEFVYGDYKVYDVRKMIAKSEQEIGKATAKYFFYSNIMNFFKTEITLANGEIRKRPLIETNGETGEIVWDKGRDFATVRKVLSMPQVNIVKKTEVQTGGFSKESILPKRNSDKLIARKKDWDPKKYGGFDSPTVAYSVLVVAKVEKGKSKKLKSVKELLGITIMERSSFEKNPIDFLEAKGYKEVKKDLIIKLPKYSLFELENGRKRMLASAGELQKGNELALPSKYVNFLYLASHYEKLKGSPEDNEQKQLFVEQHKHYLDEIIEQISEFSKRVILADANLDKVLSAYNKHRDKPIREQAENIIHLFTLTNLGAPAAFKYFDTTIDRKRYTSTKEVLDATLIHQSITGLYETRIDLSQLGGDGGGGGPAPGGGRDIMKDIKVRLMTDSPDDSQDLMIGAIESNLFADQISWKSDQPVWLNQWPLKQEKLQALQQLVTEQLQLGHLEESNSPWNTPVFVIKKKSGKWRLLQDLRAVNATMHDMGALQPGLPSPVAVPKGWEIIIIDLQDCFFNIKLHPEDCKRFAFSVPSPNFKRPYQRFQWKVLPQGMKNSPTLCQKFVDKAILTVRDKYQDSYIVHYMDDILLAHPSRSIVDEILTSMIQALNKHGLVVSTEKIQKYDNLKYLGTHIQGDSVSYQKLQIRTDKLRTLNDFQKLLGNINWIRPFLKLTTGELKPLFEILNGDSNPISTRKLTPEACKALQLMNERLSTARVKRLDLSQPWSLCILKTEYTPTACLWQDGVVEWIHLPHISPKVITPYDIFCTQLIIKGRHRSKELFSKDPDYIVVPYTKVQFDLLLQEKEDWPISLLGFLGEVHFHLPKDPLLTFTLQTAIIFPHMTSTTPLEKGIVIFTDGSANGRSVTYIQGREPIIKENTQNTAQQAEIVAVITAFEEVSQPFNLYTDSKYVTGLFPEIETATLSPRTKIYTELKHLQRLIHKRQEKFYIGHIRGHTGLPGPLAQGNAYADSLTRILTAGKRTADGSEFEKRTADGSEFESPKKKAKVE

SEQ ID NO: 3203 - protein, 2028 aa, synthetic construct
MPAAKRVKLDGGDKKYSIGLDIGTNSVGWAVITDEYKVPSKKFKVLGNTDRHSIKKNLIGALLFDSGETAEATRLKRTARRRYTRRKNRICYLQEIFSNEMAKVDDSFFHRLEESFLVEEDKKHERHPIFGNIVDEVAYHEKYPTIYHLRKKLVDSTDKADLRLIYLALAHMIKFRGHFLIEGDLNPDNSDVDKLFIQLVQTYNQLFEENPINASGVDAKAILSARLSKSRRLENLIAQLPGEKKNGLFGNLIALSLGLTPNFKSNFDLAEDAKLQLSKDTYDDDLDNLLAQIGDQYADLFLAAKNLSDAILLSDILRVNTEITKAPLSASMIKRYDEHHQDLTLLKALVRQQLPEKYKEIFFDQSKNGYAGYIDGGASQEEFYKFIKPILEKMDGTEELLVKLNREDLLRKQRTFDNGSIPHQIHLGELHAILRRQEDFYPFLKDNREKIEKILTFRIPYYVGPLARGNSRFAWMTRKSEETITPWNFEEVVDKGASAQSFIERMTNFDKNLPNEKVLPKHSLLYEYFTVYNELTKVKYVTEGMRKPAFLSGEQKKAIVDLLFKTNRKVTVKQLKEDYFKKIECFDSVEISGVEDRFNASLGTYHDLLKIIKDKDFLDNEENEDILEDIVLTLTLFEDREMIEERLKTYAHLFDDKVMKQLKRRRYTGWGRLSRKLINGIRDKQSGKTILDFLKSDGFANRNFMQLIHDDSLTFKEDIQKAQVSGQGDSLHEHIANLAGSPAIKKGILQTVKVVDELVKVMGRHKPENIVIEMARENQTTQKGQKNSRERMKRIEEGIKELGSQILKEHPVENTQLQNEKLYLYYLQNGRDMYVDQELDINRLSDYDVDHIVPQSFLKDDSIDNKVLTRSDKARGKSDNVPSEEVVKKMKNYWRQLLNAKLITQRKFDNLTKAERGGLSELDKAGFIKRQLVETRQITKHVAQILDSRMNTKYDENDKLIREVKVITLKSKLVSDFRKDFQFYKVREINNYHHAHDAYLNAVVGTALIKKYPKLESEFVYGDYKVYDVRKMIAKSEQEIGKATAKYFFYSNIMNFFKTEITLANGEIRKRPLIETNGETGEIVWDKGRDFATVRKVLSMPQVNIVKKTEVQTGGFSKESILPKRNSDKLIARKKDWDPKKYGGFDSPTVAYSVLVVAKVEKGKSKKLKSVKELLGITIMERSSFEKNPIDFLEAKGYKEVKKDLIIKLPKYSLFELENGRKRMLASAGELQKGNELALPSKYVNFLYLASHYEKLKGSPEDNEQKQLFVEQHKHYLDEIIEQISEFSKRVILADANLDKVLSAYNKHRDKPIREQAENIIHLFTLTNLGAPAAFKYFDTTIDRKRYTSTKEVLDATLIHQSITGLYETRIDLSQLGGDGGGGGGSGGGGSGGGGSGGGRDIMKDIKVRLMTDSPDDSQDLMIGAIESNLFADQISWKSDQPVWLNQWPLKQEKLQALQQLVTEQLQLGHLEESNSPWNTPVFVIKKKSGKWRLLQDLRAVNATMHDMGALQPGLPSPVAVPKGWEIIIIDLQDCFFNIKLHPEDCKRFAFSVPSPNFKRPYQRFQWKVLPQGMKNSPTLCQKFVDKAILTVRDKYQDSYIVHYMDDILLAHPSRSIVDEILTSMIQALNKHGLVVSTEKIQKYDNLKYLGTHIQGDSVSYQKLQIRTDKLRTLNDFQKLLGNINWIRPFLKLTTGELKPLFEILNGDSNPISTRKLTPEACKALQLMNERLSTARVKRLDLSQPWSLCILKTEYTPTACLWQDGVVEWIHLPHISPKVITPYDIFCTQLIIKGRHRSKELFSKDPDYIVVPYTKVQFDLLLQEKEDWPISLLGFLGEVHFHLPKDPLLTFTLQTAIIFPHMTSTTPLEKGIVIFTDGSANGRSVTYIQGREPIIKENTQNTAQQAEIVAVITAFEEVSQPFNLYTDSKYVTGLFPEIETATLSPRTKIYTELKHLQRLIHKRQEKFYIGHIRGHTGLPGPLAQGNAYADSLTRILTAGKRTADGSEFEKRTADGSEFESPKKKAKVE

SEQ ID NO: 3204 - protein, 2022 aa, synthetic construct
MPAAKRVKLDGGDKKYSIGLDIGTNSVGWAVITDEYKVPSKKFKVLGNTDRHSIKKNLIGALLFDSGETAEATRLKRTARRRYTRRKNRICYLQEIFSNEMAKVDDSFFHRLEESFLVEEDKKHERHPIFGNIVDEVAYHEKYPTIYHLRKKLVDSTDKADLRLIYLALAHMIKFRGHFLIEGDLNPDNSDVDKLFIQLVQTYNQLFEENPINASGVDAKAILSARLSKSRRLENLIAQLPGEKKNGLFGNLIALSLGLTPNFKSNFDLAEDAKLQLSKDTYDDDLDNLLAQIGDQYADLFLAAKNLSDAILLSDILRVNTEITKAPLSASMIKRYDEHHQDLTLLKALVRQQLPEKYKEIFFDQSKNGYAGYIDGGASQEEFYKFIKPILEKMDGTEELLVKLNREDLLRKQRTFDNGSIPHQIHLGELHAILRRQEDFYPFLKDNREKIEKILTFRIPYYVGPLARGNSRFAWMTRKSEETITPWNFEEVVDKGASAQSFIERMTNFDKNLPNEKVLPKHSLLYEYFTVYNELTKVKYVTEGMRKPAFLSGEQKKAIVDLLFKTNRKVTVKQLKEDYFKKIECFDSVEISGVEDRFNASLGTYHDLLKIIKDKDFLDNEENEDILEDIVLTLTLFEDREMIEERLKTYAHLFDDKVMKQLKRRRYTGWGRLSRKLINGIRDKQSGKTILDFLKSDGFANRNFMQLIHDDSLTFKEDIQKAQVSGQGDSLHEHIANLAGSPAIKKGILQTVKVVDELVKVMGRHKPENIVIEMARENQTTQKGQKNSRERMKRIEEGIKELGSQILKEHPVENTQLQNEKLYLYYLQNGRDMYVDQELDINRLSDYDVDHIVPQSFLKDDSIDNKVLTRSDKARGKSDNVPSEEVVKKMKNYWRQLLNAKLITQRKFDNLTKAERGGLSELDKAGFIKRQLVETRQITKHVAQILDSRMNTKYDENDKLIREVKVITLKSKLVSDFRKDFQFYKVREINNYHHAHDAYLNAVVGTALIKKYPKLESEFVYGDYKVYDVRKMIAKSEQEIGKATAKYFFYSNIMNFFKTEITLANGEIRKRPLIETNGETGEIVWDKGRDFATVRKVLSMPQVNIVKKTEVQTGGFSKESILPKRNSDKLIARKKDWDPKKYGGFDSPTVAYSVLVVAKVEKGKSKKLKSVKELLGITIMERSSFEKNPIDFLEAKGYKEVKKDLIIKLPKYSLFELENGRKRMLASAGELQKGNELALPSKYVNFLYLASHYEKLKGSPEDNEQKQLFVEQHKHYLDEIIEQISEFSKRVILADANLDKVLSAYNKHRDKPIREQAENIIHLFTLTNLGAPAAFKYFDTTIDRKRYTSTKEVLDATLIHQSITGLYETRIDLSQLGGDGGGSSGGGPAPGGGRDIMKDIKVRLMTDSPDDSQDLMIGAIESNLFADQISWKSDQPVWLNQWPLKQEKLQALQQLVTEQLQLGHLEESNSPWNTPVFVIKKKSGKWRLLQDLRAVNATMHDMGALQPGLPSPVAVPKGWEIIIIDLQDCFFNIKLHPEDCKRFAFSVPSPNFKRPYQRFQWKVLPQGMKNSPTLCQKFVDKAILTVRDKYQDSYIVHYMDDILLAHPSRSIVDEILTSMIQALNKHGLVVSTEKIQKYDNLKYLGTHIQGDSVSYQKLQIRTDKLRTLNDFQKLLGNINWIRPFLKLTTGELKPLFEILNGDSNPISTRKLTPEACKALQLMNERLSTARVKRLDLSQPWSLCILKTEYTPTACLWQDGVVEWIHLPHISPKVITPYDIFCTQLIIKGRHRSKELFSKDPDYIVVPYTKVQFDLLLQEKEDWPISLLGFLGEVHFHLPKDPLLTFTLQTAIIFPHMTSTTPLEKGIVIFTDGSANGRSVTYIQGREPIIKENTQNTAQQAEIVAVITAFEEVSQPFNLYTDSKYVTGLFPEIETATLSPRTKIYTELKHLQRLIHKRQEKFYIGHIRGHTGLPGPLAQGNAYADSLTRILTAGKRTADGSEFEKRTADGSEFESPKKKAKVE

SEQ ID NO: 3205 - protein, 2022 aa, synthetic construct
MPAAKRVKLDGGDKKYSIGLDIGTNSVGWAVITDEYKVPSKKFKVLGNTDRHSIKKNLIGALLFDSGETAEATRLKRTARRRYTRRKNRICYLQEIFSNEMAKVDDSFFHRLEESFLVEEDKKHERHPIFGNIVDEVAYHEKYPTIYHLRKKLVDSTDKADLRLIYLALAHMIKFRGHFLIEGDLNPDNSDVDKLFIQLVQTYNQLFEENPINASGVDAKAILSARLSKSRRLENLIAQLPGEKKNGLFGNLIALSLGLTPNFKSNFDLAEDAKLQLSKDTYDDDLDNLLAQIGDQYADLFLAAKNLSDAILLSDILRVNTEITKAPLSASMIKRYDEHHQDLTLLKALVRQQLPEKYKEIFFDQSKNGYAGYIDGGASQEEFYKFIKPILEKMDGTEELLVKLNREDLLRKQRTFDNGSIPHQIHLGELHAILRRQEDFYPFLKDNREKIEKILTFRIPYYVGPLARGNSRFAWMTRKSEETITPWNFEEVVDKGASAQSFIERMTNFDKNLPNEKVLPKHSLLYEYFTVYNELTKVKYVTEGMRKPAFLSGEQKKAIVDLLFKTNRKVTVKQLKEDYFKKIECFDSVEISGVEDRFNASLGTYHDLLKIIKDKDFLDNEENEDILEDIVLTLTLFEDREMIEERLKTYAHLFDDKVMKQLKRRRYTGWGRLSRKLINGIRDKQSGKTILDFLKSDGFANRNFMQLIHDDSLTFKEDIQKAQVSGQGDSLHEHIANLAGSPAIKKGILQTVKVVDELVKVMGRHKPENIVIEMARENQTTQKGQKNSRERMKRIEEGIKELGSQILKEHPVENTQLQNEKLYLYYLQNGRDMYVDQELDINRLSDYDVDHIVPQSFLKDDSIDNKVLTRSDKARGKSDNVPSEEVVKKMKNYWRQLLNAKLITQRKFDNLTKAERGGLSELDKAGFIKRQLVETRQITKHVAQILDSRMNTKYDENDKLIREVKVITLKSKLVSDFRKDFQFYKVREINNYHHAHDAYLNAVVGTALIKKYPKLESEFVYGDYKVYDVRKMIAKSEQEIGKATAKYFFYSNIMNFFKTEITLANGEIRKRPLIETNGETGEIVWDKGRDFATVRKVLSMPQVNIVKKTEVQTGGFSKESILPKRNSDKLIARKKDWDPKKYGGFDSPTVAYSVLVVAKVEKGKSKKLKSVKELLGITIMERSSFEKNPIDFLEAKGYKEVKKDLIIKLPKYSLFELENGRKRMLASAGELQKGNELALPSKYVNFLYLASHYEKLKGSPEDNEQKQLFVEQHKHYLDEIIEQISEFSKRVILADANLDKVLSAYNKHRDKPIREQAENIIHLFTLTNLGAPAAFKYFDTTIDRKRYTSTKEVLDATLIHQSITGLYETRIDLSQLGGDGGGSSGGSGGGGGGRDIMKDIKVRLMTDSPDDSQDLMIGAIESNLFADQISWKSDQPVWLNQWPLKQEKLQALQQLVTEQLQLGHLEESNSPWNTPVFVIKKKSGKWRLLQDLRAVNATMHDMGALQPGLPSPVAVPKGWEIIIIDLQDCFFNIKLHPEDCKRFAFSVPSPNFKRPYQRFQWKVLPQGMKNSPTLCQKFVDKAILTVRDKYQDSYIVHYMDDILLAHPSRSIVDEILTSMIQALNKHGLVVSTEKIQKYDNLKYLGTHIQGDSVSYQKLQIRTDKLRTLNDFQKLLGNINWIRPFLKLTTGELKPLFEILNGDSNPISTRKLTPEACKALQLMNERLSTARVKRLDLSQPWSLCILKTEYTPTACLWQDGVVEWIHLPHISPKVITPYDIFCTQLIIKGRHRSKELFSKDPDYIVVPYTKVQFDLLLQEKEDWPISLLGFLGEVHFHLPKDPLLTFTLQTAIIFPHMTSTTPLEKGIVIFTDGSANGRSVTYIQGREPIIKENTQNTAQQAEIVAVITAFEEVSQPFNLYTDSKYVTGLFPEIETATLSPRTKIYTELKHLQRLIHKRQEKFYIGHIRGHTGLPGPLAQGNAYADSLTRILTAGKRTADGSEFEKRTADGSEFESPKKKAKVE

SEQ ID NO: 3206 - protein, 2021 aa, synthetic construct
MPAAKRVKLDGGDKKYSIGLDIGTNSVGWAVITDEYKVPSKKFKVLGNTDRHSIKKNLIGALLFDSGETAEATRLKRTARRRYTRRKNRICYLQEIFSNEMAKVDDSFFHRLEESFLVEEDKKHERHPIFGNIVDEVAYHEKYPTIYHLRKKLVDSTDKADLRLIYLALAHMIKFRGHFLIEGDLNPDNSDVDKLFIQLVQTYNQLFEENPINASGVDAKAILSARLSKSRRLENLIAQLPGEKKNGLFGNLIALSLGLTPNFKSNFDLAEDAKLQLSKDTYDDDLDNLLAQIGDQYADLFLAAKNLSDAILLSDILRVNTEITKAPLSASMIKRYDEHHQDLTLLKALVRQQLPEKYKEIFFDQSKNGYAGYIDGGASQEEFYKFIKPILEKMDGTEELLVKLNREDLLRKQRTFDNGSIPHQIHLGELHAILRRQEDFYPFLKDNREKIEKILTFRIPYYVGPLARGNSRFAWMTRKSEETITPWNFEEVVDKGASAQSFIERMTNFDKNLPNEKVLPKHSLLYEYFTVYNELTKVKYVTEGMRKPAFLSGEQKKAIVDLLFKTNRKVTVKQLKEDYFKKIECFDSVEISGVEDRFNASLGTYHDLLKIIKDKDFLDNEENEDILEDIVLTLTLFEDREMIEERLKTYAHLFDDKVMKQLKRRRYTGWGRLSRKLINGIRDKQSGKTILDFLKSDGFANRNFMQLIHDDSLTFKEDIQKAQVSGQGDSLHEHIANLAGSPAIKKGILQTVKVVDELVKVMGRHKPENIVIEMARENQTTQKGQKNSRERMKRIEEGIKELGSQILKEHPVENTQLQNEKLYLYYLQNGRDMYVDQELDINRLSDYDVDHIVPQSFLKDDSIDNKVLTRSDKARGKSDNVPSEEVVKKMKNYWRQLLNAKLITQRKFDNLTKAERGGLSELDKAGFIKRQLVETRQITKHVAQILDSRMNTKYDENDKLIREVKVITLKSKLVSDFRKDFQFYKVREINNYHHAHDAYLNAVVGTALIKKYPKLESEFVYGDYKVYDVRKMIAKSEQEIGKATAKYFFYSNIMNFFKTEITLANGEIRKRPLIETNGETGEIVWDKGRDFATVRKVLSMPQVNIVKKTEVQTGGFSKESILPKRNSDKLIARKKDWDPKKYGGFDSPTVAYSVLVVAKVEKGKSKKLKSVKELLGITIMERSSFEKNPIDFLEAKGYKEVKKDLIIKLPKYSLFELENGRKRMLASAGELQKGNELALPSKYVNFLYLASHYEKLKGSPEDNEQKQLFVEQHKHYLDEIIEQISEFSKRVILADANLDKVLSAYNKHRDKPIREQAENIIHLFTLTNLGAPAAFKYFDTTIDRKRYTSTKEVLDATLIHQSITGLYETRIDLSQLGGDGGEAAAKGGSGGGRDIMKDIKVRLMTDSPDDSQDLMIGAIESNLFADQISWKSDQPVWLNQWPLKQEKLQALQQLVTEQLQLGHLEESNSPWNTPVFVIKKKSGKWRLLQDLRAVNATMHDMGALQPGLPSPVAVPKGWEIIIIDLQDCFFNIKLHPEDCKRFAFSVPSPNFKRPYQRFQWKVLPQGMKNSPTLCQKFVDKAILTVRDKYQDSYIVHYMDDILLAHPSRSIVDEILTSMIQALNKHGLVVSTEKIQKYDNLKYLGTHIQGDSVSYQKLQIRTDKLRTLNDFQKLLGNINWIRPFLKLTTGELKPLFEILNGDSNPISTRKLTPEACKALQLMNERLSTARVKRLDLSQPWSLCILKTEYTPTACLWQDGVVEWIHLPHISPKVITPYDIFCTQLIIKGRHRSKELFSKDPDYIVVPYTKVQFDLLLQEKEDWPISLLGFLGEVHFHLPKDPLLTFTLQTAIIFPHMTSTTPLEKGIVIFTDGSANGRSVTYIQGREPIIKENTQNTAQQAEIVAVITAFEEVSQPFNLYTDSKYVTGLFPEIETATLSPRTKIYTELKHLQRLIHKRQEKFYIGHIRGHTGLPGPLAQGNAYADSLTRILTAGKRTADGSEFEKRTADGSEFESPKKKAKVE

SEQ ID NO: 3207 - protein, 2024 aa, synthetic construct
MPAAKRVKLDGGDKKYSIGLDIGTNSVGWAVITDEYKVPSKKFKVLGNTDRHSIKKNLIGALLFDSGETAEATRLKRTARRRYTRRKNRICYLQEIFSNEMAKVDDSFFHRLEESFLVEEDKKHERHPIFGNIVDEVAYHEKYPTIYHLRKKLVDSTDKADLRLIYLALAHMIKFRGHFLIEGDLNPDNSDVDKLFIQLVQTYNQLFEENPINASGVDAKAILSARLSKSRRLENLIAQLPGEKKNGLFGNLIALSLGLTPNFKSNFDLAEDAKLQLSKDTYDDDLDNLLAQIGDQYADLFLAAKNLSDAILLSDILRVNTEITKAPLSASMIKRYDEHHQDLTLLKALVRQQLPEKYKEIFFDQSKNGYAGYIDGGASQEEFYKFIKPILEKMDGTEELLVKLNREDLLRKQRTFDNGSIPHQIHLGELHAILRRQEDFYPFLKDNREKIEKILTFRIPYYVGPLARGNSRFAWMTRKSEETITPWNFEEVVDKGASAQSFIERMTNFDKNLPNEKVLPKHSLLYEYFTVYNELTKVKYVTEGMRKPAFLSGEQKKAIVDLLFKTNRKVTVKQLKEDYFKKIECFDSVEISGVEDRFNASLGTYHDLLKIIKDKDFLDNEENEDILEDIVLTLTLFEDREMIEERLKTYAHLFDDKVMKQLKRRRYTGWGRLSRKLINGIRDKQSGKTILDFLKSDGFANRNFMQLIHDDSLTFKEDIQKAQVSGQGDSLHEHIANLAGSPAIKKGILQTVKVVDELVKVMGRHKPENIVIEMARENQTTQKGQKNSRERMKRIEEGIKELGSQILKEHPVENTQLQNEKLYLYYLQNGRDMYVDQELDINRLSDYDVDHIVPQSFLKDDSIDNKVLTRSDKARGKSDNVPSEEVVKKMKNYWRQLLNAKLITQRKFDNLTKAERGGLSELDKAGFIKRQLVETRQITKHVAQILDSRMNTKYDENDKLIREVKVITLKSKLVSDFRKDFQFYKVREINNYHHAHDAYLNAVVGTALIKKYPKLESEFVYGDYKVYDVRKMIAKSEQEIGKATAKYFFYSNIMNFFKTEITLANGEIRKRPLIETNGETGEIVWDKGRDFATVRKVLSMPQVNIVKKTEVQTGGFSKESILPKRNSDKLIARKKDWDPKKYGGFDSPTVAYSVLVVAKVEKGKSKKLKSVKELLGITIMERSSFEKNPIDFLEAKGYKEVKKDLIIKLPKYSLFELENGRKRMLASAGELQKGNELALPSKYVNFLYLASHYEKLKGSPEDNEQKQLFVEQHKHYLDEIIEQISEFSKRVILADANLDKVLSAYNKHRDKPIREQAENIIHLFTLTNLGAPAAFKYFDTTIDRKRYTSTKEVLDATLIHQSITGLYETRIDLSQLGGDGGGSSEAAAKPAPGGGRDIMKDIKVRLMTDSPDDSQDLMIGAIESNLFADQISWKSDQPVWLNQWPLKQEKLQALQQLVTEQLQLGHLEESNSPWNTPVFVIKKKSGKWRLLQDLRAVNATMHDMGALQPGLPSPVAVPKGWEIIIIDLQDCFFNIKLHPEDCKRFAFSVPSPNFKRPYQRFQWKVLPQGMKNSPTLCQKFVDKAILTVRDKYQDSYIVHYMDDILLAHPSRSIVDEILTSMIQALNKHGLVVSTEKIQKYDNLKYLGTHIQGDSVSYQKLQIRTDKLRTLNDFQKLLGNINWIRPFLKLTTGELKPLFEILNGDSNPISTRKLTPEACKALQLMNERLSTARVKRLDLSQPWSLCILKTEYTPTACLWQDGVVEWIHLPHISPKVITPYDIFCTQLIIKGRHRSKELFSKDPDYIVVPYTKVQFDLLLQEKEDWPISLLGFLGEVHFHLPKDPLLTFTLQTAIIFPHMTSTTPLEKGIVIFTDGSANGRSVTYIQGREPIIKENTQNTAQQAEIVAVITAFEEVSQPFNLYTDSKYVTGLFPEIETATLSPRTKIYTELKHLQRLIHKRQEKFYIGHIRGHTGLPGPLAQGNAYADSLTRILTAGKRTADGSEFEKRTADGSEFESPKKKAKVE

SEQ ID NO: 3208 - protein, 2021 aa, synthetic construct
MPAAKRVKLDGGDKKYSIGLDIGTNSVGWAVITDEYKVPSKKFKVLGNTDRHSIKKNLIGALLFDSGETAEATRLKRTARRRYTRRKNRICYLQEIFSNEMAKVDDSFFHRLEESFLVEEDKKHERHPIFGNIVDEVAYHEKYPTIYHLRKKLVDSTDKADLRLIYLALAHMIKFRGHFLIEGDLNPDNSDVDKLFIQLVQTYNQLFEENPINASGVDAKAILSARLSKSRRLENLIAQLPGEKKNGLFGNLIALSLGLTPNFKSNFDLAEDAKLQLSKDTYDDDLDNLLAQIGDQYADLFLAAKNLSDAILLSDILRVNTEITKAPLSASMIKRYDEHHQDLTLLKALVRQQLPEKYKEIFFDQSKNGYAGYIDGGASQEEFYKFIKPILEKMDGTEELLVKLNREDLLRKQRTFDNGSIPHQIHLGELHAILRRQEDFYPFLKDNREKIEKILTFRIPYYVGPLARGNSRFAWMTRKSEETITPWNFEEVVDKGASAQSFIERMTNFDKNLPNEKVLPKHSLLYEYFTVYNELTKVKYVTEGMRKPAFLSGEQKKAIVDLLFKTNRKVTVKQLKEDYFKKIECFDSVEISGVEDRFNASLGTYHDLLKIIKDKDFLDNEENEDILEDIVLTLTLFEDREMIEERLKTYAHLFDDKVMKQLKRRRYTGWGRLSRKLINGIRDKQSGKTILDFLKSDGFANRNFMQLIHDDSLTFKEDIQKAQVSGQGDSLHEHIANLAGSPAIKKGILQTVKVVDELVKVMGRHKPENIVIEMARENQTTQKGQKNSRERMKRIEEGIKELGSQILKEHPVENTQLQNEKLYLYYLQNGRDMYVDQELDINRLSDYDVDHIVPQSFLKDDSIDNKVLTRSDKARGKSDNVPSEEVVKKMKNYWRQLLNAKLITQRKFDNLTKAERGGLSELDKAGFIKRQLVETRQITKHVAQILDSRMNTKYDENDKLIREVKVITLKSKLVSDFRKDFQFYKVREINNYHHAHDAYLNAVVGTALIKKYPKLESEFVYGDYKVYDVRKMIAKSEQEIGKATAKYFFYSNIMNFFKTEITLANGEIRKRPLIETNGETGEIVWDKGRDFATVRKVLSMPQVNIVKKTEVQTGGFSKESILPKRNSDKLIARKKDWDPKKYGGFDSPTVAYSVLVVAKVEKGKSKKLKSVKELLGITIMERSSFEKNPIDFLEAKGYKEVKKDLIIKLPKYSLFELENGRKRMLASAGELQKGNELALPSKYVNFLYLASHYEKLKGSPEDNEQKQLFVEQHKHYLDEIIEQISEFSKRVILADANLDKVLSAYNKHRDKPIREQAENIIHLFTLTNLGAPAAFKYFDTTIDRKRYTSTKEVLDATLIHQSITGLYETRIDLSQLGGDGGGGGEAAAKGGGRDIMKDIKVRLMTDSPDDSQDLMIGAIESNLFADQISWKSDQPVWLNQWPLKQEKLQALQQLVTEQLQLGHLEESNSPWNTPVFVIKKKSGKWRLLQDLRAVNATMHDMGALQPGLPSPVAVPKGWEIIIIDLQDCFFNIKLHPEDCKRFAFSVPSPNFKRPYQRFQWKVLPQGMKNSPTLCQKFVDKAILTVRDKYQDSYIVHYMDDILLAHPSRSIVDEILTSMIQALNKHGLVVSTEKIQKYDNLKYLGTHIQGDSVSYQKLQIRTDKLRTLNDFQKLLGNINWIRPFLKLTTGELKPLFEILNGDSNPISTRKLTPEACKALQLMNERLSTARVKRLDLSQPWSLCILKTEYTPTACLWQDGVVEWIHLPHISPKVITPYDIFCTQLIIKGRHRSKELFSKDPDYIVVPYTKVQFDLLLQEKEDWPISLLGFLGEVHFHLPKDPLLTFTLQTAIIFPHMTSTTPLEKGIVIFTDGSANGRSVTYIQGREPIIKENTQNTAQQAEIVAVITAFEEVSQPFNLYTDSKYVTGLFPEIETATLSPRTKIYTELKHLQRLIHKRQEKFYIGHIRGHTGLPGPLAQGNAYADSLTRILTAGKRTADGSEFEKRTADGSEFESPKKKAKVE

SEQ ID NO: 3209 - protein, 2022 aa, synthetic construct
MPAAKRVKLDGGDKKYSIGLDIGTNSVGWAVITDEYKVPSKKFKVLGNTDRHSIKKNLIGALLFDSGETAEATRLKRTARRRYTRRKNRICYLQEIFSNEMAKVDDSFFHRLEESFLVEEDKKHERHPIFGNIVDEVAYHEKYPTIYHLRKKLVDSTDKADLRLIYLALAHMIKFRGHFLIEGDLNPDNSDVDKLFIQLVQTYNQLFEENPINASGVDAKAILSARLSKSRRLENLIAQLPGEKKNGLFGNLIALSLGLTPNFKSNFDLAEDAKLQLSKDTYDDDLDNLLAQIGDQYADLFLAAKNLSDAILLSDILRVNTEITKAPLSASMIKRYDEHHQDLTLLKALVRQQLPEKYKEIFFDQSKNGYAGYIDGGASQEEFYKFIKPILEKMDGTEELLVKLNREDLLRKQRTFDNGSIPHQIHLGELHAILRRQEDFYPFLKDNREKIEKILTFRIPYYVGPLARGNSRFAWMTRKSEETITPWNFEEVVDKGASAQSFIERMTNFDKNLPNEKVLPKHSLLYEYFTVYNELTKVKYVTEGMRKPAFLSGEQKKAIVDLLFKTNRKVTVKQLKEDYFKKIECFDSVEISGVEDRFNASLGTYHDLLKIIKDKDFLDNEENEDILEDIVLTLTLFEDREMIEERLKTYAHLFDDKVMKQLKRRRYTGWGRLSRKLINGIRDKQSGKTILDFLKSDGFANRNFMQLIHDDSLTFKEDIQKAQVSGQGDSLHEHIANLAGSPAIKKGILQTVKVVDELVKVMGRHKPENIVIEMARENQTTQKGQKNSRERMKRIEEGIKELGSQILKEHPVENTQLQNEKLYLYYLQNGRDMYVDQELDINRLSDYDVDHIVPQSFLKDDSIDNKVLTRSDKARGKSDNVPSEEVVKKMKNYWRQLLNAKLITQRKFDNLTKAERGGLSELDKAGFIKRQLVETRQITKHVAQILDSRMNTKYDENDKLIREVKVITLKSKLVSDFRKDFQFYKVREINNYHHAHDAYLNAVVGTALIKKYPKLESEFVYGDYKVYDVRKMIAKSEQEIGKATAKYFFYSNIMNFFKTEITLANGEIRKRPLIETNGETGEIVWDKGRDFATVRKVLSMPQVNIVKKTEVQTGGFSKESILPKRNSDKLIARKKDWDPKKYGGFDSPTVAYSVLVVAKVEKGKSKKLKSVKELLGITIMERSSFEKNPIDFLEAKGYKEVKKDLIIKLPKYSLFELENGRKRMLASAGELQKGNELALPSKYVNFLYLASHYEKLKGSPEDNEQKQLFVEQHKHYLDEIIEQISEFSKRVILADANLDKVLSAYNKHRDKPIREQAENIIHLFTLTNLGAPAAFKYFDTTIDRKRYTSTKEVLDATLIHQSITGLYETRIDLSQLGGDGGPAPGGSGSSGGGRDIMKDIKVRLMTDSPDDSQDLMIGAIESNLFADQISWKSDQPVWLNQWPLKQEKLQALQQLVTEQLQLGHLEESNSPWNTPVFVIKKKSGKWRLLQDLRAVNATMHDMGALQPGLPSPVAVPKGWEIIIIDLQDCFFNIKLHPEDCKRFAFSVPSPNFKRPYQRFQWKVLPQGMKNSPTLCQKFVDKAILTVRDKYQDSYIVHYMDDILLAHPSRSIVDEILTSMIQALNKHGLVVSTEKIQKYDNLKYLGTHIQGDSVSYQKLQIRTDKLRTLNDFQKLLGNINWIRPFLKLTTGELKPLFEILNGDSNPISTRKLTPEACKALQLMNERLSTARVKRLDLSQPWSLCILKTEYTPTACLWQDGVVEWIHLPHISPKVITPYDIFCTQLIIKGRHRSKELFSKDPDYIVVPYTKVQFDLLLQEKEDWPISLLGFLGEVHFHLPKDPLLTFTLQTAIIFPHMTSTTPLEKGIVIFTDGSANGRSVTYIQGREPIIKENTQNTAQQAEIVAVITAFEEVSQPFNLYTDSKYVTGLFPEIETATLSPRTKIYTELKHLQRLIHKRQEKFYIGHIRGHTGLPGPLAQGNAYADSLTRILTAGKRTADGSEFEKRTADGSEFESPKKKAKVE

SEQ ID NO: 3210 - protein, 2016 aa, synthetic construct
MPAAKRVKLDGGDKKYSIGLDIGTNSVGWAVITDEYKVPSKKFKVLGNTDRHSIKKNLIGALLFDSGETAEATRLKRTARRRYTRRKNRICYLQEIFSNEMAKVDDSFFHRLEESFLVEEDKKHERHPIFGNIVDEVAYHEKYPTIYHLRKKLVDSTDKADLRLIYLALAHMIKFRGHFLIEGDLNPDNSDVDKLFIQLVQTYNQLFEENPINASGVDAKAILSARLSKSRRLENLIAQLPGEKKNGLFGNLIALSLGLTPNFKSNFDLAEDAKLQLSKDTYDDDLDNLLAQIGDQYADLFLAAKNLSDAILLSDILRVNTEITKAPLSASMIKRYDEHHQDLTLLKALVRQQLPEKYKEIFFDQSKNGYAGYIDGGASQEEFYKFIKPILEKMDGTEELLVKLNREDLLRKQRTFDNGSIPHQIHLGELHAILRRQEDFYPFLKDNREKIEKILTFRIPYYVGPLARGNSRFAWMTRKSEETITPWNFEEVVDKGASAQSFIERMTNFDKNLPNEKVLPKHSLLYEYFTVYNELTKVKYVTEGMRKPAFLSGEQKKAIVDLLFKTNRKVTVKQLKEDYFKKIECFDSVEISGVEDRFNASLGTYHDLLKIIKDKDFLDNEENEDILEDIVLTLTLFEDREMIEERLKTYAHLFDDKVMKQLKRRRYTGWGRLSRKLINGIRDKQSGKTILDFLKSDGFANRNFMQLIHDDSLTFKEDIQKAQVSGQGDSLHEHIANLAGSPAIKKGILQTVKVVDELVKVMGRHKPENIVIEMARENQTTQKGQKNSRERMKRIEEGIKELGSQILKEHPVENTQLQNEKLYLYYLQNGRDMYVDQELDINRLSDYDVDHIVPQSFLKDDSIDNKVLTRSDKARGKSDNVPSEEVVKKMKNYWRQLLNAKLITQRKFDNLTKAERGGLSELDKAGFIKRQLVETRQITKHVAQILDSRMNTKYDENDKLIREVKVITLKSKLVSDFRKDFQFYKVREINNYHHAHDAYLNAVVGTALIKKYPKLESEFVYGDYKVYDVRKMIAKSEQEIGKATAKYFFYSNIMNFFKTEITLANGEIRKRPLIETNGETGEIVWDKGRDFATVRKVLSMPQVNIVKKTEVQTGGFSKESILPKRNSDKLIARKKDWDPKKYGGFDSPTVAYSVLVVAKVEKGKSKKLKSVKELLGITIMERSSFEKNPIDFLEAKGYKEVKKDLIIKLPKYSLFELENGRKRMLASAGELQKGNELALPSKYVNFLYLASHYEKLKGSPEDNEQKQLFVEQHKHYLDEIIEQISEFSKRVILADANLDKVLSAYNKHRDKPIREQAENIIHLFTLTNLGAPAAFKYFDTTIDRKRYTSTKEVLDATLIHQSITGLYETRIDLSQLGGDGGGGGGGGRDIMKDIKVRLMTDSPDDSQDLMIGAIESNLFADQISWKSDQPVWLNQWPLKQEKLQALQQLVTEQLQLGHLEESNSPWNTPVFVIKKKSGKWRLLQDLRAVNATMHDMGALQPGLPSPVAVPKGWEIIIIDLQDCFFNIKLHPEDCKRFAFSVPSPNFKRPYQRFQWKVLPQGMKNSPTLCQKFVDKAILTVRDKYQDSYIVHYMDDILLAHPSRSIVDEILTSMIQALNKHGLVVSTEKIQKYDNLKYLGTHIQGDSVSYQKLQIRTDKLRTLNDFQKLLGNINWIRPFLKLTTGELKPLFEILNGDSNPISTRKLTPEACKALQLMNERLSTARVKRLDLSQPWSLCILKTEYTPTACLWQDGVVEWIHLPHISPKVITPYDIFCTQLIIKGRHRSKELFSKDPDYIVVPYTKVQFDLLLQEKEDWPISLLGFLGEVHFHLPKDPLLTFTLQTAIIFPHMTSTTPLEKGIVIFTDGSANGRSVTYIQGREPIIKENTQNTAQQAEIVAVITAFEEVSQPFNLYTDSKYVTGLFPEIETATLSPRTKIYTELKHLQRLIHKRQEKFYIGHIRGHTGLPGPLAQGNAYADSLTRILTAGKRTADGSEFEKRTADGSEFESPKKKAKVE

SEQ ID NO: 3211 - protein, 2019 aa, synthetic construct
MPAAKRVKLDGGDKKYSIGLDIGTNSVGWAVITDEYKVPSKKFKVLGNTDRHSIKKNLIGALLFDSGETAEATRLKRTARRRYTRRKNRICYLQEIFSNEMAKVDDSFFHRLEESFLVEEDKKHERHPIFGNIVDEVAYHEKYPTIYHLRKKLVDSTDKADLRLIYLALAHMIKFRGHFLIEGDLNPDNSDVDKLFIQLVQTYNQLFEENPINASGVDAKAILSARLSKSRRLENLIAQLPGEKKNGLFGNLIALSLGLTPNFKSNFDLAEDAKLQLSKDTYDDDLDNLLAQIGDQYADLFLAAKNLSDAILLSDILRVNTEITKAPLSASMIKRYDEHHQDLTLLKALVRQQLPEKYKEIFFDQSKNGYAGYIDGGASQEEFYKFIKPILEKMDGTEELLVKLNREDLLRKQRTFDNGSIPHQIHLGELHAILRRQEDFYPFLKDNREKIEKILTFRIPYYVGPLARGNSRFAWMTRKSEETITPWNFEEVVDKGASAQSFIERMTNFDKNLPNEKVLPKHSLLYEYFTVYNELTKVKYVTEGMRKPAFLSGEQKKAIVDLLFKTNRKVTVKQLKEDYFKKIECFDSVEISGVEDRFNASLGTYHDLLKIIKDKDFLDNEENEDILEDIVLTLTLFEDREMIEERLKTYAHLFDDKVMKQLKRRRYTGWGRLSRKLINGIRDKQSGKTILDFLKSDGFANRNFMQLIHDDSLTFKEDIQKAQVSGQGDSLHEHIANLAGSPAIKKGILQTVKVVDELVKVMGRHKPENIVIEMARENQTTQKGQKNSRERMKRIEEGIKELGSQILKEHPVENTQLQNEKLYLYYLQNGRDMYVDQELDINRLSDYDVDHIVPQSFLKDDSIDNKVLTRSDKARGKSDNVPSEEVVKKMKNYWRQLLNAKLITQRKFDNLTKAERGGLSELDKAGFIKRQLVETRQITKHVAQILDSRMNTKYDENDKLIREVKVITLKSKLVSDFRKDFQFYKVREINNYHHAHDAYLNAVVGTALIKKYPKLESEFVYGDYKVYDVRKMIAKSEQEIGKATAKYFFYSNIMNFFKTEITLANGEIRKRPLIETNGETGEIVWDKGRDFATVRKVLSMPQVNIVKKTEVQTGGFSKESILPKRNSDKLIARKKDWDPKKYGGFDSPTVAYSVLVVAKVEKGKSKKLKSVKELLGITIMERSSFEKNPIDFLEAKGYKEVKKDLIIKLPKYSLFELENGRKRMLASAGELQKGNELALPSKYVNFLYLASHYEKLKGSPEDNEQKQLFVEQHKHYLDEIIEQISEFSKRVILADANLDKVLSAYNKHRDKPIREQAENIIHLFTLTNLGAPAAFKYFDTTIDRKRYTSTKEVLDATLIHQSITGLYETRIDLSQLGGDGGGSSGGGGGGRDIMKDIKVRLMTDSPDDSQDLMIGAIESNLFADQISWKSDQPVWLNQWPLKQEKLQALQQLVTEQLQLGHLEESNSPWNTPVFVIKKKSGKWRLLQDLRAVNATMHDMGALQPGLPSPVAVPKGWEIIIIDLQDCFFNIKLHPEDCKRFAFSVPSPNFKRPYQRFQWKVLPQGMKNSPTLCQKFVDKAILTVRDKYQDSYIVHYMDDILLAHPSRSIVDEILTSMIQALNKHGLVVSTEKIQKYDNLKYLGTHIQGDSVSYQKLQIRTDKLRTLNDFQKLLGNINWIRPFLKLTTGELKPLFEILNGDSNPISTRKLTPEACKALQLMNERLSTARVKRLDLSQPWSLCILKTEYTPTACLWQDGVVEWIHLPHISPKVITPYDIFCTQLIIKGRHRSKELFSKDPDYIVVPYTKVQFDLLLQEKEDWPISLLGFLGEVHFHLPKDPLLTFTLQTAIIFPHMTSTTPLEKGIVIFTDGSANGRSVTYIQGREPIIKENTQNTAQQAEIVAVITAFEEVSQPFNLYTDSKYVTGLFPEIETATLSPRTKIYTELKHLQRLIHKRQEKFYIGHIRGHTGLPGPLAQGNAYADSLTRILTAGKRTADGSEFEKRTADGSEFESPKKKAKVE

SEQ ID NO: 3212 - protein, 2020 aa, synthetic construct
MPAAKRVKLDGGDKKYSIGLDIGTNSVGWAVITDEYKVPSKKFKVLGNTDRHSIKKNLIGALLFDSGETAEATRLKRTARRRYTRRKNRICYLQEIFSNEMAKVDDSFFHRLEESFLVEEDKKHERHPIFGNIVDEVAYHEKYPTIYHLRKKLVDSTDKADLRLIYLALAHMIKFRGHFLIEGDLNPDNSDVDKLFIQLVQTYNQLFEENPINASGVDAKAILSARLSKSRRLENLIAQLPGEKKNGLFGNLIALSLGLTPNFKSNFDLAEDAKLQLSKDTYDDDLDNLLAQIGDQYADLFLAAKNLSDAILLSDILRVNTEITKAPLSASMIKRYDEHHQDLTLLKALVRQQLPEKYKEIFFDQSKNGYAGYIDGGASQEEFYKFIKPILEKMDGTEELLVKLNREDLLRKQRTFDNGSIPHQIHLGELHAILRRQEDFYPFLKDNREKIEKILTFRIPYYVGPLARGNSRFAWMTRKSEETITPWNFEEVVDKGASAQSFIERMTNFDKNLPNEKVLPKHSLLYEYFTVYNELTKVKYVTEGMRKPAFLSGEQKKAIVDLLFKTNRKVTVKQLKEDYFKKIECFDSVEISGVEDRFNASLGTYHDLLKIIKDKDFLDNEENEDILEDIVLTLTLFEDREMIEERLKTYAHLFDDKVMKQLKRRRYTGWGRLSRKLINGIRDKQSGKTILDFLKSDGFANRNFMQLIHDDSLTFKEDIQKAQVSGQGDSLHEHIANLAGSPAIKKGILQTVKVVDELVKVMGRHKPENIVIEMARENQTTQKGQKNSRERMKRIEEGIKELGSQILKEHPVENTQLQNEKLYLYYLQNGRDMYVDQELDINRLSDYDVDHIVPQSFLKDDSIDNKVLTRSDKARGKSDNVPSEEVVKKMKNYWRQLLNAKLITQRKFDNLTKAERGGLSELDKAGFIKRQLVETRQITKHVAQILDSRMNTKYDENDKLIREVKVITLKSKLVSDFRKDFQFYKVREINNYHHAHDAYLNAVVGTALIKKYPKLESEFVYGDYKVYDVRKMIAKSEQEIGKATAKYFFYSNIMNFFKTEITLANGEIRKRPLIETNGETGEIVWDKGRDFATVRKVLSMPQVNIVKKTEVQTGGFSKESILPKRNSDKLIARKKDWDPKKYGGFDSPTVAYSVLVVAKVEKGKSKKLKSVKELLGITIMERSSFEKNPIDFLEAKGYKEVKKDLIIKLPKYSLFELENGRKRMLASAGELQKGNELALPSKYVNFLYLASHYEKLKGSPEDNEQKQLFVEQHKHYLDEIIEQISEFSKRVILADANLDKVLSAYNKHRDKPIREQAENIIHLFTLTNLGAPAAFKYFDTTIDRKRYTSTKEVLDATLIHQSITGLYETRIDLSQLGGDGGGGGGGGGGGGRDIMKDIKVRLMTDSPDDSQDLMIGAIESNLFADQISWKSDQPVWLNQWPLKQEKLQALQQLVTEQLQLGHLEESNSPWNTPVFVIKKKSGKWRLLQDLRAVNATMHDMGALQPGLPSPVAVPKGWEIIIIDLQDCFFNIKLHPEDCKRFAFSVPSPNFKRPYQRFQWKVLPQGMKNSPTLCQKFVDKAILTVRDKYQDSYIVHYMDDILLAHPSRSIVDEILTSMIQALNKHGLVVSTEKIQKYDNLKYLGTHIQGDSVSYQKLQIRTDKLRTLNDFQKLLGNINWIRPFLKLTTGELKPLFEILNGDSNPISTRKLTPEACKALQLMNERLSTARVKRLDLSQPWSLCILKTEYTPTACLWQDGVVEWIHLPHISPKVITPYDIFCTQLIIKGRHRSKELFSKDPDYIVVPYTKVQFDLLLQEKEDWPISLLGFLGEVHFHLPKDPLLTFTLQTAIIFPHMTSTTPLEKGIVIFTDGSANGRSVTYIQGREPIIKENTQNTAQQAEIVAVITAFEEVSQPFNLYTDSKYVTGLFPEIETATLSPRTKIYTELKHLQRLIHKRQEKFYIGHIRGHTGLPGPLAQGNAYADSLTRILTAGKRTADGSEFEKRTADGSEFESPKKKAKVE

SEQ ID NO: 3213 - protein, 2024 aa, synthetic construct
MPAAKRVKLDGGDKKYSIGLDIGTNSVGWAVITDEYKVPSKKFKVLGNTDRHSIKKNLIGALLFDSGETAEATRLKRTARRRYTRRKNRICYLQEIFSNEMAKVDDSFFHRLEESFLVEEDKKHERHPIFGNIVDEVAYHEKYPTIYHLRKKLVDSTDKADLRLIYLALAHMIKFRGHFLIEGDLNPDNSDVDKLFIQLVQTYNQLFEENPINASGVDAKAILSARLSKSRRLENLIAQLPGEKKNGLFGNLIALSLGLTPNFKSNFDLAEDAKLQLSKDTYDDDLDNLLAQIGDQYADLFLAAKNLSDAILLSDILRVNTEITKAPLSASMIKRYDEHHQDLTLLKALVRQQLPEKYKEIFFDQSKNGYAGYIDGGASQEEFYKFIKPILEKMDGTEELLVKLNREDLLRKQRTFDNGSIPHQIHLGELHAILRRQEDFYPFLKDNREKIEKILTFRIPYYVGPLARGNSRFAWMTRKSEETITPWNFEEVVDKGASAQSFIERMTNFDKNLPNEKVLPKHSLLYEYFTVYNELTKVKYVTEGMRKPAFLSGEQKKAIVDLLFKTNRKVTVKQLKEDYFKKIECFDSVEISGVEDRFNASLGTYHDLLKIIKDKDFLDNEENEDILEDIVLTLTLFEDREMIEERLKTYAHLFDDKVMKQLKRRRYTGWGRLSRKLINGIRDKQSGKTILDFLKSDGFANRNFMQLIHDDSLTFKEDIQKAQVSGQGDSLHEHIANLAGSPAIKKGILQTVKVVDELVKVMGRHKPENIVIEMARENQTTQKGQKNSRERMKRIEEGIKELGSQILKEHPVENTQLQNEKLYLYYLQNGRDMYVDQELDINRLSDYDVDHIVPQSFLKDDSIDNKVLTRSDKARGKSDNVPSEEVVKKMKNYWRQLLNAKLITQRKFDNLTKAERGGLSELDKAGFIKRQLVETRQITKHVAQILDSRMNTKYDENDKLIREVKVITLKSKLVSDFRKDFQFYKVREINNYHHAHDAYLNAVVGTALIKKYPKLESEFVYGDYKVYDVRKMIAKSEQEIGKATAKYFFYSNIMNFFKTEITLANGEIRKRPLIETNGETGEIVWDKGRDFATVRKVLSMPQVNIVKKTEVQTGGFSKESILPKRNSDKLIARKKDWDPKKYGGFDSPTVAYSVLVVAKVEKGKSKKLKSVKELLGITIMERSSFEKNPIDFLEAKGYKEVKKDLIIKLPKYSLFELENGRKRMLASAGELQKGNELALPSKYVNFLYLASHYEKLKGSPEDNEQKQLFVEQHKHYLDEIIEQISEFSKRVILADANLDKVLSAYNKHRDKPIREQAENIIHLFTLTNLGAPAAFKYFDTTIDRKRYTSTKEVLDATLIHQSITGLYETRIDLSQLGGDGGGGGEAAAKPAPGGGRDIMKDIKVRLMTDSPDDSQDLMIGAIESNLFADQISWKSDQPVWLNQWPLKQEKLQALQQLVTEQLQLGHLEESNSPWNTPVFVIKKKSGKWRLLQDLRAVNATMHDMGALQPGLPSPVAVPKGWEIIIIDLQDCFFNIKLHPEDCKRFAFSVPSPNFKRPYQRFQWKVLPQGMKNSPTLCQKFVDKAILTVRDKYQDSYIVHYMDDILLAHPSRSIVDEILTSMIQALNKHGLVVSTEKIQKYDNLKYLGTHIQGDSVSYQKLQIRTDKLRTLNDFQKLLGNINWIRPFLKLTTGELKPLFEILNGDSNPISTRKLTPEACKALQLMNERLSTARVKRLDLSQPWSLCILKTEYTPTACLWQDGVVEWIHLPHISPKVITPYDIFCTQLIIKGRHRSKELFSKDPDYIVVPYTKVQFDLLLQEKEDWPISLLGFLGEVHFHLPKDPLLTFTLQTAIIFPHMTSTTPLEKGIVIFTDGSANGRSVTYIQGREPIIKENTQNTAQQAEIVAVITAFEEVSQPFNLYTDSKYVTGLFPEIETATLSPRTKIYTELKHLQRLIHKRQEKFYIGHIRGHTGLPGPLAQGNAYADSLTRILTAGKRTADGSEFEKRTADGSEFESPKKKAKVE

SEQ ID NO: 3214 - protein, 2024 aa, synthetic construct
MPAAKRVKLDGGDKKYSIGLDIGTNSVGWAVITDEYKVPSKKFKVLGNTDRHSIKKNLIGALLFDSGETAEATRLKRTARRRYTRRKNRICYLQEIFSNEMAKVDDSFFHRLEESFLVEEDKKHERHPIFGNIVDEVAYHEKYPTIYHLRKKLVDSTDKADLRLIYLALAHMIKFRGHFLIEGDLNPDNSDVDKLFIQLVQTYNQLFEENPINASGVDAKAILSARLSKSRRLENLIAQLPGEKKNGLFGNLIALSLGLTPNFKSNFDLAEDAKLQLSKDTYDDDLDNLLAQIGDQYADLFLAAKNLSDAILLSDILRVNTEITKAPLSASMIKRYDEHHQDLTLLKALVRQQLPEKYKEIFFDQSKNGYAGYIDGGASQEEFYKFIKPILEKMDGTEELLVKLNREDLLRKQRTFDNGSIPHQIHLGELHAILRRQEDFYPFLKDNREKIEKILTFRIPYYVGPLARGNSRFAWMTRKSEETITPWNFEEVVDKGASAQSFIERMTNFDKNLPNEKVLPKHSLLYEYFTVYNELTKVKYVTEGMRKPAFLSGEQKKAIVDLLFKTNRKVTVKQLKEDYFKKIECFDSVEISGVEDRFNASLGTYHDLLKIIKDKDFLDNEENEDILEDIVLTLTLFEDREMIEERLKTYAHLFDDKVMKQLKRRRYTGWGRLSRKLINGIRDKQSGKTILDFLKSDGFANRNFMQLIHDDSLTFKEDIQKAQVSGQGDSLHEHIANLAGSPAIKKGILQTVKVVDELVKVMGRHKPENIVIEMARENQTTQKGQKNSRERMKRIEEGIKELGSQILKEHPVENTQLQNEKLYLYYLQNGRDMYVDQELDINRLSDYDVDHIVPQSFLKDDSIDNKVLTRSDKARGKSDNVPSEEVVKKMKNYWRQLLNAKLITQRKFDNLTKAERGGLSELDKAGFIKRQLVETRQITKHVAQILDSRMNTKYDENDKLIREVKVITLKSKLVSDFRKDFQFYKVREINNYHHAHDAYLNAVVGTALIKKYPKLESEFVYGDYKVYDVRKMIAKSEQEIGKATAKYFFYSNIMNFFKTEITLANGEIRKRPLIETNGETGEIVWDKGRDFATVRKVLSMPQVNIVKKTEVQTGGFSKESILPKRNSDKLIARKKDWDPKKYGGFDSPTVAYSVLVVAKVEKGKSKKLKSVKELLGITIMERSSFEKNPIDFLEAKGYKEVKKDLIIKLPKYSLFELENGRKRMLASAGELQKGNELALPSKYVNFLYLASHYEKLKGSPEDNEQKQLFVEQHKHYLDEIIEQISEFSKRVILADANLDKVLSAYNKHRDKPIREQAENIIHLFTLTNLGAPAAFKYFDTTIDRKRYTSTKEVLDATLIHQSITGLYETRIDLSQLGGDGGGGGEAAAKGGSGGGRDIMKDIKVRLMTDSPDDSQDLMIGAIESNLFADQISWKSDQPVWLNQWPLKQEKLQALQQLVTEQLQLGHLEESNSPWNTPVFVIKKKSGKWRLLQDLRAVNATMHDMGALQPGLPSPVAVPKGWEIIIIDLQDCFFNIKLHPEDCKRFAFSVPSPNFKRPYQRFQWKVLPQGMKNSPTLCQKFVDKAILTVRDKYQDSYIVHYMDDILLAHPSRSIVDEILTSMIQALNKHGLVVSTEKIQKYDNLKYLGTHIQGDSVSYQKLQIRTDKLRTLNDFQKLLGNINWIRPFLKLTTGELKPLFEILNGDSNPISTRKLTPEACKALQLMNERLSTARVKRLDLSQPWSLCILKTEYTPTACLWQDGVVEWIHLPHISPKVITPYDIFCTQLIIKGRHRSKELFSKDPDYIVVPYTKVQFDLLLQEKEDWPISLLGFLGEVHFHLPKDPLLTFTLQTAIIFPHMTSTTPLEKGIVIFTDGSANGRSVTYIQGREPIIKENTQNTAQQAEIVAVITAFEEVSQPFNLYTDSKYVTGLFPEIETATLSPRTKIYTELKHLQRLIHKRQEKFYIGHIRGHTGLPGPLAQGNAYADSLTRILTAGKRTADGSEFEKRTADGSEFESPKKKAKVE

SEQ ID NO: 3215 - protein, 2022 aa, synthetic construct
MPAAKRVKLDGGDKKYSIGLDIGTNSVGWAVITDEYKVPSKKFKVLGNTDRHSIKKNLIGALLFDSGETAEATRLKRTARRRYTRRKNRICYLQEIFSNEMAKVDDSFFHRLEESFLVEEDKKHERHPIFGNIVDEVAYHEKYPTIYHLRKKLVDSTDKADLRLIYLALAHMIKFRGHFLIEGDLNPDNSDVDKLFIQLVQTYNQLFEENPINASGVDAKAILSARLSKSRRLENLIAQLPGEKKNGLFGNLIALSLGLTPNFKSNFDLAEDAKLQLSKDTYDDDLDNLLAQIGDQYADLFLAAKNLSDAILLSDILRVNTEITKAPLSASMIKRYDEHHQDLTLLKALVRQQLPEKYKEIFFDQSKNGYAGYIDGGASQEEFYKFIKPILEKMDGTEELLVKLNREDLLRKQRTFDNGSIPHQIHLGELHAILRRQEDFYPFLKDNREKIEKILTFRIPYYVGPLARGNSRFAWMTRKSEETITPWNFEEVVDKGASAQSFIERMTNFDKNLPNEKVLPKHSLLYEYFTVYNELTKVKYVTEGMRKPAFLSGEQKKAIVDLLFKTNRKVTVKQLKEDYFKKIECFDSVEISGVEDRFNASLGTYHDLLKIIKDKDFLDNEENEDILEDIVLTLTLFEDREMIEERLKTYAHLFDDKVMKQLKRRRYTGWGRLSRKLINGIRDKQSGKTILDFLKSDGFANRNFMQLIHDDSLTFKEDIQKAQVSGQGDSLHEHIANLAGSPAIKKGILQTVKVVDELVKVMGRHKPENIVIEMARENQTTQKGQKNSRERMKRIEEGIKELGSQILKEHPVENTQLQNEKLYLYYLQNGRDMYVDQELDINRLSDYDVDHIVPQSFLKDDSIDNKVLTRSDKARGKSDNVPSEEVVKKMKNYWRQLLNAKLITQRKFDNLTKAERGGLSELDKAGFIKRQLVETRQITKHVAQILDSRMNTKYDENDKLIREVKVITLKSKLVSDFRKDFQFYKVREINNYHHAHDAYLNAVVGTALIKKYPKLESEFVYGDYKVYDVRKMIAKSEQEIGKATAKYFFYSNIMNFFKTEITLANGEIRKRPLIETNGETGEIVWDKGRDFATVRKVLSMPQVNIVKKTEVQTGGFSKESILPKRNSDKLIARKKDWDPKKYGGFDSPTVAYSVLVVAKVEKGKSKKLKSVKELLGITIMERSSFEKNPIDFLEAKGYKEVKKDLIIKLPKYSLFELENGRKRMLASAGELQKGNELALPSKYVNFLYLASHYEKLKGSPEDNEQKQLFVEQHKHYLDEIIEQISEFSKRVILADANLDKVLSAYNKHRDKPIREQAENIIHLFTLTNLGAPAAFKYFDTTIDRKRYTSTKEVLDATLIHQSITGLYETRIDLSQLGGDGGPAPGSSGGSGGGRDIMKDIKVRLMTDSPDDSQDLMIGAIESNLFADQISWKSDQPVWLNQWPLKQEKLQALQQLVTEQLQLGHLEESNSPWNTPVFVIKKKSGKWRLLQDLRAVNATMHDMGALQPGLPSPVAVPKGWEIIIIDLQDCFFNIKLHPEDCKRFAFSVPSPNFKRPYQRFQWKVLPQGMKNSPTLCQKFVDKAILTVRDKYQDSYIVHYMDDILLAHPSRSIVDEILTSMIQALNKHGLVVSTEKIQKYDNLKYLGTHIQGDSVSYQKLQIRTDKLRTLNDFQKLLGNINWIRPFLKLTTGELKPLFEILNGDSNPISTRKLTPEACKALQLMNERLSTARVKRLDLSQPWSLCILKTEYTPTACLWQDGVVEWIHLPHISPKVITPYDIFCTQLIIKGRHRSKELFSKDPDYIVVPYTKVQFDLLLQEKEDWPISLLGFLGEVHFHLPKDPLLTFTLQTAIIFPHMTSTTPLEKGIVIFTDGSANGRSVTYIQGREPIIKENTQNTAQQAEIVAVITAFEEVSQPFNLYTDSKYVTGLFPEIETATLSPRTKIYTELKHLQRLIHKRQEKFYIGHIRGHTGLPGPLAQGNAYADSLTRILTAGKRTADGSEFEKRTADGSEFESPKKKAKVE

SEQ ID NO: 3216 - protein, 2043 aa, synthetic construct
MPAAKRVKLDGGDKKYSIGLDIGTNSVGWAVITDEYKVPSKKFKVLGNTDRHSIKKNLIGALLFDSGETAEATRLKRTARRRYTRRKNRICYLQEIFSNEMAKVDDSFFHRLEESFLVEEDKKHERHPIFGNIVDEVAYHEKYPTIYHLRKKLVDSTDKADLRLIYLALAHMIKFRGHFLIEGDLNPDNSDVDKLFIQLVQTYNQLFEENPINASGVDAKAILSARLSKSRRLENLIAQLPGEKKNGLFGNLIALSLGLTPNFKSNFDLAEDAKLQLSKDTYDDDLDNLLAQIGDQYADLFLAAKNLSDAILLSDILRVNTEITKAPLSASMIKRYDEHHQDLTLLKALVRQQLPEKYKEIFFDQSKNGYAGYIDGGASQEEFYKFIKPILEKMDGTEELLVKLNREDLLRKQRTFDNGSIPHQIHLGELHAILRRQEDFYPFLKDNREKIEKILTFRIPYYVGPLARGNSRFAWMTRKSEETITPWNFEEVVDKGASAQSFIERMTNFDKNLPNEKVLPKHSLLYEYFTVYNELTKVKYVTEGMRKPAFLSGEQKKAIVDLLFKTNRKVTVKQLKEDYFKKIECFDSVEISGVEDRFNASLGTYHDLLKIIKDKDFLDNEENEDILEDIVLTLTLFEDREMIEERLKTYAHLFDDKVMKQLKRRRYTGWGRLSRKLINGIRDKQSGKTILDFLKSDGFANRNFMQLIHDDSLTFKEDIQKAQVSGQGDSLHEHIANLAGSPAIKKGILQTVKVVDELVKVMGRHKPENIVIEMARENQTTQKGQKNSRERMKRIEEGIKELGSQILKEHPVENTQLQNEKLYLYYLQNGRDMYVDQELDINRLSDYDVDHIVPQSFLKDDSIDNKVLTRSDKARGKSDNVPSEEVVKKMKNYWRQLLNAKLITQRKFDNLTKAERGGLSELDKAGFIKRQLVETRQITKHVAQILDSRMNTKYDENDKLIREVKVITLKSKLVSDFRKDFQFYKVREINNYHHAHDAYLNAVVGTALIKKYPKLESEFVYGDYKVYDVRKMIAKSEQEIGKATAKYFFYSNIMNFFKTEITLANGEIRKRPLIETNGETGEIVWDKGRDFATVRKVLSMPQVNIVKKTEVQTGGFSKESILPKRNSDKLIARKKDWDPKKYGGFDSPTVAYSVLVVAKVEKGKSKKLKSVKELLGITIMERSSFEKNPIDFLEAKGYKEVKKDLIIKLPKYSLFELENGRKRMLASAGELQKGNELALPSKYVNFLYLASHYEKLKGSPEDNEQKQLFVEQHKHYLDEIIEQISEFSKRVILADANLDKVLSAYNKHRDKPIREQAENIIHLFTLTNLGAPAAFKYFDTTIDRKRYTSTKEVLDATLIHQSITGLYETRIDLSQLGGDGGGGGGSGGGGSGGGGSGGGGSGGGGSGGGGSGGGRDIMKDIKVRLMTDSPDDSQDLMIGAIESNLFADQISWKSDQPVWLNQWPLKQEKLQALQQLVTEQLQLGHLEESNSPWNTPVFVIKKKSGKWRLLQDLRAVNATMHDMGALQPGLPSPVAVPKGWEIIIIDLQDCFFNIKLHPEDCKRFAFSVPSPNFKRPYQRFQWKVLPQGMKNSPTLCQKFVDKAILTVRDKYQDSYIVHYMDDILLAHPSRSIVDEILTSMIQALNKHGLVVSTEKIQKYDNLKYLGTHIQGDSVSYQKLQIRTDKLRTLNDFQKLLGNINWIRPFLKLTTGELKPLFEILNGDSNPISTRKLTPEACKALQLMNERLSTARVKRLDLSQPWSLCILKTEYTPTACLWQDGVVEWIHLPHISPKVITPYDIFCTQLIIKGRHRSKELFSKDPDYIVVPYTKVQFDLLLQEKEDWPISLLGFLGEVHFHLPKDPLLTFTLQTAIIFPHMTSTTPLEKGIVIFTDGSANGRSVTYIQGREPIIKENTQNTAQQAEIVAVITAFEEVSQPFNLYTDSKYVTGLFPEIETATLSPRTKIYTELKHLQRLIHKRQEKFYIGHIRGHTGLPGPLAQGNAYADSLTRILTAGKRTADGSEFEKRTADGSEFESPKKKAKVE

SEQ ID NO: 3217 - protein, 2021 aa, synthetic construct
MPAAKRVKLDGGDKKYSIGLDIGTNSVGWAVITDEYKVPSKKFKVLGNTDRHSIKKNLIGALLFDSGETAEATRLKRTARRRYTRRKNRICYLQEIFSNEMAKVDDSFFHRLEESFLVEEDKKHERHPIFGNIVDEVAYHEKYPTIYHLRKKLVDSTDKADLRLIYLALAHMIKFRGHFLIEGDLNPDNSDVDKLFIQLVQTYNQLFEENPINASGVDAKAILSARLSKSRRLENLIAQLPGEKKNGLFGNLIALSLGLTPNFKSNFDLAEDAKLQLSKDTYDDDLDNLLAQIGDQYADLFLAAKNLSDAILLSDILRVNTEITKAPLSASMIKRYDEHHQDLTLLKALVRQQLPEKYKEIFFDQSKNGYAGYIDGGASQEEFYKFIKPILEKMDGTEELLVKLNREDLLRKQRTFDNGSIPHQIHLGELHAILRRQEDFYPFLKDNREKIEKILTFRIPYYVGPLARGNSRFAWMTRKSEETITPWNFEEVVDKGASAQSFIERMTNFDKNLPNEKVLPKHSLLYEYFTVYNELTKVKYVTEGMRKPAFLSGEQKKAIVDLLFKTNRKVTVKQLKEDYFKKIECFDSVEISGVEDRFNASLGTYHDLLKIIKDKDFLDNEENEDILEDIVLTLTLFEDREMIEERLKTYAHLFDDKVMKQLKRRRYTGWGRLSRKLINGIRDKQSGKTILDFLKSDGFANRNFMQLIHDDSLTFKEDIQKAQVSGQGDSLHEHIANLAGSPAIKKGILQTVKVVDELVKVMGRHKPENIVIEMARENQTTQKGQKNSRERMKRIEEGIKELGSQILKEHPVENTQLQNEKLYLYYLQNGRDMYVDQELDINRLSDYDVDHIVPQSFLKDDSIDNKVLTRSDKARGKSDNVPSEEVVKKMKNYWRQLLNAKLITQRKFDNLTKAERGGLSELDKAGFIKRQLVETRQITKHVAQILDSRMNTKYDENDKLIREVKVITLKSKLVSDFRKDFQFYKVREINNYHHAHDAYLNAVVGTALIKKYPKLESEFVYGDYKVYDVRKMIAKSEQEIGKATAKYFFYSNIMNFFKTEITLANGEIRKRPLIETNGETGEIVWDKGRDFATVRKVLSMPQVNIVKKTEVQTGGFSKESILPKRNSDKLIARKKDWDPKKYGGFDSPTVAYSVLVVAKVEKGKSKKLKSVKELLGITIMERSSFEKNPIDFLEAKGYKEVKKDLIIKLPKYSLFELENGRKRMLASAGELQKGNELALPSKYVNFLYLASHYEKLKGSPEDNEQKQLFVEQHKHYLDEIIEQISEFSKRVILADANLDKVLSAYNKHRDKPIREQAENIIHLFTLTNLGAPAAFKYFDTTIDRKRYTSTKEVLDATLIHQSITGLYETRIDLSQLGGDGGPAPEAAAKGGGRDIMKDIKVRLMTDSPDDSQDLMIGAIESNLFADQISWKSDQPVWLNQWPLKQEKLQALQQLVTEQLQLGHLEESNSPWNTPVFVIKKKSGKWRLLQDLRAVNATMHDMGALQPGLPSPVAVPKGWEIIIIDLQDCFFNIKLHPEDCKRFAFSVPSPNFKRPYQRFQWKVLPQGMKNSPTLCQKFVDKAILTVRDKYQDSYIVHYMDDILLAHPSRSIVDEILTSMIQALNKHGLVVSTEKIQKYDNLKYLGTHIQGDSVSYQKLQIRTDKLRTLNDFQKLLGNINWIRPFLKLTTGELKPLFEILNGDSNPISTRKLTPEACKALQLMNERLSTARVKRLDLSQPWSLCILKTEYTPTACLWQDGVVEWIHLPHISPKVITPYDIFCTQLIIKGRHRSKELFSKDPDYIVVPYTKVQFDLLLQEKEDWPISLLGFLGEVHFHLPKDPLLTFTLQTAIIFPHMTSTTPLEKGIVIFTDGSANGRSVTYIQGREPIIKENTQNTAQQAEIVAVITAFEEVSQPFNLYTDSKYVTGLFPEIETATLSPRTKIYTELKHLQRLIHKRQEKFYIGHIRGHTGLPGPLAQGNAYADSLTRILTAGKRTADGSEFEKRTADGSEFESPKKKAKVE

SEQ ID NO: 3218 - protein, 2018 aa, synthetic construct
MPAAKRVKLDGGDKKYSIGLDIGTNSVGWAVITDEYKVPSKKFKVLGNTDRHSIKKNLIGALLFDSGETAEATRLKRTARRRYTRRKNRICYLQEIFSNEMAKVDDSFFHRLEESFLVEEDKKHERHPIFGNIVDEVAYHEKYPTIYHLRKKLVDSTDKADLRLIYLALAHMIKFRGHFLIEGDLNPDNSDVDKLFIQLVQTYNQLFEENPINASGVDAKAILSARLSKSRRLENLIAQLPGEKKNGLFGNLIALSLGLTPNFKSNFDLAEDAKLQLSKDTYDDDLDNLLAQIGDQYADLFLAAKNLSDAILLSDILRVNTEITKAPLSASMIKRYDEHHQDLTLLKALVRQQLPEKYKEIFFDQSKNGYAGYIDGGASQEEFYKFIKPILEKMDGTEELLVKLNREDLLRKQRTFDNGSIPHQIHLGELHAILRRQEDFYPFLKDNREKIEKILTFRIPYYVGPLARGNSRFAWMTRKSEETITPWNFEEVVDKGASAQSFIERMTNFDKNLPNEKVLPKHSLLYEYFTVYNELTKVKYVTEGMRKPAFLSGEQKKAIVDLLFKTNRKVTVKQLKEDYFKKIECFDSVEISGVEDRFNASLGTYHDLLKIIKDKDFLDNEENEDILEDIVLTLTLFEDREMIEERLKTYAHLFDDKVMKQLKRRRYTGWGRLSRKLINGIRDKQSGKTILDFLKSDGFANRNFMQLIHDDSLTFKEDIQKAQVSGQGDSLHEHIANLAGSPAIKKGILQTVKVVDELVKVMGRHKPENIVIEMARENQTTQKGQKNSRERMKRIEEGIKELGSQILKEHPVENTQLQNEKLYLYYLQNGRDMYVDQELDINRLSDYDVDHIVPQSFLKDDSIDNKVLTRSDKARGKSDNVPSEEVVKKMKNYWRQLLNAKLITQRKFDNLTKAERGGLSELDKAGFIKRQLVETRQITKHVAQILDSRMNTKYDENDKLIREVKVITLKSKLVSDFRKDFQFYKVREINNYHHAHDAYLNAVVGTALIKKYPKLESEFVYGDYKVYDVRKMIAKSEQEIGKATAKYFFYSNIMNFFKTEITLANGEIRKRPLIETNGETGEIVWDKGRDFATVRKVLSMPQVNIVKKTEVQTGGFSKESILPKRNSDKLIARKKDWDPKKYGGFDSPTVAYSVLVVAKVEKGKSKKLKSVKELLGITIMERSSFEKNPIDFLEAKGYKEVKKDLIIKLPKYSLFELENGRKRMLASAGELQKGNELALPSKYVNFLYLASHYEKLKGSPEDNEQKQLFVEQHKHYLDEIIEQISEFSKRVILADANLDKVLSAYNKHRDKPIREQAENIIHLFTLTNLGAPAAFKYFDTTIDRKRYTSTKEVLDATLIHQSITGLYETRIDLSQLGGDGGPAPAPGGGRDIMKDIKVRLMTDSPDDSQDLMIGAIESNLFADQISWKSDQPVWLNQWPLKQEKLQALQQLVTEQLQLGHLEESNSPWNTPVFVIKKKSGKWRLLQDLRAVNATMHDMGALQPGLPSPVAVPKGWEIIIIDLQDCFFNIKLHPEDCKRFAFSVPSPNFKRPYQRFQWKVLPQGMKNSPTLCQKFVDKAILTVRDKYQDSYIVHYMDDILLAHPSRSIVDEILTSMIQALNKHGLVVSTEKIQKYDNLKYLGTHIQGDSVSYQKLQIRTDKLRTLNDFQKLLGNINWIRPFLKLTTGELKPLFEILNGDSNPISTRKLTPEACKALQLMNERLSTARVKRLDLSQPWSLCILKTEYTPTACLWQDGVVEWIHLPHISPKVITPYDIFCTQLIIKGRHRSKELFSKDPDYIVVPYTKVQFDLLLQEKEDWPISLLGFLGEVHFHLPKDPLLTFTLQTAIIFPHMTSTTPLEKGIVIFTDGSANGRSVTYIQGREPIIKENTQNTAQQAEIVAVITAFEEVSQPFNLYTDSKYVTGLFPEIETATLSPRTKIYTELKHLQRLIHKRQEKFYIGHIRGHTGLPGPLAQGNAYADSLTRILTAGKRTADGSEFEKRTADGSEFESPKKKAKVE

SEQ ID NO: 3219 - protein, 2025 aa, synthetic construct
MPAAKRVKLDGGDKKYSIGLDIGTNSVGWAVITDEYKVPSKKFKVLGNTDRHSIKKNLIGALLFDSGETAEATRLKRTARRRYTRRKNRICYLQEIFSNEMAKVDDSFFHRLEESFLVEEDKKHERHPIFGNIVDEVAYHEKYPTIYHLRKKLVDSTDKADLRLIYLALAHMIKFRGHFLIEGDLNPDNSDVDKLFIQLVQTYNQLFEENPINASGVDAKAILSARLSKSRRLENLIAQLPGEKKNGLFGNLIALSLGLTPNFKSNFDLAEDAKLQLSKDTYDDDLDNLLAQIGDQYADLFLAAKNLSDAILLSDILRVNTEITKAPLSASMIKRYDEHHQDLTLLKALVRQQLPEKYKEIFFDQSKNGYAGYIDGGASQEEFYKFIKPILEKMDGTEELLVKLNREDLLRKQRTFDNGSIPHQIHLGELHAILRRQEDFYPFLKDNREKIEKILTFRIPYYVGPLARGNSRFAWMTRKSEETITPWNFEEVVDKGASAQSFIERMTNFDKNLPNEKVLPKHSLLYEYFTVYNELTKVKYVTEGMRKPAFLSGEQKKAIVDLLFKTNRKVTVKQLKEDYFKKIECFDSVEISGVEDRFNASLGTYHDLLKIIKDKDFLDNEENEDILEDIVLTLTLFEDREMIEERLKTYAHLFDDKVMKQLKRRRYTGWGRLSRKLINGIRDKQSGKTILDFLKSDGFANRNFMQLIHDDSLTFKEDIQKAQVSGQGDSLHEHIANLAGSPAIKKGILQTVKVVDELVKVMGRHKPENIVIEMARENQTTQKGQKNSRERMKRIEEGIKELGSQILKEHPVENTQLQNEKLYLYYLQNGRDMYVDQELDINRLSDYDVDHIVPQSFLKDDSIDNKVLTRSDKARGKSDNVPSEEVVKKMKNYWRQLLNAKLITQRKFDNLTKAERGGLSELDKAGFIKRQLVETRQITKHVAQILDSRMNTKYDENDKLIREVKVITLKSKLVSDFRKDFQFYKVREINNYHHAHDAYLNAVVGTALIKKYPKLESEFVYGDYKVYDVRKMIAKSEQEIGKATAKYFFYSNIMNFFKTEITLANGEIRKRPLIETNGETGEIVWDKGRDFATVRKVLSMPQVNIVKKTEVQTGGFSKESILPKRNSDKLIARKKDWDPKKYGGFDSPTVAYSVLVVAKVEKGKSKKLKSVKELLGITIMERSSFEKNPIDFLEAKGYKEVKKDLIIKLPKYSLFELENGRKRMLASAGELQKGNELALPSKYVNFLYLASHYEKLKGSPEDNEQKQLFVEQHKHYLDEIIEQISEFSKRVILADANLDKVLSAYNKHRDKPIREQAENIIHLFTLTNLGAPAAFKYFDTTIDRKRYTSTKEVLDATLIHQSITGLYETRIDLSQLGGDGGGSAGSAAGSGEFGGGRDIMKDIKVRLMTDSPDDSQDLMIGAIESNLFADQISWKSDQPVWLNQWPLKQEKLQALQQLVTEQLQLGHLEESNSPWNTPVFVIKKKSGKWRLLQDLRAVNATMHDMGALQPGLPSPVAVPKGWEIIIIDLQDCFFNIKLHPEDCKRFAFSVPSPNFKRPYQRFQWKVLPQGMKNSPTLCQKFVDKAILTVRDKYQDSYIVHYMDDILLAHPSRSIVDEILTSMIQALNKHGLVVSTEKIQKYDNLKYLGTHIQGDSVSYQKLQIRTDKLRTLNDFQKLLGNINWIRPFLKLTTGELKPLFEILNGDSNPISTRKLTPEACKALQLMNERLSTARVKRLDLSQPWSLCILKTEYTPTACLWQDGVVEWIHLPHISPKVITPYDIFCTQLIIKGRHRSKELFSKDPDYIVVPYTKVQFDLLLQEKEDWPISLLGFLGEVHFHLPKDPLLTFTLQTAIIFPHMTSTTPLEKGIVIFTDGSANGRSVTYIQGREPIIKENTQNTAQQAEIVAVITAFEEVSQPFNLYTDSKYVTGLFPEIETATLSPRTKIYTELKHLQRLIHKRQEKFYIGHIRGHTGLPGPLAQGNAYADSLTRILTAGKRTADGSEFEKRTADGSEFESPKKKAKVE

SEQ ID NO: 3220 - protein, 2022 aa, synthetic construct
MPAAKRVKLDGGDKKYSIGLDIGTNSVGWAVITDEYKVPSKKFKVLGNTDRHSIKKNLIGALLFDSGETAEATRLKRTARRRYTRRKNRICYLQEIFSNEMAKVDDSFFHRLEESFLVEEDKKHERHPIFGNIVDEVAYHEKYPTIYHLRKKLVDSTDKADLRLIYLALAHMIKFRGHFLIEGDLNPDNSDVDKLFIQLVQTYNQLFEENPINASGVDAKAILSARLSKSRRLENLIAQLPGEKKNGLFGNLIALSLGLTPNFKSNFDLAEDAKLQLSKDTYDDDLDNLLAQIGDQYADLFLAAKNLSDAILLSDILRVNTEITKAPLSASMIKRYDEHHQDLTLLKALVRQQLPEKYKEIFFDQSKNGYAGYIDGGASQEEFYKFIKPILEKMDGTEELLVKLNREDLLRKQRTFDNGSIPHQIHLGELHAILRRQEDFYPFLKDNREKIEKILTFRIPYYVGPLARGNSRFAWMTRKSEETITPWNFEEVVDKGASAQSFIERMTNFDKNLPNEKVLPKHSLLYEYFTVYNELTKVKYVTEGMRKPAFLSGEQKKAIVDLLFKTNRKVTVKQLKEDYFKKIECFDSVEISGVEDRFNASLGTYHDLLKIIKDKDFLDNEENEDILEDIVLTLTLFEDREMIEERLKTYAHLFDDKVMKQLKRRRYTGWGRLSRKLINGIRDKQSGKTILDFLKSDGFANRNFMQLIHDDSLTFKEDIQKAQVSGQGDSLHEHIANLAGSPAIKKGILQTVKVVDELVKVMGRHKPENIVIEMARENQTTQKGQKNSRERMKRIEEGIKELGSQILKEHPVENTQLQNEKLYLYYLQNGRDMYVDQELDINRLSDYDVDHIVPQSFLKDDSIDNKVLTRSDKARGKSDNVPSEEVVKKMKNYWRQLLNAKLITQRKFDNLTKAERGGLSELDKAGFIKRQLVETRQITKHVAQILDSRMNTKYDENDKLIREVKVITLKSKLVSDFRKDFQFYKVREINNYHHAHDAYLNAVVGTALIKKYPKLESEFVYGDYKVYDVRKMIAKSEQEIGKATAKYFFYSNIMNFFKTEITLANGEIRKRPLIETNGETGEIVWDKGRDFATVRKVLSMPQVNIVKKTEVQTGGFSKESILPKRNSDKLIARKKDWDPKKYGGFDSPTVAYSVLVVAKVEKGKSKKLKSVKELLGITIMERSSFEKNPIDFLEAKGYKEVKKDLIIKLPKYSLFELENGRKRMLASAGELQKGNELALPSKYVNFLYLASHYEKLKGSPEDNEQKQLFVEQHKHYLDEIIEQISEFSKRVILADANLDKVLSAYNKHRDKPIREQAENIIHLFTLTNLGAPAAFKYFDTTIDRKRYTSTKEVLDATLIHQSITGLYETRIDLSQLGGDGGPAPGGGGGSGGGRDIMKDIKVRLMTDSPDDSQDLMIGAIESNLFADQISWKSDQPVWLNQWPLKQEKLQALQQLVTEQLQLGHLEESNSPWNTPVFVIKKKSGKWRLLQDLRAVNATMHDMGALQPGLPSPVAVPKGWEIIIIDLQDCFFNIKLHPEDCKRFAFSVPSPNFKRPYQRFQWKVLPQGMKNSPTLCQKFVDKAILTVRDKYQDSYIVHYMDDILLAHPSRSIVDEILTSMIQALNKHGLVVSTEKIQKYDNLKYLGTHIQGDSVSYQKLQIRTDKLRTLNDFQKLLGNINWIRPFLKLTTGELKPLFEILNGDSNPISTRKLTPEACKALQLMNERLSTARVKRLDLSQPWSLCILKTEYTPTACLWQDGVVEWIHLPHISPKVITPYDIFCTQLIIKGRHRSKELFSKDPDYIVVPYTKVQFDLLLQEKEDWPISLLGFLGEVHFHLPKDPLLTFTLQTAIIFPHMTSTTPLEKGIVIFTDGSANGRSVTYIQGREPIIKENTQNTAQQAEIVAVITAFEEVSQPFNLYTDSKYVTGLFPEIETATLSPRTKIYTELKHLQRLIHKRQEKFYIGHIRGHTGLPGPLAQGNAYADSLTRILTAGKRTADGSEFEKRTADGSEFESPKKKAKVE

SEQ ID NO: 3221 - protein, 2022 aa, synthetic construct
MPAAKRVKLDGGDKKYSIGLDIGTNSVGWAVITDEYKVPSKKFKVLGNTDRHSIKKNLIGALLFDSGETAEATRLKRTARRRYTRRKNRICYLQEIFSNEMAKVDDSFFHRLEESFLVEEDKKHERHPIFGNIVDEVAYHEKYPTIYHLRKKLVDSTDKADLRLIYLALAHMIKFRGHFLIEGDLNPDNSDVDKLFIQLVQTYNQLFEENPINASGVDAKAILSARLSKSRRLENLIAQLPGEKKNGLFGNLIALSLGLTPNFKSNFDLAEDAKLQLSKDTYDDDLDNLLAQIGDQYADLFLAAKNLSDAILLSDILRVNTEITKAPLSASMIKRYDEHHQDLTLLKALVRQQLPEKYKEIFFDQSKNGYAGYIDGGASQEEFYKFIKPILEKMDGTEELLVKLNREDLLRKQRTFDNGSIPHQIHLGELHAILRRQEDFYPFLKDNREKIEKILTFRIPYYVGPLARGNSRFAWMTRKSEETITPWNFEEVVDKGASAQSFIERMTNFDKNLPNEKVLPKHSLLYEYFTVYNELTKVKYVTEGMRKPAFLSGEQKKAIVDLLFKTNRKVTVKQLKEDYFKKIECFDSVEISGVEDRFNASLGTYHDLLKIIKDKDFLDNEENEDILEDIVLTLTLFEDREMIEERLKTYAHLFDDKVMKQLKRRRYTGWGRLSRKLINGIRDKQSGKTILDFLKSDGFANRNFMQLIHDDSLTFKEDIQKAQVSGQGDSLHEHIANLAGSPAIKKGILQTVKVVDELVKVMGRHKPENIVIEMARENQTTQKGQKNSRERMKRIEEGIKELGSQILKEHPVENTQLQNEKLYLYYLQNGRDMYVDQELDINRLSDYDVDHIVPQSFLKDDSIDNKVLTRSDKARGKSDNVPSEEVVKKMKNYWRQLLNAKLITQRKFDNLTKAERGGLSELDKAGFIKRQLVETRQITKHVAQILDSRMNTKYDENDKLIREVKVITLKSKLVSDFRKDFQFYKVREINNYHHAHDAYLNAVVGTALIKKYPKLESEFVYGDYKVYDVRKMIAKSEQEIGKATAKYFFYSNIMNFFKTEITLANGEIRKRPLIETNGETGEIVWDKGRDFATVRKVLSMPQVNIVKKTEVQTGGFSKESILPKRNSDKLIARKKDWDPKKYGGFDSPTVAYSVLVVAKVEKGKSKKLKSVKELLGITIMERSSFEKNPIDFLEAKGYKEVKKDLIIKLPKYSLFELENGRKRMLASAGELQKGNELALPSKYVNFLYLASHYEKLKGSPEDNEQKQLFVEQHKHYLDEIIEQISEFSKRVILADANLDKVLSAYNKHRDKPIREQAENIIHLFTLTNLGAPAAFKYFDTTIDRKRYTSTKEVLDATLIHQSITGLYETRIDLSQLGGDGGPAPAPAPAPGGGRDIMKDIKVRLMTDSPDDSQDLMIGAIESNLFADQISWKSDQPVWLNQWPLKQEKLQALQQLVTEQLQLGHLEESNSPWNTPVFVIKKKSGKWRLLQDLRAVNATMHDMGALQPGLPSPVAVPKGWEIIIIDLQDCFFNIKLHPEDCKRFAFSVPSPNFKRPYQRFQWKVLPQGMKNSPTLCQKFVDKAILTVRDKYQDSYIVHYMDDILLAHPSRSIVDEILTSMIQALNKHGLVVSTEKIQKYDNLKYLGTHIQGDSVSYQKLQIRTDKLRTLNDFQKLLGNINWIRPFLKLTTGELKPLFEILNGDSNPISTRKLTPEACKALQLMNERLSTARVKRLDLSQPWSLCILKTEYTPTACLWQDGVVEWIHLPHISPKVITPYDIFCTQLIIKGRHRSKELFSKDPDYIVVPYTKVQFDLLLQEKEDWPISLLGFLGEVHFHLPKDPLLTFTLQTAIIFPHMTSTTPLEKGIVIFTDGSANGRSVTYIQGREPIIKENTQNTAQQAEIVAVITAFEEVSQPFNLYTDSKYVTGLFPEIETATLSPRTKIYTELKHLQRLIHKRQEKFYIGHIRGHTGLPGPLAQGNAYADSLTRILTAGKRTADGSEFEKRTADGSEFESPKKKAKVE

SEQ ID NO: 3222 - protein, 2024 aa, synthetic construct
MPAAKRVKLDGGDKKYSIGLDIGTNSVGWAVITDEYKVPSKKFKVLGNTDRHSIKKNLIGALLFDSGETAEATRLKRTARRRYTRRKNRICYLQEIFSNEMAKVDDSFFHRLEESFLVEEDKKHERHPIFGNIVDEVAYHEKYPTIYHLRKKLVDSTDKADLRLIYLALAHMIKFRGHFLIEGDLNPDNSDVDKLFIQLVQTYNQLFEENPINASGVDAKAILSARLSKSRRLENLIAQLPGEKKNGLFGNLIALSLGLTPNFKSNFDLAEDAKLQLSKDTYDDDLDNLLAQIGDQYADLFLAAKNLSDAILLSDILRVNTEITKAPLSASMIKRYDEHHQDLTLLKALVRQQLPEKYKEIFFDQSKNGYAGYIDGGASQEEFYKFIKPILEKMDGTEELLVKLNREDLLRKQRTFDNGSIPHQIHLGELHAILRRQEDFYPFLKDNREKIEKILTFRIPYYVGPLARGNSRFAWMTRKSEETITPWNFEEVVDKGASAQSFIERMTNFDKNLPNEKVLPKHSLLYEYFTVYNELTKVKYVTEGMRKPAFLSGEQKKAIVDLLFKTNRKVTVKQLKEDYFKKIECFDSVEISGVEDRFNASLGTYHDLLKIIKDKDFLDNEENEDILEDIVLTLTLFEDREMIEERLKTYAHLFDDKVMKQLKRRRYTGWGRLSRKLINGIRDKQSGKTILDFLKSDGFANRNFMQLIHDDSLTFKEDIQKAQVSGQGDSLHEHIANLAGSPAIKKGILQTVKVVDELVKVMGRHKPENIVIEMARENQTTQKGQKNSRERMKRIEEGIKELGSQILKEHPVENTQLQNEKLYLYYLQNGRDMYVDQELDINRLSDYDVDHIVPQSFLKDDSIDNKVLTRSDKARGKSDNVPSEEVVKKMKNYWRQLLNAKLITQRKFDNLTKAERGGLSELDKAGFIKRQLVETRQITKHVAQILDSRMNTKYDENDKLIREVKVITLKSKLVSDFRKDFQFYKVREINNYHHAHDAYLNAVVGTALIKKYPKLESEFVYGDYKVYDVRKMIAKSEQEIGKATAKYFFYSNIMNFFKTEITLANGEIRKRPLIETNGETGEIVWDKGRDFATVRKVLSMPQVNIVKKTEVQTGGFSKESILPKRNSDKLIARKKDWDPKKYGGFDSPTVAYSVLVVAKVEKGKSKKLKSVKELLGITIMERSSFEKNPIDFLEAKGYKEVKKDLIIKLPKYSLFELENGRKRMLASAGELQKGNELALPSKYVNFLYLASHYEKLKGSPEDNEQKQLFVEQHKHYLDEIIEQISEFSKRVILADANLDKVLSAYNKHRDKPIREQAENIIHLFTLTNLGAPAAFKYFDTTIDRKRYTSTKEVLDATLIHQSITGLYETRIDLSQLGGDGGPAPEAAAKGGSGGGRDIMKDIKVRLMTDSPDDSQDLMIGAIESNLFADQISWKSDQPVWLNQWPLKQEKLQALQQLVTEQLQLGHLEESNSPWNTPVFVIKKKSGKWRLLQDLRAVNATMHDMGALQPGLPSPVAVPKGWEIIIIDLQDCFFNIKLHPEDCKRFAFSVPSPNFKRPYQRFQWKVLPQGMKNSPTLCQKFVDKAILTVRDKYQDSYIVHYMDDILLAHPSRSIVDEILTSMIQALNKHGLVVSTEKIQKYDNLKYLGTHIQGDSVSYQKLQIRTDKLRTLNDFQKLLGNINWIRPFLKLTTGELKPLFEILNGDSNPISTRKLTPEACKALQLMNERLSTARVKRLDLSQPWSLCILKTEYTPTACLWQDGVVEWIHLPHISPKVITPYDIFCTQLIIKGRHRSKELFSKDPDYIVVPYTKVQFDLLLQEKEDWPISLLGFLGEVHFHLPKDPLLTFTLQTAIIFPHMTSTTPLEKGIVIFTDGSANGRSVTYIQGREPIIKENTQNTAQQAEIVAVITAFEEVSQPFNLYTDSKYVTGLFPEIETATLSPRTKIYTELKHLQRLIHKRQEKFYIGHIRGHTGLPGPLAQGNAYADSLTRILTAGKRTADGSEFEKRTADGSEFESPKKKAKVE

SEQ ID NO: 3223 - protein, 2022 aa, synthetic construct
MPAAKRVKLDGGDKKYSIGLDIGTNSVGWAVITDEYKVPSKKFKVLGNTDRHSIKKNLIGALLFDSGETAEATRLKRTARRRYTRRKNRICYLQEIFSNEMAKVDDSFFHRLEESFLVEEDKKHERHPIFGNIVDEVAYHEKYPTIYHLRKKLVDSTDKADLRLIYLALAHMIKFRGHFLIEGDLNPDNSDVDKLFIQLVQTYNQLFEENPINASGVDAKAILSARLSKSRRLENLIAQLPGEKKNGLFGNLIALSLGLTPNFKSNFDLAEDAKLQLSKDTYDDDLDNLLAQIGDQYADLFLAAKNLSDAILLSDILRVNTEITKAPLSASMIKRYDEHHQDLTLLKALVRQQLPEKYKEIFFDQSKNGYAGYIDGGASQEEFYKFIKPILEKMDGTEELLVKLNREDLLRKQRTFDNGSIPHQIHLGELHAILRRQEDFYPFLKDNREKIEKILTFRIPYYVGPLARGNSRFAWMTRKSEETITPWNFEEVVDKGASAQSFIERMTNFDKNLPNEKVLPKHSLLYEYFTVYNELTKVKYVTEGMRKPAFLSGEQKKAIVDLLFKTNRKVTVKQLKEDYFKKIECFDSVEISGVEDRFNASLGTYHDLLKIIKDKDFLDNEENEDILEDIVLTLTLFEDREMIEERLKTYAHLFDDKVMKQLKRRRYTGWGRLSRKLINGIRDKQSGKTILDFLKSDGFANRNFMQLIHDDSLTFKEDIQKAQVSGQGDSLHEHIANLAGSPAIKKGILQTVKVVDELVKVMGRHKPENIVIEMARENQTTQKGQKNSRERMKRIEEGIKELGSQILKEHPVENTQLQNEKLYLYYLQNGRDMYVDQELDINRLSDYDVDHIVPQSFLKDDSIDNKVLTRSDKARGKSDNVPSEEVVKKMKNYWRQLLNAKLITQRKFDNLTKAERGGLSELDKAGFIKRQLVETRQITKHVAQILDSRMNTKYDENDKLIREVKVITLKSKLVSDFRKDFQFYKVREINNYHHAHDAYLNAVVGTALIKKYPKLESEFVYGDYKVYDVRKMIAKSEQEIGKATAKYFFYSNIMNFFKTEITLANGEIRKRPLIETNGETGEIVWDKGRDFATVRKVLSMPQVNIVKKTEVQTGGFSKESILPKRNSDKLIARKKDWDPKKYGGFDSPTVAYSVLVVAKVEKGKSKKLKSVKELLGITIMERSSFEKNPIDFLEAKGYKEVKKDLIIKLPKYSLFELENGRKRMLASAGELQKGNELALPSKYVNFLYLASHYEKLKGSPEDNEQKQLFVEQHKHYLDEIIEQISEFSKRVILADANLDKVLSAYNKHRDKPIREQAENIIHLFTLTNLGAPAAFKYFDTTIDRKRYTSTKEVLDATLIHQSITGLYETRIDLSQLGGDGGGGGPAPGSSGGGRDIMKDIKVRLMTDSPDDSQDLMIGAIESNLFADQISWKSDQPVWLNQWPLKQEKLQALQQLVTEQLQLGHLEESNSPWNTPVFVIKKKSGKWRLLQDLRAVNATMHDMGALQPGLPSPVAVPKGWEIIIIDLQDCFFNIKLHPEDCKRFAFSVPSPNFKRPYQRFQWKVLPQGMKNSPTLCQKFVDKAILTVRDKYQDSYIVHYMDDILLAHPSRSIVDEILTSMIQALNKHGLVVSTEKIQKYDNLKYLGTHIQGDSVSYQKLQIRTDKLRTLNDFQKLLGNINWIRPFLKLTTGELKPLFEILNGDSNPISTRKLTPEACKALQLMNERLSTARVKRLDLSQPWSLCILKTEYTPTACLWQDGVVEWIHLPHISPKVITPYDIFCTQLIIKGRHRSKELFSKDPDYIVVPYTKVQFDLLLQEKEDWPISLLGFLGEVHFHLPKDPLLTFTLQTAIIFPHMTSTTPLEKGIVIFTDGSANGRSVTYIQGREPIIKENTQNTAQQAEIVAVITAFEEVSQPFNLYTDSKYVTGLFPEIETATLSPRTKIYTELKHLQRLIHKRQEKFYIGHIRGHTGLPGPLAQGNAYADSLTRILTAGKRTADGSEFEKRTADGSEFESPKKKAKVE

SEQ ID NO: 3224 - protein, 2022 aa, synthetic construct
MPAAKRVKLDGGDKKYSIGLDIGTNSVGWAVITDEYKVPSKKFKVLGNTDRHSIKKNLIGALLFDSGETAEATRLKRTARRRYTRRKNRICYLQEIFSNEMAKVDDSFFHRLEESFLVEEDKKHERHPIFGNIVDEVAYHEKYPTIYHLRKKLVDSTDKADLRLIYLALAHMIKFRGHFLIEGDLNPDNSDVDKLFIQLVQTYNQLFEENPINASGVDAKAILSARLSKSRRLENLIAQLPGEKKNGLFGNLIALSLGLTPNFKSNFDLAEDAKLQLSKDTYDDDLDNLLAQIGDQYADLFLAAKNLSDAILLSDILRVNTEITKAPLSASMIKRYDEHHQDLTLLKALVRQQLPEKYKEIFFDQSKNGYAGYIDGGASQEEFYKFIKPILEKMDGTEELLVKLNREDLLRKQRTFDNGSIPHQIHLGELHAILRRQEDFYPFLKDNREKIEKILTFRIPYYVGPLARGNSRFAWMTRKSEETITPWNFEEVVDKGASAQSFIERMTNFDKNLPNEKVLPKHSLLYEYFTVYNELTKVKYVTEGMRKPAFLSGEQKKAIVDLLFKTNRKVTVKQLKEDYFKKIECFDSVEISGVEDRFNASLGTYHDLLKIIKDKDFLDNEENEDILEDIVLTLTLFEDREMIEERLKTYAHLFDDKVMKQLKRRRYTGWGRLSRKLINGIRDKQSGKTILDFLKSDGFANRNFMQLIHDDSLTFKEDIQKAQVSGQGDSLHEHIANLAGSPAIKKGILQTVKVVDELVKVMGRHKPENIVIEMARENQTTQKGQKNSRERMKRIEEGIKELGSQILKEHPVENTQLQNEKLYLYYLQNGRDMYVDQELDINRLSDYDVDHIVPQSFLKDDSIDNKVLTRSDKARGKSDNVPSEEVVKKMKNYWRQLLNAKLITQRKFDNLTKAERGGLSELDKAGFIKRQLVETRQITKHVAQILDSRMNTKYDENDKLIREVKVITLKSKLVSDFRKDFQFYKVREINNYHHAHDAYLNAVVGTALIKKYPKLESEFVYGDYKVYDVRKMIAKSEQEIGKATAKYFFYSNIMNFFKTEITLANGEIRKRPLIETNGETGEIVWDKGRDFATVRKVLSMPQVNIVKKTEVQTGGFSKESILPKRNSDKLIARKKDWDPKKYGGFDSPTVAYSVLVVAKVEKGKSKKLKSVKELLGITIMERSSFEKNPIDFLEAKGYKEVKKDLIIKLPKYSLFELENGRKRMLASAGELQKGNELALPSKYVNFLYLASHYEKLKGSPEDNEQKQLFVEQHKHYLDEIIEQISEFSKRVILADANLDKVLSAYNKHRDKPIREQAENIIHLFTLTNLGAPAAFKYFDTTIDRKRYTSTKEVLDATLIHQSITGLYETRIDLSQLGGDGGGGSPAPGGGGGGRDIMKDIKVRLMTDSPDDSQDLMIGAIESNLFADQISWKSDQPVWLNQWPLKQEKLQALQQLVTEQLQLGHLEESNSPWNTPVFVIKKKSGKWRLLQDLRAVNATMHDMGALQPGLPSPVAVPKGWEIIIIDLQDCFFNIKLHPEDCKRFAFSVPSPNFKRPYQRFQWKVLPQGMKNSPTLCQKFVDKAILTVRDKYQDSYIVHYMDDILLAHPSRSIVDEILTSMIQALNKHGLVVSTEKIQKYDNLKYLGTHIQGDSVSYQKLQIRTDKLRTLNDFQKLLGNINWIRPFLKLTTGELKPLFEILNGDSNPISTRKLTPEACKALQLMNERLSTARVKRLDLSQPWSLCILKTEYTPTACLWQDGVVEWIHLPHISPKVITPYDIFCTQLIIKGRHRSKELFSKDPDYIVVPYTKVQFDLLLQEKEDWPISLLGFLGEVHFHLPKDPLLTFTLQTAIIFPHMTSTTPLEKGIVIFTDGSANGRSVTYIQGREPIIKENTQNTAQQAEIVAVITAFEEVSQPFNLYTDSKYVTGLFPEIETATLSPRTKIYTELKHLQRLIHKRQEKFYIGHIRGHTGLPGPLAQGNAYADSLTRILTAGKRTADGSEFEKRTADGSEFESPKKKAKVE

SEQ ID NO: 3225 - protein, 2019 aa, synthetic construct
MPAAKRVKLDGGDKKYSIGLDIGTNSVGWAVITDEYKVPSKKFKVLGNTDRHSIKKNLIGALLFDSGETAEATRLKRTARRRYTRRKNRICYLQEIFSNEMAKVDDSFFHRLEESFLVEEDKKHERHPIFGNIVDEVAYHEKYPTIYHLRKKLVDSTDKADLRLIYLALAHMIKFRGHFLIEGDLNPDNSDVDKLFIQLVQTYNQLFEENPINASGVDAKAILSARLSKSRRLENLIAQLPGEKKNGLFGNLIALSLGLTPNFKSNFDLAEDAKLQLSKDTYDDDLDNLLAQIGDQYADLFLAAKNLSDAILLSDILRVNTEITKAPLSASMIKRYDEHHQDLTLLKALVRQQLPEKYKEIFFDQSKNGYAGYIDGGASQEEFYKFIKPILEKMDGTEELLVKLNREDLLRKQRTFDNGSIPHQIHLGELHAILRRQEDFYPFLKDNREKIEKILTFRIPYYVGPLARGNSRFAWMTRKSEETITPWNFEEVVDKGASAQSFIERMTNFDKNLPNEKVLPKHSLLYEYFTVYNELTKVKYVTEGMRKPAFLSGEQKKAIVDLLFKTNRKVTVKQLKEDYFKKIECFDSVEISGVEDRFNASLGTYHDLLKIIKDKDFLDNEENEDILEDIVLTLTLFEDREMIEERLKTYAHLFDDKVMKQLKRRRYTGWGRLSRKLINGIRDKQSGKTILDFLKSDGFANRNFMQLIHDDSLTFKEDIQKAQVSGQGDSLHEHIANLAGSPAIKKGILQTVKVVDELVKVMGRHKPENIVIEMARENQTTQKGQKNSRERMKRIEEGIKELGSQILKEHPVENTQLQNEKLYLYYLQNGRDMYVDQELDINRLSDYDVDHIVPQSFLKDDSIDNKVLTRSDKARGKSDNVPSEEVVKKMKNYWRQLLNAKLITQRKFDNLTKAERGGLSELDKAGFIKRQLVETRQITKHVAQILDSRMNTKYDENDKLIREVKVITLKSKLVSDFRKDFQFYKVREINNYHHAHDAYLNAVVGTALIKKYPKLESEFVYGDYKVYDVRKMIAKSEQEIGKATAKYFFYSNIMNFFKTEITLANGEIRKRPLIETNGETGEIVWDKGRDFATVRKVLSMPQVNIVKKTEVQTGGFSKESILPKRNSDKLIARKKDWDPKKYGGFDSPTVAYSVLVVAKVEKGKSKKLKSVKELLGITIMERSSFEKNPIDFLEAKGYKEVKKDLIIKLPKYSLFELENGRKRMLASAGELQKGNELALPSKYVNFLYLASHYEKLKGSPEDNEQKQLFVEQHKHYLDEIIEQISEFSKRVILADANLDKVLSAYNKHRDKPIREQAENIIHLFTLTNLGAPAAFKYFDTTIDRKRYTSTKEVLDATLIHQSITGLYETRIDLSQLGGDGGGGGGGSGGGRDIMKDIKVRLMTDSPDDSQDLMIGAIESNLFADQISWKSDQPVWLNQWPLKQEKLQALQQLVTEQLQLGHLEESNSPWNTPVFVIKKKSGKWRLLQDLRAVNATMHDMGALQPGLPSPVAVPKGWEIIIIDLQDCFFNIKLHPEDCKRFAFSVPSPNFKRPYQRFQWKVLPQGMKNSPTLCQKFVDKAILTVRDKYQDSYIVHYMDDILLAHPSRSIVDEILTSMIQALNKHGLVVSTEKIQKYDNLKYLGTHIQGDSVSYQKLQIRTDKLRTLNDFQKLLGNINWIRPFLKLTTGELKPLFEILNGDSNPISTRKLTPEACKALQLMNERLSTARVKRLDLSQPWSLCILKTEYTPTACLWQDGVVEWIHLPHISPKVITPYDIFCTQLIIKGRHRSKELFSKDPDYIVVPYTKVQFDLLLQEKEDWPISLLGFLGEVHFHLPKDPLLTFTLQTAIIFPHMTSTTPLEKGIVIFTDGSANGRSVTYIQGREPIIKENTQNTAQQAEIVAVITAFEEVSQPFNLYTDSKYVTGLFPEIETATLSPRTKIYTELKHLQRLIHKRQEKFYIGHIRGHTGLPGPLAQGNAYADSLTRILTAGKRTADGSEFEKRTADGSEFESPKKKAKVE

SEQ ID NO: 3226 - protein, 2024 aa, synthetic construct
MPAAKRVKLDGGDKKYSIGLDIGTNSVGWAVITDEYKVPSKKFKVLGNTDRHSIKKNLIGALLFDSGETAEATRLKRTARRRYTRRKNRICYLQEIFSNEMAKVDDSFFHRLEESFLVEEDKKHERHPIFGNIVDEVAYHEKYPTIYHLRKKLVDSTDKADLRLIYLALAHMIKFRGHFLIEGDLNPDNSDVDKLFIQLVQTYNQLFEENPINASGVDAKAILSARLSKSRRLENLIAQLPGEKKNGLFGNLIALSLGLTPNFKSNFDLAEDAKLQLSKDTYDDDLDNLLAQIGDQYADLFLAAKNLSDAILLSDILRVNTEITKAPLSASMIKRYDEHHQDLTLLKALVRQQLPEKYKEIFFDQSKNGYAGYIDGGASQEEFYKFIKPILEKMDGTEELLVKLNREDLLRKQRTFDNGSIPHQIHLGELHAILRRQEDFYPFLKDNREKIEKILTFRIPYYVGPLARGNSRFAWMTRKSEETITPWNFEEVVDKGASAQSFIERMTNFDKNLPNEKVLPKHSLLYEYFTVYNELTKVKYVTEGMRKPAFLSGEQKKAIVDLLFKTNRKVTVKQLKEDYFKKIECFDSVEISGVEDRFNASLGTYHDLLKIIKDKDFLDNEENEDILEDIVLTLTLFEDREMIEERLKTYAHLFDDKVMKQLKRRRYTGWGRLSRKLINGIRDKQSGKTILDFLKSDGFANRNFMQLIHDDSLTFKEDIQKAQVSGQGDSLHEHIANLAGSPAIKKGILQTVKVVDELVKVMGRHKPENIVIEMARENQTTQKGQKNSRERMKRIEEGIKELGSQILKEHPVENTQLQNEKLYLYYLQNGRDMYVDQELDINRLSDYDVDHIVPQSFLKDDSIDNKVLTRSDKARGKSDNVPSEEVVKKMKNYWRQLLNAKLITQRKFDNLTKAERGGLSELDKAGFIKRQLVETRQITKHVAQILDSRMNTKYDENDKLIREVKVITLKSKLVSDFRKDFQFYKVREINNYHHAHDAYLNAVVGTALIKKYPKLESEFVYGDYKVYDVRKMIAKSEQEIGKATAKYFFYSNIMNFFKTEITLANGEIRKRPLIETNGETGEIVWDKGRDFATVRKVLSMPQVNIVKKTEVQTGGFSKESILPKRNSDKLIARKKDWDPKKYGGFDSPTVAYSVLVVAKVEKGKSKKLKSVKELLGITIMERSSFEKNPIDFLEAKGYKEVKKDLIIKLPKYSLFELENGRKRMLASAGELQKGNELALPSKYVNFLYLASHYEKLKGSPEDNEQKQLFVEQHKHYLDEIIEQISEFSKRVILADANLDKVLSAYNKHRDKPIREQAENIIHLFTLTNLGAPAAFKYFDTTIDRKRYTSTKEVLDATLIHQSITGLYETRIDLSQLGGDGGEAAAKGGGGGSGGGRDIMKDIKVRLMTDSPDDSQDLMIGAIESNLFADQISWKSDQPVWLNQWPLKQEKLQALQQLVTEQLQLGHLEESNSPWNTPVFVIKKKSGKWRLLQDLRAVNATMHDMGALQPGLPSPVAVPKGWEIIIIDLQDCFFNIKLHPEDCKRFAFSVPSPNFKRPYQRFQWKVLPQGMKNSPTLCQKFVDKAILTVRDKYQDSYIVHYMDDILLAHPSRSIVDEILTSMIQALNKHGLVVSTEKIQKYDNLKYLGTHIQGDSVSYQKLQIRTDKLRTLNDFQKLLGNINWIRPFLKLTTGELKPLFEILNGDSNPISTRKLTPEACKALQLMNERLSTARVKRLDLSQPWSLCILKTEYTPTACLWQDGVVEWIHLPHISPKVITPYDIFCTQLIIKGRHRSKELFSKDPDYIVVPYTKVQFDLLLQEKEDWPISLLGFLGEVHFHLPKDPLLTFTLQTAIIFPHMTSTTPLEKGIVIFTDGSANGRSVTYIQGREPIIKENTQNTAQQAEIVAVITAFEEVSQPFNLYTDSKYVTGLFPEIETATLSPRTKIYTELKHLQRLIHKRQEKFYIGHIRGHTGLPGPLAQGNAYADSLTRILTAGKRTADGSEFEKRTADGSEFESPKKKAKVE

SEQ ID NO: 3227 - protein, 2019 aa, synthetic construct
MPAAKRVKLDGGDKKYSIGLDIGTNSVGWAVITDEYKVPSKKFKVLGNTDRHSIKKNLIGALLFDSGETAEATRLKRTARRRYTRRKNRICYLQEIFSNEMAKVDDSFFHRLEESFLVEEDKKHERHPIFGNIVDEVAYHEKYPTIYHLRKKLVDSTDKADLRLIYLALAHMIKFRGHFLIEGDLNPDNSDVDKLFIQLVQTYNQLFEENPINASGVDAKAILSARLSKSRRLENLIAQLPGEKKNGLFGNLIALSLGLTPNFKSNFDLAEDAKLQLSKDTYDDDLDNLLAQIGDQYADLFLAAKNLSDAILLSDILRVNTEITKAPLSASMIKRYDEHHQDLTLLKALVRQQLPEKYKEIFFDQSKNGYAGYIDGGASQEEFYKFIKPILEKMDGTEELLVKLNREDLLRKQRTFDNGSIPHQIHLGELHAILRRQEDFYPFLKDNREKIEKILTFRIPYYVGPLARGNSRFAWMTRKSEETITPWNFEEVVDKGASAQSFIERMTNFDKNLPNEKVLPKHSLLYEYFTVYNELTKVKYVTEGMRKPAFLSGEQKKAIVDLLFKTNRKVTVKQLKEDYFKKIECFDSVEISGVEDRFNASLGTYHDLLKIIKDKDFLDNEENEDILEDIVLTLTLFEDREMIEERLKTYAHLFDDKVMKQLKRRRYTGWGRLSRKLINGIRDKQSGKTILDFLKSDGFANRNFMQLIHDDSLTFKEDIQKAQVSGQGDSLHEHIANLAGSPAIKKGILQTVKVVDELVKVMGRHKPENIVIEMARENQTTQKGQKNSRERMKRIEEGIKELGSQILKEHPVENTQLQNEKLYLYYLQNGRDMYVDQELDINRLSDYDVDHIVPQSFLKDDSIDNKVLTRSDKARGKSDNVPSEEVVKKMKNYWRQLLNAKLITQRKFDNLTKAERGGLSELDKAGFIKRQLVETRQITKHVAQILDSRMNTKYDENDKLIREVKVITLKSKLVSDFRKDFQFYKVREINNYHHAHDAYLNAVVGTALIKKYPKLESEFVYGDYKVYDVRKMIAKSEQEIGKATAKYFFYSNIMNFFKTEITLANGEIRKRPLIETNGETGEIVWDKGRDFATVRKVLSMPQVNIVKKTEVQTGGFSKESILPKRNSDKLIARKKDWDPKKYGGFDSPTVAYSVLVVAKVEKGKSKKLKSVKELLGITIMERSSFEKNPIDFLEAKGYKEVKKDLIIKLPKYSLFELENGRKRMLASAGELQKGNELALPSKYVNFLYLASHYEKLKGSPEDNEQKQLFVEQHKHYLDEIIEQISEFSKRVILADANLDKVLSAYNKHRDKPIREQAENIIHLFTLTNLGAPAAFKYFDTTIDRKRYTSTKEVLDATLIHQSITGLYETRIDLSQLGGDGGGGSPAPGGGRDIMKDIKVRLMTDSPDDSQDLMIGAIESNLFADQISWKSDQPVWLNQWPLKQEKLQALQQLVTEQLQLGHLEESNSPWNTPVFVIKKKSGKWRLLQDLRAVNATMHDMGALQPGLPSPVAVPKGWEIIIIDLQDCFFNIKLHPEDCKRFAFSVPSPNFKRPYQRFQWKVLPQGMKNSPTLCQKFVDKAILTVRDKYQDSYIVHYMDDILLAHPSRSIVDEILTSMIQALNKHGLVVSTEKIQKYDNLKYLGTHIQGDSVSYQKLQIRTDKLRTLNDFQKLLGNINWIRPFLKLTTGELKPLFEILNGDSNPISTRKLTPEACKALQLMNERLSTARVKRLDLSQPWSLCILKTEYTPTACLWQDGVVEWIHLPHISPKVITPYDIFCTQLIIKGRHRSKELFSKDPDYIVVPYTKVQFDLLLQEKEDWPISLLGFLGEVHFHLPKDPLLTFTLQTAIIFPHMTSTTPLEKGIVIFTDGSANGRSVTYIQGREPIIKENTQNTAQQAEIVAVITAFEEVSQPFNLYTDSKYVTGLFPEIETATLSPRTKIYTELKHLQRLIHKRQEKFYIGHIRGHTGLPGPLAQGNAYADSLTRILTAGKRTADGSEFEKRTADGSEFESPKKKAKVE

SEQ ID NO: 3228 - protein, 2024 aa, synthetic construct
MPAAKRVKLDGGDKKYSIGLDIGTNSVGWAVITDEYKVPSKKFKVLGNTDRHSIKKNLIGALLFDSGETAEATRLKRTARRRYTRRKNRICYLQEIFSNEMAKVDDSFFHRLEESFLVEEDKKHERHPIFGNIVDEVAYHEKYPTIYHLRKKLVDSTDKADLRLIYLALAHMIKFRGHFLIEGDLNPDNSDVDKLFIQLVQTYNQLFEENPINASGVDAKAILSARLSKSRRLENLIAQLPGEKKNGLFGNLIALSLGLTPNFKSNFDLAEDAKLQLSKDTYDDDLDNLLAQIGDQYADLFLAAKNLSDAILLSDILRVNTEITKAPLSASMIKRYDEHHQDLTLLKALVRQQLPEKYKEIFFDQSKNGYAGYIDGGASQEEFYKFIKPILEKMDGTEELLVKLNREDLLRKQRTFDNGSIPHQIHLGELHAILRRQEDFYPFLKDNREKIEKILTFRIPYYVGPLARGNSRFAWMTRKSEETITPWNFEEVVDKGASAQSFIERMTNFDKNLPNEKVLPKHSLLYEYFTVYNELTKVKYVTEGMRKPAFLSGEQKKAIVDLLFKTNRKVTVKQLKEDYFKKIECFDSVEISGVEDRFNASLGTYHDLLKIIKDKDFLDNEENEDILEDIVLTLTLFEDREMIEERLKTYAHLFDDKVMKQLKRRRYTGWGRLSRKLINGIRDKQSGKTILDFLKSDGFANRNFMQLIHDDSLTFKEDIQKAQVSGQGDSLHEHIANLAGSPAIKKGILQTVKVVDELVKVMGRHKPENIVIEMARENQTTQKGQKNSRERMKRIEEGIKELGSQILKEHPVENTQLQNEKLYLYYLQNGRDMYVDQELDINRLSDYDVDHIVPQSFLKDDSIDNKVLTRSDKARGKSDNVPSEEVVKKMKNYWRQLLNAKLITQRKFDNLTKAERGGLSELDKAGFIKRQLVETRQITKHVAQILDSRMNTKYDENDKLIREVKVITLKSKLVSDFRKDFQFYKVREINNYHHAHDAYLNAVVGTALIKKYPKLESEFVYGDYKVYDVRKMIAKSEQEIGKATAKYFFYSNIMNFFKTEITLANGEIRKRPLIETNGETGEIVWDKGRDFATVRKVLSMPQVNIVKKTEVQTGGFSKESILPKRNSDKLIARKKDWDPKKYGGFDSPTVAYSVLVVAKVEKGKSKKLKSVKELLGITIMERSSFEKNPIDFLEAKGYKEVKKDLIIKLPKYSLFELENGRKRMLASAGELQKGNELALPSKYVNFLYLASHYEKLKGSPEDNEQKQLFVEQHKHYLDEIIEQISEFSKRVILADANLDKVLSAYNKHRDKPIREQAENIIHLFTLTNLGAPAAFKYFDTTIDRKRYTSTKEVLDATLIHQSITGLYETRIDLSQLGGDGGEAAAKGGSGGGGGGRDIMKDIKVRLMTDSPDDSQDLMIGAIESNLFADQISWKSDQPVWLNQWPLKQEKLQALQQLVTEQLQLGHLEESNSPWNTPVFVIKKKSGKWRLLQDLRAVNATMHDMGALQPGLPSPVAVPKGWEIIIIDLQDCFFNIKLHPEDCKRFAFSVPSPNFKRPYQRFQWKVLPQGMKNSPTLCQKFVDKAILTVRDKYQDSYIVHYMDDILLAHPSRSIVDEILTSMIQALNKHGLVVSTEKIQKYDNLKYLGTHIQGDSVSYQKLQIRTDKLRTLNDFQKLLGNINWIRPFLKLTTGELKPLFEILNGDSNPISTRKLTPEACKALQLMNERLSTARVKRLDLSQPWSLCILKTEYTPTACLWQDGVVEWIHLPHISPKVITPYDIFCTQLIIKGRHRSKELFSKDPDYIVVPYTKVQFDLLLQEKEDWPISLLGFLGEVHFHLPKDPLLTFTLQTAIIFPHMTSTTPLEKGIVIFTDGSANGRSVTYIQGREPIIKENTQNTAQQAEIVAVITAFEEVSQPFNLYTDSKYVTGLFPEIETATLSPRTKIYTELKHLQRLIHKRQEKFYIGHIRGHTGLPGPLAQGNAYADSLTRILTAGKRTADGSEFEKRTADGSEFESPKKKAKVE

SEQ ID NO: 3229 - protein, 2022 aa, synthetic construct
MPAAKRVKLDGGDKKYSIGLDIGTNSVGWAVITDEYKVPSKKFKVLGNTDRHSIKKNLIGALLFDSGETAEATRLKRTARRRYTRRKNRICYLQEIFSNEMAKVDDSFFHRLEESFLVEEDKKHERHPIFGNIVDEVAYHEKYPTIYHLRKKLVDSTDKADLRLIYLALAHMIKFRGHFLIEGDLNPDNSDVDKLFIQLVQTYNQLFEENPINASGVDAKAILSARLSKSRRLENLIAQLPGEKKNGLFGNLIALSLGLTPNFKSNFDLAEDAKLQLSKDTYDDDLDNLLAQIGDQYADLFLAAKNLSDAILLSDILRVNTEITKAPLSASMIKRYDEHHQDLTLLKALVRQQLPEKYKEIFFDQSKNGYAGYIDGGASQEEFYKFIKPILEKMDGTEELLVKLNREDLLRKQRTFDNGSIPHQIHLGELHAILRRQEDFYPFLKDNREKIEKILTFRIPYYVGPLARGNSRFAWMTRKSEETITPWNFEEVVDKGASAQSFIERMTNFDKNLPNEKVLPKHSLLYEYFTVYNELTKVKYVTEGMRKPAFLSGEQKKAIVDLLFKTNRKVTVKQLKEDYFKKIECFDSVEISGVEDRFNASLGTYHDLLKIIKDKDFLDNEENEDILEDIVLTLTLFEDREMIEERLKTYAHLFDDKVMKQLKRRRYTGWGRLSRKLINGIRDKQSGKTILDFLKSDGFANRNFMQLIHDDSLTFKEDIQKAQVSGQGDSLHEHIANLAGSPAIKKGILQTVKVVDELVKVMGRHKPENIVIEMARENQTTQKGQKNSRERMKRIEEGIKELGSQILKEHPVENTQLQNEKLYLYYLQNGRDMYVDQELDINRLSDYDVDHIVPQSFLKDDSIDNKVLTRSDKARGKSDNVPSEEVVKKMKNYWRQLLNAKLITQRKFDNLTKAERGGLSELDKAGFIKRQLVETRQITKHVAQILDSRMNTKYDENDKLIREVKVITLKSKLVSDFRKDFQFYKVREINNYHHAHDAYLNAVVGTALIKKYPKLESEFVYGDYKVYDVRKMIAKSEQEIGKATAKYFFYSNIMNFFKTEITLANGEIRKRPLIETNGETGEIVWDKGRDFATVRKVLSMPQVNIVKKTEVQTGGFSKESILPKRNSDKLIARKKDWDPKKYGGFDSPTVAYSVLVVAKVEKGKSKKLKSVKELLGITIMERSSFEKNPIDFLEAKGYKEVKKDLIIKLPKYSLFELENGRKRMLASAGELQKGNELALPSKYVNFLYLASHYEKLKGSPEDNEQKQLFVEQHKHYLDEIIEQISEFSKRVILADANLDKVLSAYNKHRDKPIREQAENIIHLFTLTNLGAPAAFKYFDTTIDRKRYTSTKEVLDATLIHQSITGLYETRIDLSQLGGDGGGGSPAPGSSGGGRDIMKDIKVRLMTDSPDDSQDLMIGAIESNLFADQISWKSDQPVWLNQWPLKQEKLQALQQLVTEQLQLGHLEESNSPWNTPVFVIKKKSGKWRLLQDLRAVNATMHDMGALQPGLPSPVAVPKGWEIIIIDLQDCFFNIKLHPEDCKRFAFSVPSPNFKRPYQRFQWKVLPQGMKNSPTLCQKFVDKAILTVRDKYQDSYIVHYMDDILLAHPSRSIVDEILTSMIQALNKHGLVVSTEKIQKYDNLKYLGTHIQGDSVSYQKLQIRTDKLRTLNDFQKLLGNINWIRPFLKLTTGELKPLFEILNGDSNPISTRKLTPEACKALQLMNERLSTARVKRLDLSQPWSLCILKTEYTPTACLWQDGVVEWIHLPHISPKVITPYDIFCTQLIIKGRHRSKELFSKDPDYIVVPYTKVQFDLLLQEKEDWPISLLGFLGEVHFHLPKDPLLTFTLQTAIIFPHMTSTTPLEKGIVIFTDGSANGRSVTYIQGREPIIKENTQNTAQQAEIVAVITAFEEVSQPFNLYTDSKYVTGLFPEIETATLSPRTKIYTELKHLQRLIHKRQEKFYIGHIRGHTGLPGPLAQGNAYADSLTRILTAGKRTADGSEFEKRTADGSEFESPKKKAKVE

SEQ ID NO: 3230 - protein, 2024 aa, synthetic construct
MPAAKRVKLDGGDKKYSIGLDIGTNSVGWAVITDEYKVPSKKFKVLGNTDRHSIKKNLIGALLFDSGETAEATRLKRTARRRYTRRKNRICYLQEIFSNEMAKVDDSFFHRLEESFLVEEDKKHERHPIFGNIVDEVAYHEKYPTIYHLRKKLVDSTDKADLRLIYLALAHMIKFRGHFLIEGDLNPDNSDVDKLFIQLVQTYNQLFEENPINASGVDAKAILSARLSKSRRLENLIAQLPGEKKNGLFGNLIALSLGLTPNFKSNFDLAEDAKLQLSKDTYDDDLDNLLAQIGDQYADLFLAAKNLSDAILLSDILRVNTEITKAPLSASMIKRYDEHHQDLTLLKALVRQQLPEKYKEIFFDQSKNGYAGYIDGGASQEEFYKFIKPILEKMDGTEELLVKLNREDLLRKQRTFDNGSIPHQIHLGELHAILRRQEDFYPFLKDNREKIEKILTFRIPYYVGPLARGNSRFAWMTRKSEETITPWNFEEVVDKGASAQSFIERMTNFDKNLPNEKVLPKHSLLYEYFTVYNELTKVKYVTEGMRKPAFLSGEQKKAIVDLLFKTNRKVTVKQLKEDYFKKIECFDSVEISGVEDRFNASLGTYHDLLKIIKDKDFLDNEENEDILEDIVLTLTLFEDREMIEERLKTYAHLFDDKVMKQLKRRRYTGWGRLSRKLINGIRDKQSGKTILDFLKSDGFANRNFMQLIHDDSLTFKEDIQKAQVSGQGDSLHEHIANLAGSPAIKKGILQTVKVVDELVKVMGRHKPENIVIEMARENQTTQKGQKNSRERMKRIEEGIKELGSQILKEHPVENTQLQNEKLYLYYLQNGRDMYVDQELDINRLSDYDVDHIVPQSFLKDDSIDNKVLTRSDKARGKSDNVPSEEVVKKMKNYWRQLLNAKLITQRKFDNLTKAERGGLSELDKAGFIKRQLVETRQITKHVAQILDSRMNTKYDENDKLIREVKVITLKSKLVSDFRKDFQFYKVREINNYHHAHDAYLNAVVGTALIKKYPKLESEFVYGDYKVYDVRKMIAKSEQEIGKATAKYFFYSNIMNFFKTEITLANGEIRKRPLIETNGETGEIVWDKGRDFATVRKVLSMPQVNIVKKTEVQTGGFSKESILPKRNSDKLIARKKDWDPKKYGGFDSPTVAYSVLVVAKVEKGKSKKLKSVKELLGITIMERSSFEKNPIDFLEAKGYKEVKKDLIIKLPKYSLFELENGRKRMLASAGELQKGNELALPSKYVNFLYLASHYEKLKGSPEDNEQKQLFVEQHKHYLDEIIEQISEFSKRVILADANLDKVLSAYNKHRDKPIREQAENIIHLFTLTNLGAPAAFKYFDTTIDRKRYTSTKEVLDATLIHQSITGLYETRIDLSQLGGDGGEAAAKGGSGSSGGGRDIMKDIKVRLMTDSPDDSQDLMIGAIESNLFADQISWKSDQPVWLNQWPLKQEKLQALQQLVTEQLQLGHLEESNSPWNTPVFVIKKKSGKWRLLQDLRAVNATMHDMGALQPGLPSPVAVPKGWEIIIIDLQDCFFNIKLHPEDCKRFAFSVPSPNFKRPYQRFQWKVLPQGMKNSPTLCQKFVDKAILTVRDKYQDSYIVHYMDDILLAHPSRSIVDEILTSMIQALNKHGLVVSTEKIQKYDNLKYLGTHIQGDSVSYQKLQIRTDKLRTLNDFQKLLGNINWIRPFLKLTTGELKPLFEILNGDSNPISTRKLTPEACKALQLMNERLSTARVKRLDLSQPWSLCILKTEYTPTACLWQDGVVEWIHLPHISPKVITPYDIFCTQLIIKGRHRSKELFSKDPDYIVVPYTKVQFDLLLQEKEDWPISLLGFLGEVHFHLPKDPLLTFTLQTAIIFPHMTSTTPLEKGIVIFTDGSANGRSVTYIQGREPIIKENTQNTAQQAEIVAVITAFEEVSQPFNLYTDSKYVTGLFPEIETATLSPRTKIYTELKHLQRLIHKRQEKFYIGHIRGHTGLPGPLAQGNAYADSLTRILTAGKRTADGSEFEKRTADGSEFESPKKKAKVE

SEQ ID NO: 3231 - protein, 2022 aa, synthetic construct
MPAAKRVKLDGGDKKYSIGLDIGTNSVGWAVITDEYKVPSKKFKVLGNTDRHSIKKNLIGALLFDSGETAEATRLKRTARRRYTRRKNRICYLQEIFSNEMAKVDDSFFHRLEESFLVEEDKKHERHPIFGNIVDEVAYHEKYPTIYHLRKKLVDSTDKADLRLIYLALAHMIKFRGHFLIEGDLNPDNSDVDKLFIQLVQTYNQLFEENPINASGVDAKAILSARLSKSRRLENLIAQLPGEKKNGLFGNLIALSLGLTPNFKSNFDLAEDAKLQLSKDTYDDDLDNLLAQIGDQYADLFLAAKNLSDAILLSDILRVNTEITKAPLSASMIKRYDEHHQDLTLLKALVRQQLPEKYKEIFFDQSKNGYAGYIDGGASQEEFYKFIKPILEKMDGTEELLVKLNREDLLRKQRTFDNGSIPHQIHLGELHAILRRQEDFYPFLKDNREKIEKILTFRIPYYVGPLARGNSRFAWMTRKSEETITPWNFEEVVDKGASAQSFIERMTNFDKNLPNEKVLPKHSLLYEYFTVYNELTKVKYVTEGMRKPAFLSGEQKKAIVDLLFKTNRKVTVKQLKEDYFKKIECFDSVEISGVEDRFNASLGTYHDLLKIIKDKDFLDNEENEDILEDIVLTLTLFEDREMIEERLKTYAHLFDDKVMKQLKRRRYTGWGRLSRKLINGIRDKQSGKTILDFLKSDGFANRNFMQLIHDDSLTFKEDIQKAQVSGQGDSLHEHIANLAGSPAIKKGILQTVKVVDELVKVMGRHKPENIVIEMARENQTTQKGQKNSRERMKRIEEGIKELGSQILKEHPVENTQLQNEKLYLYYLQNGRDMYVDQELDINRLSDYDVDHIVPQSFLKDDSIDNKVLTRSDKARGKSDNVPSEEVVKKMKNYWRQLLNAKLITQRKFDNLTKAERGGLSELDKAGFIKRQLVETRQITKHVAQILDSRMNTKYDENDKLIREVKVITLKSKLVSDFRKDFQFYKVREINNYHHAHDAYLNAVVGTALIKKYPKLESEFVYGDYKVYDVRKMIAKSEQEIGKATAKYFFYSNIMNFFKTEITLANGEIRKRPLIETNGETGEIVWDKGRDFATVRKVLSMPQVNIVKKTEVQTGGFSKESILPKRNSDKLIARKKDWDPKKYGGFDSPTVAYSVLVVAKVEKGKSKKLKSVKELLGITIMERSSFEKNPIDFLEAKGYKEVKKDLIIKLPKYSLFELENGRKRMLASAGELQKGNELALPSKYVNFLYLASHYEKLKGSPEDNEQKQLFVEQHKHYLDEIIEQISEFSKRVILADANLDKVLSAYNKHRDKPIREQAENIIHLFTLTNLGAPAAFKYFDTTIDRKRYTSTKEVLDATLIHQSITGLYETRIDLSQLGGDGGGGGGSSPAPGGGRDIMKDIKVRLMTDSPDDSQDLMIGAIESNLFADQISWKSDQPVWLNQWPLKQEKLQALQQLVTEQLQLGHLEESNSPWNTPVFVIKKKSGKWRLLQDLRAVNATMHDMGALQPGLPSPVAVPKGWEIIIIDLQDCFFNIKLHPEDCKRFAFSVPSPNFKRPYQRFQWKVLPQGMKNSPTLCQKFVDKAILTVRDKYQDSYIVHYMDDILLAHPSRSIVDEILTSMIQALNKHGLVVSTEKIQKYDNLKYLGTHIQGDSVSYQKLQIRTDKLRTLNDFQKLLGNINWIRPFLKLTTGELKPLFEILNGDSNPISTRKLTPEACKALQLMNERLSTARVKRLDLSQPWSLCILKTEYTPTACLWQDGVVEWIHLPHISPKVITPYDIFCTQLIIKGRHRSKELFSKDPDYIVVPYTKVQFDLLLQEKEDWPISLLGFLGEVHFHLPKDPLLTFTLQTAIIFPHMTSTTPLEKGIVIFTDGSANGRSVTYIQGREPIIKENTQNTAQQAEIVAVITAFEEVSQPFNLYTDSKYVTGLFPEIETATLSPRTKIYTELKHLQRLIHKRQEKFYIGHIRGHTGLPGPLAQGNAYADSLTRILTAGKRTADGSEFEKRTADGSEFESPKKKAKVE

SEQ ID NO: 3232 - protein, 2024 aa, synthetic construct
MPAAKRVKLDGGDKKYSIGLDIGTNSVGWAVITDEYKVPSKKFKVLGNTDRHSIKKNLIGALLFDSGETAEATRLKRTARRRYTRRKNRICYLQEIFSNEMAKVDDSFFHRLEESFLVEEDKKHERHPIFGNIVDEVAYHEKYPTIYHLRKKLVDSTDKADLRLIYLALAHMIKFRGHFLIEGDLNPDNSDVDKLFIQLVQTYNQLFEENPINASGVDAKAILSARLSKSRRLENLIAQLPGEKKNGLFGNLIALSLGLTPNFKSNFDLAEDAKLQLSKDTYDDDLDNLLAQIGDQYADLFLAAKNLSDAILLSDILRVNTEITKAPLSASMIKRYDEHHQDLTLLKALVRQQLPEKYKEIFFDQSKNGYAGYIDGGASQEEFYKFIKPILEKMDGTEELLVKLNREDLLRKQRTFDNGSIPHQIHLGELHAILRRQEDFYPFLKDNREKIEKILTFRIPYYVGPLARGNSRFAWMTRKSEETITPWNFEEVVDKGASAQSFIERMTNFDKNLPNEKVLPKHSLLYEYFTVYNELTKVKYVTEGMRKPAFLSGEQKKAIVDLLFKTNRKVTVKQLKEDYFKKIECFDSVEISGVEDRFNASLGTYHDLLKIIKDKDFLDNEENEDILEDIVLTLTLFEDREMIEERLKTYAHLFDDKVMKQLKRRRYTGWGRLSRKLINGIRDKQSGKTILDFLKSDGFANRNFMQLIHDDSLTFKEDIQKAQVSGQGDSLHEHIANLAGSPAIKKGILQTVKVVDELVKVMGRHKPENIVIEMARENQTTQKGQKNSRERMKRIEEGIKELGSQILKEHPVENTQLQNEKLYLYYLQNGRDMYVDQELDINRLSDYDVDHIVPQSFLKDDSIDNKVLTRSDKARGKSDNVPSEEVVKKMKNYWRQLLNAKLITQRKFDNLTKAERGGLSELDKAGFIKRQLVETRQITKHVAQILDSRMNTKYDENDKLIREVKVITLKSKLVSDFRKDFQFYKVREINNYHHAHDAYLNAVVGTALIKKYPKLESEFVYGDYKVYDVRKMIAKSEQEIGKATAKYFFYSNIMNFFKTEITLANGEIRKRPLIETNGETGEIVWDKGRDFATVRKVLSMPQVNIVKKTEVQTGGFSKESILPKRNSDKLIARKKDWDPKKYGGFDSPTVAYSVLVVAKVEKGKSKKLKSVKELLGITIMERSSFEKNPIDFLEAKGYKEVKKDLIIKLPKYSLFELENGRKRMLASAGELQKGNELALPSKYVNFLYLASHYEKLKGSPEDNEQKQLFVEQHKHYLDEIIEQISEFSKRVILADANLDKVLSAYNKHRDKPIREQAENIIHLFTLTNLGAPAAFKYFDTTIDRKRYTSTKEVLDATLIHQSITGLYETRIDLSQLGGDGGGSSPAPEAAAKGGGRDIMKDIKVRLMTDSPDDSQDLMIGAIESNLFADQISWKSDQPVWLNQWPLKQEKLQALQQLVTEQLQLGHLEESNSPWNTPVFVIKKKSGKWRLLQDLRAVNATMHDMGALQPGLPSPVAVPKGWEIIIIDLQDCFFNIKLHPEDCKRFAFSVPSPNFKRPYQRFQWKVLPQGMKNSPTLCQKFVDKAILTVRDKYQDSYIVHYMDDILLAHPSRSIVDEILTSMIQALNKHGLVVSTEKIQKYDNLKYLGTHIQGDSVSYQKLQIRTDKLRTLNDFQKLLGNINWIRPFLKLTTGELKPLFEILNGDSNPISTRKLTPEACKALQLMNERLSTARVKRLDLSQPWSLCILKTEYTPTACLWQDGVVEWIHLPHISPKVITPYDIFCTQLIIKGRHRSKELFSKDPDYIVVPYTKVQFDLLLQEKEDWPISLLGFLGEVHFHLPKDPLLTFTLQTAIIFPHMTSTTPLEKGIVIFTDGSANGRSVTYIQGREPIIKENTQNTAQQAEIVAVITAFEEVSQPFNLYTDSKYVTGLFPEIETATLSPRTKIYTELKHLQRLIHKRQEKFYIGHIRGHTGLPGPLAQGNAYADSLTRILTAGKRTADGSEFEKRTADGSEFESPKKKAKVE

SEQ ID NO: 3233 - protein, 2022 aa, synthetic construct
MPAAKRVKLDGGDKKYSIGLDIGTNSVGWAVITDEYKVPSKKFKVLGNTDRHSIKKNLIGALLFDSGETAEATRLKRTARRRYTRRKNRICYLQEIFSNEMAKVDDSFFHRLEESFLVEEDKKHERHPIFGNIVDEVAYHEKYPTIYHLRKKLVDSTDKADLRLIYLALAHMIKFRGHFLIEGDLNPDNSDVDKLFIQLVQTYNQLFEENPINASGVDAKAILSARLSKSRRLENLIAQLPGEKKNGLFGNLIALSLGLTPNFKSNFDLAEDAKLQLSKDTYDDDLDNLLAQIGDQYADLFLAAKNLSDAILLSDILRVNTEITKAPLSASMIKRYDEHHQDLTLLKALVRQQLPEKYKEIFFDQSKNGYAGYIDGGASQEEFYKFIKPILEKMDGTEELLVKLNREDLLRKQRTFDNGSIPHQIHLGELHAILRRQEDFYPFLKDNREKIEKILTFRIPYYVGPLARGNSRFAWMTRKSEETITPWNFEEVVDKGASAQSFIERMTNFDKNLPNEKVLPKHSLLYEYFTVYNELTKVKYVTEGMRKPAFLSGEQKKAIVDLLFKTNRKVTVKQLKEDYFKKIECFDSVEISGVEDRFNASLGTYHDLLKIIKDKDFLDNEENEDILEDIVLTLTLFEDREMIEERLKTYAHLFDDKVMKQLKRRRYTGWGRLSRKLINGIRDKQSGKTILDFLKSDGFANRNFMQLIHDDSLTFKEDIQKAQVSGQGDSLHEHIANLAGSPAIKKGILQTVKVVDELVKVMGRHKPENIVIEMARENQTTQKGQKNSRERMKRIEEGIKELGSQILKEHPVENTQLQNEKLYLYYLQNGRDMYVDQELDINRLSDYDVDHIVPQSFLKDDSIDNKVLTRSDKARGKSDNVPSEEVVKKMKNYWRQLLNAKLITQRKFDNLTKAERGGLSELDKAGFIKRQLVETRQITKHVAQILDSRMNTKYDENDKLIREVKVITLKSKLVSDFRKDFQFYKVREINNYHHAHDAYLNAVVGTALIKKYPKLESEFVYGDYKVYDVRKMIAKSEQEIGKATAKYFFYSNIMNFFKTEITLANGEIRKRPLIETNGETGEIVWDKGRDFATVRKVLSMPQVNIVKKTEVQTGGFSKESILPKRNSDKLIARKKDWDPKKYGGFDSPTVAYSVLVVAKVEKGKSKKLKSVKELLGITIMERSSFEKNPIDFLEAKGYKEVKKDLIIKLPKYSLFELENGRKRMLASAGELQKGNELALPSKYVNFLYLASHYEKLKGSPEDNEQKQLFVEQHKHYLDEIIEQISEFSKRVILADANLDKVLSAYNKHRDKPIREQAENIIHLFTLTNLGAPAAFKYFDTTIDRKRYTSTKEVLDATLIHQSITGLYETRIDLSQLGGDGGPAPGGGGSSGGGRDIMKDIKVRLMTDSPDDSQDLMIGAIESNLFADQISWKSDQPVWLNQWPLKQEKLQALQQLVTEQLQLGHLEESNSPWNTPVFVIKKKSGKWRLLQDLRAVNATMHDMGALQPGLPSPVAVPKGWEIIIIDLQDCFFNIKLHPEDCKRFAFSVPSPNFKRPYQRFQWKVLPQGMKNSPTLCQKFVDKAILTVRDKYQDSYIVHYMDDILLAHPSRSIVDEILTSMIQALNKHGLVVSTEKIQKYDNLKYLGTHIQGDSVSYQKLQIRTDKLRTLNDFQKLLGNINWIRPFLKLTTGELKPLFEILNGDSNPISTRKLTPEACKALQLMNERLSTARVKRLDLSQPWSLCILKTEYTPTACLWQDGVVEWIHLPHISPKVITPYDIFCTQLIIKGRHRSKELFSKDPDYIVVPYTKVQFDLLLQEKEDWPISLLGFLGEVHFHLPKDPLLTFTLQTAIIFPHMTSTTPLEKGIVIFTDGSANGRSVTYIQGREPIIKENTQNTAQQAEIVAVITAFEEVSQPFNLYTDSKYVTGLFPEIETATLSPRTKIYTELKHLQRLIHKRQEKFYIGHIRGHTGLPGPLAQGNAYADSLTRILTAGKRTADGSEFEKRTADGSEFESPKKKAKVE

SEQ ID NO: 3234 - protein, 2022 aa, synthetic construct
MPAAKRVKLDGGDKKYSIGLDIGTNSVGWAVITDEYKVPSKKFKVLGNTDRHSIKKNLIGALLFDSGETAEATRLKRTARRRYTRRKNRICYLQEIFSNEMAKVDDSFFHRLEESFLVEEDKKHERHPIFGNIVDEVAYHEKYPTIYHLRKKLVDSTDKADLRLIYLALAHMIKFRGHFLIEGDLNPDNSDVDKLFIQLVQTYNQLFEENPINASGVDAKAILSARLSKSRRLENLIAQLPGEKKNGLFGNLIALSLGLTPNFKSNFDLAEDAKLQLSKDTYDDDLDNLLAQIGDQYADLFLAAKNLSDAILLSDILRVNTEITKAPLSASMIKRYDEHHQDLTLLKALVRQQLPEKYKEIFFDQSKNGYAGYIDGGASQEEFYKFIKPILEKMDGTEELLVKLNREDLLRKQRTFDNGSIPHQIHLGELHAILRRQEDFYPFLKDNREKIEKILTFRIPYYVGPLARGNSRFAWMTRKSEETITPWNFEEVVDKGASAQSFIERMTNFDKNLPNEKVLPKHSLLYEYFTVYNELTKVKYVTEGMRKPAFLSGEQKKAIVDLLFKTNRKVTVKQLKEDYFKKIECFDSVEISGVEDRFNASLGTYHDLLKIIKDKDFLDNEENEDILEDIVLTLTLFEDREMIEERLKTYAHLFDDKVMKQLKRRRYTGWGRLSRKLINGIRDKQSGKTILDFLKSDGFANRNFMQLIHDDSLTFKEDIQKAQVSGQGDSLHEHIANLAGSPAIKKGILQTVKVVDELVKVMGRHKPENIVIEMARENQTTQKGQKNSRERMKRIEEGIKELGSQILKEHPVENTQLQNEKLYLYYLQNGRDMYVDQELDINRLSDYDVDHIVPQSFLKDDSIDNKVLTRSDKARGKSDNVPSEEVVKKMKNYWRQLLNAKLITQRKFDNLTKAERGGLSELDKAGFIKRQLVETRQITKHVAQILDSRMNTKYDENDKLIREVKVITLKSKLVSDFRKDFQFYKVREINNYHHAHDAYLNAVVGTALIKKYPKLESEFVYGDYKVYDVRKMIAKSEQEIGKATAKYFFYSNIMNFFKTEITLANGEIRKRPLIETNGETGEIVWDKGRDFATVRKVLSMPQVNIVKKTEVQTGGFSKESILPKRNSDKLIARKKDWDPKKYGGFDSPTVAYSVLVVAKVEKGKSKKLKSVKELLGITIMERSSFEKNPIDFLEAKGYKEVKKDLIIKLPKYSLFELENGRKRMLASAGELQKGNELALPSKYVNFLYLASHYEKLKGSPEDNEQKQLFVEQHKHYLDEIIEQISEFSKRVILADANLDKVLSAYNKHRDKPIREQAENIIHLFTLTNLGAPAAFKYFDTTIDRKRYTSTKEVLDATLIHQSITGLYETRIDLSQLGGDGGPAPGGSGGGGGGRDIMKDIKVRLMTDSPDDSQDLMIGAIESNLFADQISWKSDQPVWLNQWPLKQEKLQALQQLVTEQLQLGHLEESNSPWNTPVFVIKKKSGKWRLLQDLRAVNATMHDMGALQPGLPSPVAVPKGWEIIIIDLQDCFFNIKLHPEDCKRFAFSVPSPNFKRPYQRFQWKVLPQGMKNSPTLCQKFVDKAILTVRDKYQDSYIVHYMDDILLAHPSRSIVDEILTSMIQALNKHGLVVSTEKIQKYDNLKYLGTHIQGDSVSYQKLQIRTDKLRTLNDFQKLLGNINWIRPFLKLTTGELKPLFEILNGDSNPISTRKLTPEACKALQLMNERLSTARVKRLDLSQPWSLCILKTEYTPTACLWQDGVVEWIHLPHISPKVITPYDIFCTQLIIKGRHRSKELFSKDPDYIVVPYTKVQFDLLLQEKEDWPISLLGFLGEVHFHLPKDPLLTFTLQTAIIFPHMTSTTPLEKGIVIFTDGSANGRSVTYIQGREPIIKENTQNTAQQAEIVAVITAFEEVSQPFNLYTDSKYVTGLFPEIETATLSPRTKIYTELKHLQRLIHKRQEKFYIGHIRGHTGLPGPLAQGNAYADSLTRILTAGKRTADGSEFEKRTADGSEFESPKKKAKVE

SEQ ID NO: 3235 - protein, 2024 aa, synthetic construct
MPAAKRVKLDGGDKKYSIGLDIGTNSVGWAVITDEYKVPSKKFKVLGNTDRHSIKKNLIGALLFDSGETAEATRLKRTARRRYTRRKNRICYLQEIFSNEMAKVDDSFFHRLEESFLVEEDKKHERHPIFGNIVDEVAYHEKYPTIYHLRKKLVDSTDKADLRLIYLALAHMIKFRGHFLIEGDLNPDNSDVDKLFIQLVQTYNQLFEENPINASGVDAKAILSARLSKSRRLENLIAQLPGEKKNGLFGNLIALSLGLTPNFKSNFDLAEDAKLQLSKDTYDDDLDNLLAQIGDQYADLFLAAKNLSDAILLSDILRVNTEITKAPLSASMIKRYDEHHQDLTLLKALVRQQLPEKYKEIFFDQSKNGYAGYIDGGASQEEFYKFIKPILEKMDGTEELLVKLNREDLLRKQRTFDNGSIPHQIHLGELHAILRRQEDFYPFLKDNREKIEKILTFRIPYYVGPLARGNSRFAWMTRKSEETITPWNFEEVVDKGASAQSFIERMTNFDKNLPNEKVLPKHSLLYEYFTVYNELTKVKYVTEGMRKPAFLSGEQKKAIVDLLFKTNRKVTVKQLKEDYFKKIECFDSVEISGVEDRFNASLGTYHDLLKIIKDKDFLDNEENEDILEDIVLTLTLFEDREMIEERLKTYAHLFDDKVMKQLKRRRYTGWGRLSRKLINGIRDKQSGKTILDFLKSDGFANRNFMQLIHDDSLTFKEDIQKAQVSGQGDSLHEHIANLAGSPAIKKGILQTVKVVDELVKVMGRHKPENIVIEMARENQTTQKGQKNSRERMKRIEEGIKELGSQILKEHPVENTQLQNEKLYLYYLQNGRDMYVDQELDINRLSDYDVDHIVPQSFLKDDSIDNKVLTRSDKARGKSDNVPSEEVVKKMKNYWRQLLNAKLITQRKFDNLTKAERGGLSELDKAGFIKRQLVETRQITKHVAQILDSRMNTKYDENDKLIREVKVITLKSKLVSDFRKDFQFYKVREINNYHHAHDAYLNAVVGTALIKKYPKLESEFVYGDYKVYDVRKMIAKSEQEIGKATAKYFFYSNIMNFFKTEITLANGEIRKRPLIETNGETGEIVWDKGRDFATVRKVLSMPQVNIVKKTEVQTGGFSKESILPKRNSDKLIARKKDWDPKKYGGFDSPTVAYSVLVVAKVEKGKSKKLKSVKELLGITIMERSSFEKNPIDFLEAKGYKEVKKDLIIKLPKYSLFELENGRKRMLASAGELQKGNELALPSKYVNFLYLASHYEKLKGSPEDNEQKQLFVEQHKHYLDEIIEQISEFSKRVILADANLDKVLSAYNKHRDKPIREQAENIIHLFTLTNLGAPAAFKYFDTTIDRKRYTSTKEVLDATLIHQSITGLYETRIDLSQLGGDGGGGSEAAAKGGGGGGRDIMKDIKVRLMTDSPDDSQDLMIGAIESNLFADQISWKSDQPVWLNQWPLKQEKLQALQQLVTEQLQLGHLEESNSPWNTPVFVIKKKSGKWRLLQDLRAVNATMHDMGALQPGLPSPVAVPKGWEIIIIDLQDCFFNIKLHPEDCKRFAFSVPSPNFKRPYQRFQWKVLPQGMKNSPTLCQKFVDKAILTVRDKYQDSYIVHYMDDILLAHPSRSIVDEILTSMIQALNKHGLVVSTEKIQKYDNLKYLGTHIQGDSVSYQKLQIRTDKLRTLNDFQKLLGNINWIRPFLKLTTGELKPLFEILNGDSNPISTRKLTPEACKALQLMNERLSTARVKRLDLSQPWSLCILKTEYTPTACLWQDGVVEWIHLPHISPKVITPYDIFCTQLIIKGRHRSKELFSKDPDYIVVPYTKVQFDLLLQEKEDWPISLLGFLGEVHFHLPKDPLLTFTLQTAIIFPHMTSTTPLEKGIVIFTDGSANGRSVTYIQGREPIIKENTQNTAQQAEIVAVITAFEEVSQPFNLYTDSKYVTGLFPEIETATLSPRTKIYTELKHLQRLIHKRQEKFYIGHIRGHTGLPGPLAQGNAYADSLTRILTAGKRTADGSEFEKRTADGSEFESPKKKAKVE

SEQ ID NO: 3236 - protein, 2024 aa, synthetic construct
MPAAKRVKLDGGDKKYSIGLDIGTNSVGWAVITDEYKVPSKKFKVLGNTDRHSIKKNLIGALLFDSGETAEATRLKRTARRRYTRRKNRICYLQEIFSNEMAKVDDSFFHRLEESFLVEEDKKHERHPIFGNIVDEVAYHEKYPTIYHLRKKLVDSTDKADLRLIYLALAHMIKFRGHFLIEGDLNPDNSDVDKLFIQLVQTYNQLFEENPINASGVDAKAILSARLSKSRRLENLIAQLPGEKKNGLFGNLIALSLGLTPNFKSNFDLAEDAKLQLSKDTYDDDLDNLLAQIGDQYADLFLAAKNLSDAILLSDILRVNTEITKAPLSASMIKRYDEHHQDLTLLKALVRQQLPEKYKEIFFDQSKNGYAGYIDGGASQEEFYKFIKPILEKMDGTEELLVKLNREDLLRKQRTFDNGSIPHQIHLGELHAILRRQEDFYPFLKDNREKIEKILTFRIPYYVGPLARGNSRFAWMTRKSEETITPWNFEEVVDKGASAQSFIERMTNFDKNLPNEKVLPKHSLLYEYFTVYNELTKVKYVTEGMRKPAFLSGEQKKAIVDLLFKTNRKVTVKQLKEDYFKKIECFDSVEISGVEDRFNASLGTYHDLLKIIKDKDFLDNEENEDILEDIVLTLTLFEDREMIEERLKTYAHLFDDKVMKQLKRRRYTGWGRLSRKLINGIRDKQSGKTILDFLKSDGFANRNFMQLIHDDSLTFKEDIQKAQVSGQGDSLHEHIANLAGSPAIKKGILQTVKVVDELVKVMGRHKPENIVIEMARENQTTQKGQKNSRERMKRIEEGIKELGSQILKEHPVENTQLQNEKLYLYYLQNGRDMYVDQELDINRLSDYDVDHIVPQSFLKDDSIDNKVLTRSDKARGKSDNVPSEEVVKKMKNYWRQLLNAKLITQRKFDNLTKAERGGLSELDKAGFIKRQLVETRQITKHVAQILDSRMNTKYDENDKLIREVKVITLKSKLVSDFRKDFQFYKVREINNYHHAHDAYLNAVVGTALIKKYPKLESEFVYGDYKVYDVRKMIAKSEQEIGKATAKYFFYSNIMNFFKTEITLANGEIRKRPLIETNGETGEIVWDKGRDFATVRKVLSMPQVNIVKKTEVQTGGFSKESILPKRNSDKLIARKKDWDPKKYGGFDSPTVAYSVLVVAKVEKGKSKKLKSVKELLGITIMERSSFEKNPIDFLEAKGYKEVKKDLIIKLPKYSLFELENGRKRMLASAGELQKGNELALPSKYVNFLYLASHYEKLKGSPEDNEQKQLFVEQHKHYLDEIIEQISEFSKRVILADANLDKVLSAYNKHRDKPIREQAENIIHLFTLTNLGAPAAFKYFDTTIDRKRYTSTKEVLDATLIHQSITGLYETRIDLSQLGGDGGPAPEAAAKGSSGGGRDIMKDIKVRLMTDSPDDSQDLMIGAIESNLFADQISWKSDQPVWLNQWPLKQEKLQALQQLVTEQLQLGHLEESNSPWNTPVFVIKKKSGKWRLLQDLRAVNATMHDMGALQPGLPSPVAVPKGWEIIIIDLQDCFFNIKLHPEDCKRFAFSVPSPNFKRPYQRFQWKVLPQGMKNSPTLCQKFVDKAILTVRDKYQDSYIVHYMDDILLAHPSRSIVDEILTSMIQALNKHGLVVSTEKIQKYDNLKYLGTHIQGDSVSYQKLQIRTDKLRTLNDFQKLLGNINWIRPFLKLTTGELKPLFEILNGDSNPISTRKLTPEACKALQLMNERLSTARVKRLDLSQPWSLCILKTEYTPTACLWQDGVVEWIHLPHISPKVITPYDIFCTQLIIKGRHRSKELFSKDPDYIVVPYTKVQFDLLLQEKEDWPISLLGFLGEVHFHLPKDPLLTFTLQTAIIFPHMTSTTPLEKGIVIFTDGSANGRSVTYIQGREPIIKENTQNTAQQAEIVAVITAFEEVSQPFNLYTDSKYVTGLFPEIETATLSPRTKIYTELKHLQRLIHKRQEKFYIGHIRGHTGLPGPLAQGNAYADSLTRILTAGKRTADGSEFEKRTADGSEFESPKKKAKVE

SEQ ID NO: 3237 - protein, 2024 aa, synthetic construct
MPAAKRVKLDGGDKKYSIGLDIGTNSVGWAVITDEYKVPSKKFKVLGNTDRHSIKKNLIGALLFDSGETAEATRLKRTARRRYTRRKNRICYLQEIFSNEMAKVDDSFFHRLEESFLVEEDKKHERHPIFGNIVDEVAYHEKYPTIYHLRKKLVDSTDKADLRLIYLALAHMIKFRGHFLIEGDLNPDNSDVDKLFIQLVQTYNQLFEENPINASGVDAKAILSARLSKSRRLENLIAQLPGEKKNGLFGNLIALSLGLTPNFKSNFDLAEDAKLQLSKDTYDDDLDNLLAQIGDQYADLFLAAKNLSDAILLSDILRVNTEITKAPLSASMIKRYDEHHQDLTLLKALVRQQLPEKYKEIFFDQSKNGYAGYIDGGASQEEFYKFIKPILEKMDGTEELLVKLNREDLLRKQRTFDNGSIPHQIHLGELHAILRRQEDFYPFLKDNREKIEKILTFRIPYYVGPLARGNSRFAWMTRKSEETITPWNFEEVVDKGASAQSFIERMTNFDKNLPNEKVLPKHSLLYEYFTVYNELTKVKYVTEGMRKPAFLSGEQKKAIVDLLFKTNRKVTVKQLKEDYFKKIECFDSVEISGVEDRFNASLGTYHDLLKIIKDKDFLDNEENEDILEDIVLTLTLFEDREMIEERLKTYAHLFDDKVMKQLKRRRYTGWGRLSRKLINGIRDKQSGKTILDFLKSDGFANRNFMQLIHDDSLTFKEDIQKAQVSGQGDSLHEHIANLAGSPAIKKGILQTVKVVDELVKVMGRHKPENIVIEMARENQTTQKGQKNSRERMKRIEEGIKELGSQILKEHPVENTQLQNEKLYLYYLQNGRDMYVDQELDINRLSDYDVDHIVPQSFLKDDSIDNKVLTRSDKARGKSDNVPSEEVVKKMKNYWRQLLNAKLITQRKFDNLTKAERGGLSELDKAGFIKRQLVETRQITKHVAQILDSRMNTKYDENDKLIREVKVITLKSKLVSDFRKDFQFYKVREINNYHHAHDAYLNAVVGTALIKKYPKLESEFVYGDYKVYDVRKMIAKSEQEIGKATAKYFFYSNIMNFFKTEITLANGEIRKRPLIETNGETGEIVWDKGRDFATVRKVLSMPQVNIVKKTEVQTGGFSKESILPKRNSDKLIARKKDWDPKKYGGFDSPTVAYSVLVVAKVEKGKSKKLKSVKELLGITIMERSSFEKNPIDFLEAKGYKEVKKDLIIKLPKYSLFELENGRKRMLASAGELQKGNELALPSKYVNFLYLASHYEKLKGSPEDNEQKQLFVEQHKHYLDEIIEQISEFSKRVILADANLDKVLSAYNKHRDKPIREQAENIIHLFTLTNLGAPAAFKYFDTTIDRKRYTSTKEVLDATLIHQSITGLYETRIDLSQLGGDGGGGSEAAAKPAPGGGRDIMKDIKVRLMTDSPDDSQDLMIGAIESNLFADQISWKSDQPVWLNQWPLKQEKLQALQQLVTEQLQLGHLEESNSPWNTPVFVIKKKSGKWRLLQDLRAVNATMHDMGALQPGLPSPVAVPKGWEIIIIDLQDCFFNIKLHPEDCKRFAFSVPSPNFKRPYQRFQWKVLPQGMKNSPTLCQKFVDKAILTVRDKYQDSYIVHYMDDILLAHPSRSIVDEILTSMIQALNKHGLVVSTEKIQKYDNLKYLGTHIQGDSVSYQKLQIRTDKLRTLNDFQKLLGNINWIRPFLKLTTGELKPLFEILNGDSNPISTRKLTPEACKALQLMNERLSTARVKRLDLSQPWSLCILKTEYTPTACLWQDGVVEWIHLPHISPKVITPYDIFCTQLIIKGRHRSKELFSKDPDYIVVPYTKVQFDLLLQEKEDWPISLLGFLGEVHFHLPKDPLLTFTLQTAIIFPHMTSTTPLEKGIVIFTDGSANGRSVTYIQGREPIIKENTQNTAQQAEIVAVITAFEEVSQPFNLYTDSKYVTGLFPEIETATLSPRTKIYTELKHLQRLIHKRQEKFYIGHIRGHTGLPGPLAQGNAYADSLTRILTAGKRTADGSEFEKRTADGSEFESPKKKAKVE

SEQ ID NO: 3238 - protein, 2046 aa, synthetic construct
MPAAKRVKLDGGDKKYSIGLDIGTNSVGWAVITDEYKVPSKKFKVLGNTDRHSIKKNLIGALLFDSGETAEATRLKRTARRRYTRRKNRICYLQEIFSNEMAKVDDSFFHRLEESFLVEEDKKHERHPIFGNIVDEVAYHEKYPTIYHLRKKLVDSTDKADLRLIYLALAHMIKFRGHFLIEGDLNPDNSDVDKLFIQLVQTYNQLFEENPINASGVDAKAILSARLSKSRRLENLIAQLPGEKKNGLFGNLIALSLGLTPNFKSNFDLAEDAKLQLSKDTYDDDLDNLLAQIGDQYADLFLAAKNLSDAILLSDILRVNTEITKAPLSASMIKRYDEHHQDLTLLKALVRQQLPEKYKEIFFDQSKNGYAGYIDGGASQEEFYKFIKPILEKMDGTEELLVKLNREDLLRKQRTFDNGSIPHQIHLGELHAILRRQEDFYPFLKDNREKIEKILTFRIPYYVGPLARGNSRFAWMTRKSEETITPWNFEEVVDKGASAQSFIERMTNFDKNLPNEKVLPKHSLLYEYFTVYNELTKVKYVTEGMRKPAFLSGEQKKAIVDLLFKTNRKVTVKQLKEDYFKKIECFDSVEISGVEDRFNASLGTYHDLLKIIKDKDFLDNEENEDILEDIVLTLTLFEDREMIEERLKTYAHLFDDKVMKQLKRRRYTGWGRLSRKLINGIRDKQSGKTILDFLKSDGFANRNFMQLIHDDSLTFKEDIQKAQVSGQGDSLHEHIANLAGSPAIKKGILQTVKVVDELVKVMGRHKPENIVIEMARENQTTQKGQKNSRERMKRIEEGIKELGSQILKEHPVENTQLQNEKLYLYYLQNGRDMYVDQELDINRLSDYDVDHIVPQSFLKDDSIDNKVLTRSDKARGKSDNVPSEEVVKKMKNYWRQLLNAKLITQRKFDNLTKAERGGLSELDKAGFIKRQLVETRQITKHVAQILDSRMNTKYDENDKLIREVKVITLKSKLVSDFRKDFQFYKVREINNYHHAHDAYLNAVVGTALIKKYPKLESEFVYGDYKVYDVRKMIAKSEQEIGKATAKYFFYSNIMNFFKTEITLANGEIRKRPLIETNGETGEIVWDKGRDFATVRKVLSMPQVNIVKKTEVQTGGFSKESILPKRNSDKLIARKKDWDPKKYGGFDSPTVAYSVLVVAKVEKGKSKKLKSVKELLGITIMERSSFEKNPIDFLEAKGYKEVKKDLIIKLPKYSLFELENGRKRMLASAGELQKGNELALPSKYVNFLYLASHYEKLKGSPEDNEQKQLFVEQHKHYLDEIIEQISEFSKRVILADANLDKVLSAYNKHRDKPIREQAENIIHLFTLTNLGAPAAFKYFDTTIDRKRYTSTKEVLDATLIHQSITGLYETRIDLSQLGGDGGSGGSSGGSSGSETPGTSESATPESSGGSSGGSSGGGRDIMKDIKVRLMTDSPDDSQDLMIGAIESNLFADQISWKSDQPVWLNQWPLKQEKLQALQQLVTEQLQLGHLEESNSPWNTPVFVIKKKSGKWRLLQDLRAVNATMHDMGALQPGLPSPVAVPKGWEIIIIDLQDCFFNIKLHPEDCKRFAFSVPSPNFKRPYQRFQWKVLPQGMKNSPTLCQKFVDKAILTVRDKYQDSYIVHYMDDILLAHPSRSIVDEILTSMIQALNKHGLVVSTEKIQKYDNLKYLGTHIQGDSVSYQKLQIRTDKLRTLNDFQKLLGNINWIRPFLKLTTGELKPLFEILNGDSNPISTRKLTPEACKALQLMNERLSTARVKRLDLSQPWSLCILKTEYTPTACLWQDGVVEWIHLPHISPKVITPYDIFCTQLIIKGRHRSKELFSKDPDYIVVPYTKVQFDLLLQEKEDWPISLLGFLGEVHFHLPKDPLLTFTLQTAIIFPHMTSTTPLEKGIVIFTDGSANGRSVTYIQGREPIIKENTQNTAQQAEIVAVITAFEEVSQPFNLYTDSKYVTGLFPEIETATLSPRTKIYTELKHLQRLIHKRQEKFYIGHIRGHTGLPGPLAQGNAYADSLTRILTAGKRTADGSEFEKRTADGSEFESPKKKAKVE

SEQ ID NO: 3239 - protein, 2025 aa, synthetic construct
MPAAKRVKLDGGDKKYSIGLDIGTNSVGWAVITDEYKVPSKKFKVLGNTDRHSIKKNLIGALLFDSGETAEATRLKRTARRRYTRRKNRICYLQEIFSNEMAKVDDSFFHRLEESFLVEEDKKHERHPIFGNIVDEVAYHEKYPTIYHLRKKLVDSTDKADLRLIYLALAHMIKFRGHFLIEGDLNPDNSDVDKLFIQLVQTYNQLFEENPINASGVDAKAILSARLSKSRRLENLIAQLPGEKKNGLFGNLIALSLGLTPNFKSNFDLAEDAKLQLSKDTYDDDLDNLLAQIGDQYADLFLAAKNLSDAILLSDILRVNTEITKAPLSASMIKRYDEHHQDLTLLKALVRQQLPEKYKEIFFDQSKNGYAGYIDGGASQEEFYKFIKPILEKMDGTEELLVKLNREDLLRKQRTFDNGSIPHQIHLGELHAILRRQEDFYPFLKDNREKIEKILTFRIPYYVGPLARGNSRFAWMTRKSEETITPWNFEEVVDKGASAQSFIERMTNFDKNLPNEKVLPKHSLLYEYFTVYNELTKVKYVTEGMRKPAFLSGEQKKAIVDLLFKTNRKVTVKQLKEDYFKKIECFDSVEISGVEDRFNASLGTYHDLLKIIKDKDFLDNEENEDILEDIVLTLTLFEDREMIEERLKTYAHLFDDKVMKQLKRRRYTGWGRLSRKLINGIRDKQSGKTILDFLKSDGFANRNFMQLIHDDSLTFKEDIQKAQVSGQGDSLHEHIANLAGSPAIKKGILQTVKVVDELVKVMGRHKPENIVIEMARENQTTQKGQKNSRERMKRIEEGIKELGSQILKEHPVENTQLQNEKLYLYYLQNGRDMYVDQELDINRLSDYDVDHIVPQSFLKDDSIDNKVLTRSDKARGKSDNVPSEEVVKKMKNYWRQLLNAKLITQRKFDNLTKAERGGLSELDKAGFIKRQLVETRQITKHVAQILDSRMNTKYDENDKLIREVKVITLKSKLVSDFRKDFQFYKVREINNYHHAHDAYLNAVVGTALIKKYPKLESEFVYGDYKVYDVRKMIAKSEQEIGKATAKYFFYSNIMNFFKTEITLANGEIRKRPLIETNGETGEIVWDKGRDFATVRKVLSMPQVNIVKKTEVQTGGFSKESILPKRNSDKLIARKKDWDPKKYGGFDSPTVAYSVLVVAKVEKGKSKKLKSVKELLGITIMERSSFEKNPIDFLEAKGYKEVKKDLIIKLPKYSLFELENGRKRMLASAGELQKGNELALPSKYVNFLYLASHYEKLKGSPEDNEQKQLFVEQHKHYLDEIIEQISEFSKRVILADANLDKVLSAYNKHRDKPIREQAENIIHLFTLTNLGAPAAFKYFDTTIDRKRYTSTKEVLDATLIHQSITGLYETRIDLSQLGGDGGGSSGSSGSSGSSGGGRDIMKDIKVRLMTDSPDDSQDLMIGAIESNLFADQISWKSDQPVWLNQWPLKQEKLQALQQLVTEQLQLGHLEESNSPWNTPVFVIKKKSGKWRLLQDLRAVNATMHDMGALQPGLPSPVAVPKGWEIIIIDLQDCFFNIKLHPEDCKRFAFSVPSPNFKRPYQRFQWKVLPQGMKNSPTLCQKFVDKAILTVRDKYQDSYIVHYMDDILLAHPSRSIVDEILTSMIQALNKHGLVVSTEKIQKYDNLKYLGTHIQGDSVSYQKLQIRTDKLRTLNDFQKLLGNINWIRPFLKLTTGELKPLFEILNGDSNPISTRKLTPEACKALQLMNERLSTARVKRLDLSQPWSLCILKTEYTPTACLWQDGVVEWIHLPHISPKVITPYDIFCTQLIIKGRHRSKELFSKDPDYIVVPYTKVQFDLLLQEKEDWPISLLGFLGEVHFHLPKDPLLTFTLQTAIIFPHMTSTTPLEKGIVIFTDGSANGRSVTYIQGREPIIKENTQNTAQQAEIVAVITAFEEVSQPFNLYTDSKYVTGLFPEIETATLSPRTKIYTELKHLQRLIHKRQEKFYIGHIRGHTGLPGPLAQGNAYADSLTRILTAGKRTADGSEFEKRTADGSEFESPKKKAKVE

SEQ ID NO: 3240 - protein, 2022 aa, synthetic construct
MPAAKRVKLDGGDKKYSIGLDIGTNSVGWAVITDEYKVPSKKFKVLGNTDRHSIKKNLIGALLFDSGETAEATRLKRTARRRYTRRKNRICYLQEIFSNEMAKVDDSFFHRLEESFLVEEDKKHERHPIFGNIVDEVAYHEKYPTIYHLRKKLVDSTDKADLRLIYLALAHMIKFRGHFLIEGDLNPDNSDVDKLFIQLVQTYNQLFEENPINASGVDAKAILSARLSKSRRLENLIAQLPGEKKNGLFGNLIALSLGLTPNFKSNFDLAEDAKLQLSKDTYDDDLDNLLAQIGDQYADLFLAAKNLSDAILLSDILRVNTEITKAPLSASMIKRYDEHHQDLTLLKALVRQQLPEKYKEIFFDQSKNGYAGYIDGGASQEEFYKFIKPILEKMDGTEELLVKLNREDLLRKQRTFDNGSIPHQIHLGELHAILRRQEDFYPFLKDNREKIEKILTFRIPYYVGPLARGNSRFAWMTRKSEETITPWNFEEVVDKGASAQSFIERMTNFDKNLPNEKVLPKHSLLYEYFTVYNELTKVKYVTEGMRKPAFLSGEQKKAIVDLLFKTNRKVTVKQLKEDYFKKIECFDSVEISGVEDRFNASLGTYHDLLKIIKDKDFLDNEENEDILEDIVLTLTLFEDREMIEERLKTYAHLFDDKVMKQLKRRRYTGWGRLSRKLINGIRDKQSGKTILDFLKSDGFANRNFMQLIHDDSLTFKEDIQKAQVSGQGDSLHEHIANLAGSPAIKKGILQTVKVVDELVKVMGRHKPENIVIEMARENQTTQKGQKNSRERMKRIEEGIKELGSQILKEHPVENTQLQNEKLYLYYLQNGRDMYVDQELDINRLSDYDVDHIVPQSFLKDDSIDNKVLTRSDKARGKSDNVPSEEVVKKMKNYWRQLLNAKLITQRKFDNLTKAERGGLSELDKAGFIKRQLVETRQITKHVAQILDSRMNTKYDENDKLIREVKVITLKSKLVSDFRKDFQFYKVREINNYHHAHDAYLNAVVGTALIKKYPKLESEFVYGDYKVYDVRKMIAKSEQEIGKATAKYFFYSNIMNFFKTEITLANGEIRKRPLIETNGETGEIVWDKGRDFATVRKVLSMPQVNIVKKTEVQTGGFSKESILPKRNSDKLIARKKDWDPKKYGGFDSPTVAYSVLVVAKVEKGKSKKLKSVKELLGITIMERSSFEKNPIDFLEAKGYKEVKKDLIIKLPKYSLFELENGRKRMLASAGELQKGNELALPSKYVNFLYLASHYEKLKGSPEDNEQKQLFVEQHKHYLDEIIEQISEFSKRVILADANLDKVLSAYNKHRDKPIREQAENIIHLFTLTNLGAPAAFKYFDTTIDRKRYTSTKEVLDATLIHQSITGLYETRIDLSQLGGDGGGGGGGSGSSGGGRDIMKDIKVRLMTDSPDDSQDLMIGAIESNLFADQISWKSDQPVWLNQWPLKQEKLQALQQLVTEQLQLGHLEESNSPWNTPVFVIKKKSGKWRLLQDLRAVNATMHDMGALQPGLPSPVAVPKGWEIIIIDLQDCFFNIKLHPEDCKRFAFSVPSPNFKRPYQRFQWKVLPQGMKNSPTLCQKFVDKAILTVRDKYQDSYIVHYMDDILLAHPSRSIVDEILTSMIQALNKHGLVVSTEKIQKYDNLKYLGTHIQGDSVSYQKLQIRTDKLRTLNDFQKLLGNINWIRPFLKLTTGELKPLFEILNGDSNPISTRKLTPEACKALQLMNERLSTARVKRLDLSQPWSLCILKTEYTPTACLWQDGVVEWIHLPHISPKVITPYDIFCTQLIIKGRHRSKELFSKDPDYIVVPYTKVQFDLLLQEKEDWPISLLGFLGEVHFHLPKDPLLTFTLQTAIIFPHMTSTTPLEKGIVIFTDGSANGRSVTYIQGREPIIKENTQNTAQQAEIVAVITAFEEVSQPFNLYTDSKYVTGLFPEIETATLSPRTKIYTELKHLQRLIHKRQEKFYIGHIRGHTGLPGPLAQGNAYADSLTRILTAGKRTADGSEFEKRTADGSEFESPKKKAKVE

SEQ ID NO: 3241 - protein, 2022 aa, synthetic construct
MPAAKRVKLDGGDKKYSIGLDIGTNSVGWAVITDEYKVPSKKFKVLGNTDRHSIKKNLIGALLFDSGETAEATRLKRTARRRYTRRKNRICYLQEIFSNEMAKVDDSFFHRLEESFLVEEDKKHERHPIFGNIVDEVAYHEKYPTIYHLRKKLVDSTDKADLRLIYLALAHMIKFRGHFLIEGDLNPDNSDVDKLFIQLVQTYNQLFEENPINASGVDAKAILSARLSKSRRLENLIAQLPGEKKNGLFGNLIALSLGLTPNFKSNFDLAEDAKLQLSKDTYDDDLDNLLAQIGDQYADLFLAAKNLSDAILLSDILRVNTEITKAPLSASMIKRYDEHHQDLTLLKALVRQQLPEKYKEIFFDQSKNGYAGYIDGGASQEEFYKFIKPILEKMDGTEELLVKLNREDLLRKQRTFDNGSIPHQIHLGELHAILRRQEDFYPFLKDNREKIEKILTFRIPYYVGPLARGNSRFAWMTRKSEETITPWNFEEVVDKGASAQSFIERMTNFDKNLPNEKVLPKHSLLYEYFTVYNELTKVKYVTEGMRKPAFLSGEQKKAIVDLLFKTNRKVTVKQLKEDYFKKIECFDSVEISGVEDRFNASLGTYHDLLKIIKDKDFLDNEENEDILEDIVLTLTLFEDREMIEERLKTYAHLFDDKVMKQLKRRRYTGWGRLSRKLINGIRDKQSGKTILDFLKSDGFANRNFMQLIHDDSLTFKEDIQKAQVSGQGDSLHEHIANLAGSPAIKKGILQTVKVVDELVKVMGRHKPENIVIEMARENQTTQKGQKNSRERMKRIEEGIKELGSQILKEHPVENTQLQNEKLYLYYLQNGRDMYVDQELDINRLSDYDVDHIVPQSFLKDDSIDNKVLTRSDKARGKSDNVPSEEVVKKMKNYWRQLLNAKLITQRKFDNLTKAERGGLSELDKAGFIKRQLVETRQITKHVAQILDSRMNTKYDENDKLIREVKVITLKSKLVSDFRKDFQFYKVREINNYHHAHDAYLNAVVGTALIKKYPKLESEFVYGDYKVYDVRKMIAKSEQEIGKATAKYFFYSNIMNFFKTEITLANGEIRKRPLIETNGETGEIVWDKGRDFATVRKVLSMPQVNIVKKTEVQTGGFSKESILPKRNSDKLIARKKDWDPKKYGGFDSPTVAYSVLVVAKVEKGKSKKLKSVKELLGITIMERSSFEKNPIDFLEAKGYKEVKKDLIIKLPKYSLFELENGRKRMLASAGELQKGNELALPSKYVNFLYLASHYEKLKGSPEDNEQKQLFVEQHKHYLDEIIEQISEFSKRVILADANLDKVLSAYNKHRDKPIREQAENIIHLFTLTNLGAPAAFKYFDTTIDRKRYTSTKEVLDATLIHQSITGLYETRIDLSQLGGDGGGGGGSSGGSGGGRDIMKDIKVRLMTDSPDDSQDLMIGAIESNLFADQISWKSDQPVWLNQWPLKQEKLQALQQLVTEQLQLGHLEESNSPWNTPVFVIKKKSGKWRLLQDLRAVNATMHDMGALQPGLPSPVAVPKGWEIIIIDLQDCFFNIKLHPEDCKRFAFSVPSPNFKRPYQRFQWKVLPQGMKNSPTLCQKFVDKAILTVRDKYQDSYIVHYMDDILLAHPSRSIVDEILTSMIQALNKHGLVVSTEKIQKYDNLKYLGTHIQGDSVSYQKLQIRTDKLRTLNDFQKLLGNINWIRPFLKLTTGELKPLFEILNGDSNPISTRKLTPEACKALQLMNERLSTARVKRLDLSQPWSLCILKTEYTPTACLWQDGVVEWIHLPHISPKVITPYDIFCTQLIIKGRHRSKELFSKDPDYIVVPYTKVQFDLLLQEKEDWPISLLGFLGEVHFHLPKDPLLTFTLQTAIIFPHMTSTTPLEKGIVIFTDGSANGRSVTYIQGREPIIKENTQNTAQQAEIVAVITAFEEVSQPFNLYTDSKYVTGLFPEIETATLSPRTKIYTELKHLQRLIHKRQEKFYIGHIRGHTGLPGPLAQGNAYADSLTRILTAGKRTADGSEFEKRTADGSEFESPKKKAKVE

SEQ ID NO: 3242 - protein, 2019 aa, synthetic construct
MPAAKRVKLDGGDKKYSIGLDIGTNSVGWAVITDEYKVPSKKFKVLGNTDRHSIKKNLIGALLFDSGETAEATRLKRTARRRYTRRKNRICYLQEIFSNEMAKVDDSFFHRLEESFLVEEDKKHERHPIFGNIVDEVAYHEKYPTIYHLRKKLVDSTDKADLRLIYLALAHMIKFRGHFLIEGDLNPDNSDVDKLFIQLVQTYNQLFEENPINASGVDAKAILSARLSKSRRLENLIAQLPGEKKNGLFGNLIALSLGLTPNFKSNFDLAEDAKLQLSKDTYDDDLDNLLAQIGDQYADLFLAAKNLSDAILLSDILRVNTEITKAPLSASMIKRYDEHHQDLTLLKALVRQQLPEKYKEIFFDQSKNGYAGYIDGGASQEEFYKFIKPILEKMDGTEELLVKLNREDLLRKQRTFDNGSIPHQIHLGELHAILRRQEDFYPFLKDNREKIEKILTFRIPYYVGPLARGNSRFAWMTRKSEETITPWNFEEVVDKGASAQSFIERMTNFDKNLPNEKVLPKHSLLYEYFTVYNELTKVKYVTEGMRKPAFLSGEQKKAIVDLLFKTNRKVTVKQLKEDYFKKIECFDSVEISGVEDRFNASLGTYHDLLKIIKDKDFLDNEENEDILEDIVLTLTLFEDREMIEERLKTYAHLFDDKVMKQLKRRRYTGWGRLSRKLINGIRDKQSGKTILDFLKSDGFANRNFMQLIHDDSLTFKEDIQKAQVSGQGDSLHEHIANLAGSPAIKKGILQTVKVVDELVKVMGRHKPENIVIEMARENQTTQKGQKNSRERMKRIEEGIKELGSQILKEHPVENTQLQNEKLYLYYLQNGRDMYVDQELDINRLSDYDVDHIVPQSFLKDDSIDNKVLTRSDKARGKSDNVPSEEVVKKMKNYWRQLLNAKLITQRKFDNLTKAERGGLSELDKAGFIKRQLVETRQITKHVAQILDSRMNTKYDENDKLIREVKVITLKSKLVSDFRKDFQFYKVREINNYHHAHDAYLNAVVGTALIKKYPKLESEFVYGDYKVYDVRKMIAKSEQEIGKATAKYFFYSNIMNFFKTEITLANGEIRKRPLIETNGETGEIVWDKGRDFATVRKVLSMPQVNIVKKTEVQTGGFSKESILPKRNSDKLIARKKDWDPKKYGGFDSPTVAYSVLVVAKVEKGKSKKLKSVKELLGITIMERSSFEKNPIDFLEAKGYKEVKKDLIIKLPKYSLFELENGRKRMLASAGELQKGNELALPSKYVNFLYLASHYEKLKGSPEDNEQKQLFVEQHKHYLDEIIEQISEFSKRVILADANLDKVLSAYNKHRDKPIREQAENIIHLFTLTNLGAPAAFKYFDTTIDRKRYTSTKEVLDATLIHQSITGLYETRIDLSQLGGDGGGGSGSSGGGRDIMKDIKVRLMTDSPDDSQDLMIGAIESNLFADQISWKSDQPVWLNQWPLKQEKLQALQQLVTEQLQLGHLEESNSPWNTPVFVIKKKSGKWRLLQDLRAVNATMHDMGALQPGLPSPVAVPKGWEIIIIDLQDCFFNIKLHPEDCKRFAFSVPSPNFKRPYQRFQWKVLPQGMKNSPTLCQKFVDKAILTVRDKYQDSYIVHYMDDILLAHPSRSIVDEILTSMIQALNKHGLVVSTEKIQKYDNLKYLGTHIQGDSVSYQKLQIRTDKLRTLNDFQKLLGNINWIRPFLKLTTGELKPLFEILNPDSNPISTRKLTPEACKALQLMNERLSTARVKRLDLSQPWSLCILKTEYTPTACLWQDGVVEWIHLPHISPKVITPYDIFCTQLIIKGRHRSKELFSKDPDYIVVPYTKVQFDLLLQEKEDWPISLLGFLGEVHFHLPKDPLLTFTLQTAIIFPHMTSTTPLEKGIVIFTDGSANGRSVTYIQGREPIIKENTQNTAQQAEIVAVITAFEEVSQPFNLYTDSKYVTGLFPEIETATLSPRTKIYTELKHLQRLIHKRQEKFYIGHIRGHTGLPGPLAQGNAYADSLTRILTAGKRTADGSEFEKRTADGSEFESPKKKAKVE

SEQ ID NO: 3243 - protein, 2022 aa, synthetic construct
MPAAKRVKLDGGDKKYSIGLDIGTNSVGWAVITDEYKVPSKKFKVLGNTDRHSIKKNLIGALLFDSGETAEATRLKRTARRRYTRRKNRICYLQEIFSNEMAKVDDSFFHRLEESFLVEEDKKHERHPIFGNIVDEVAYHEKYPTIYHLRKKLVDSTDKADLRLIYLALAHMIKFRGHFLIEGDLNPDNSDVDKLFIQLVQTYNQLFEENPINASGVDAKAILSARLSKSRRLENLIAQLPGEKKNGLFGNLIALSLGLTPNFKSNFDLAEDAKLQLSKDTYDDDLDNLLAQIGDQYADLFLAAKNLSDAILLSDILRVNTEITKAPLSASMIKRYDEHHQDLTLLKALVRQQLPEKYKEIFFDQSKNGYAGYIDGGASQEEFYKFIKPILEKMDGTEELLVKLNREDLLRKQRTFDNGSIPHQIHLGELHAILRRQEDFYPFLKDNREKIEKILTFRIPYYVGPLARGNSRFAWMTRKSEETITPWNFEEVVDKGASAQSFIERMTNFDKNLPNEKVLPKHSLLYEYFTVYNELTKVKYVTEGMRKPAFLSGEQKKAIVDLLFKTNRKVTVKQLKEDYFKKIECFDSVEISGVEDRFNASLGTYHDLLKIIKDKDFLDNEENEDILEDIVLTLTLFEDREMIEERLKTYAHLFDDKVMKQLKRRRYTGWGRLSRKLINGIRDKQSGKTILDFLKSDGFANRNFMQLIHDDSLTFKEDIQKAQVSGQGDSLHEHIANLAGSPAIKKGILQTVKVVDELVKVMGRHKPENIVIEMARENQTTQKGQKNSRERMKRIEEGIKELGSQILKEHPVENTQLQNEKLYLYYLQNGRDMYVDQELDINRLSDYDVDHIVPQSFLKDDSIDNKVLTRSDKARGKSDNVPSEEVVKKMKNYWRQLLNAKLITQRKFDNLTKAERGGLSELDKAGFIKRQLVETRQITKHVAQILDSRMNTKYDENDKLIREVKVITLKSKLVSDFRKDFQFYKVREINNYHHAHDAYLNAVVGTALIKKYPKLESEFVYGDYKVYDVRKMIAKSEQEIGKATAKYFFYSNIMNFFKTEITLANGEIRKRPLIETNGETGEIVWDKGRDFATVRKVLSMPQVNIVKKTEVQTGGFSKESILPKRNSDKLIARKKDWDPKKYGGFDSPTVAYSVLVVAKVEKGKSKKLKSVKELLGITIMERSSFEKNPIDFLEAKGYKEVKKDLIIKLPKYSLFELENGRKRMLASAGELQKGNELALPSKYVNFLYLASHYEKLKGSPEDNEQKQLFVEQHKHYLDEIIEQISEFSKRVILADANLDKVLSAYNKHRDKPIREQAENIIHLFTLTNLGAPAAFKYFDTTIDRKRYTSTKEVLDATLIHQSITGLYETRIDLSQLGGDGGGGGGGSGSSGGGRDIMKDIKVRLMTDSPDDSQDLMIGAIESNLFADQISWKSDQPVWLNQWPLKQEKLQALQQLVTEQLQLGHLEESNSPWNTPVFVIKKKSGKWRLLQDLRAVNATMHDMGALQPGLPSPVAVPKGWEIIIIDLQDCFFNIKLHPEDCKRFAFSVPSPNFKRPYQRFQWKVLPQGMKNSPTLCQKFVDKAILTVRDKYQDSYIVHYMDDILLAHPSRSIVDEILTSMIQALNKHGLVVSTEKIQKYDNLKYLGTHIQGDSVSYQKLQIRTDKLRTLNDFQKLLGNINWIRPFLKLTTGELKPLFEILNPDSNPISTRKLTPEACKALQLMNERLSTARVKRLDLSQPWSLCILKTEYTPTACLWQDGVVEWIHLPHISPKVITPYDIFCTQLIIKGRHRSKELFSKDPDYIVVPYTKVQFDLLLQEKEDWPISLLGFLGEVHFHLPKDPLLTFTLQTAIIFPHMTSTTPLEKGIVIFTDGSANGRSVTYIQGREPIIKENTQNTAQQAEIVAVITAFEEVSQPFNLYTDSKYVTGLFPEIETATLSPRTKIYTELKHLQRLIHKRQEKFYIGHIRGHTGLPGPLAQGNAYADSLTRILTAGKRTADGSEFEKRTADGSEFESPKKKAKVE

SEQ ID NO: 3244 - protein, 2024 aa, synthetic construct
MPAAKRVKLDGGDKKYSIGLDIGTNSVGWAVITDEYKVPSKKFKVLGNTDRHSIKKNLIGALLFDSGETAEATRLKRTARRRYTRRKNRICYLQEIFSNEMAKVDDSFFHRLEESFLVEEDKKHERHPIFGNIVDEVAYHEKYPTIYHLRKKLVDSTDKADLRLIYLALAHMIKFRGHFLIEGDLNPDNSDVDKLFIQLVQTYNQLFEENPINASGVDAKAILSARLSKSRRLENLIAQLPGEKKNGLFGNLIALSLGLTPNFKSNFDLAEDAKLQLSKDTYDDDLDNLLAQIGDQYADLFLAAKNLSDAILLSDILRVNTEITKAPLSASMIKRYDEHHQDLTLLKALVRQQLPEKYKEIFFDQSKNGYAGYIDGGASQEEFYKFIKPILEKMDGTEELLVKLNREDLLRKQRTFDNGSIPHQIHLGELHAILRRQEDFYPFLKDNREKIEKILTFRIPYYVGPLARGNSRFAWMTRKSEETITPWNFEEVVDKGASAQSFIERMTNFDKNLPNEKVLPKHSLLYEYFTVYNELTKVKYVTEGMRKPAFLSGEQKKAIVDLLFKTNRKVTVKQLKEDYFKKIECFDSVEISGVEDRFNASLGTYHDLLKIIKDKDFLDNEENEDILEDIVLTLTLFEDREMIEERLKTYAHLFDDKVMKQLKRRRYTGWGRLSRKLINGIRDKQSGKTILDFLKSDGFANRNFMQLIHDDSLTFKEDIQKAQVSGQGDSLHEHIANLAGSPAIKKGILQTVKVVDELVKVMGRHKPENIVIEMARENQTTQKGQKNSRERMKRIEEGIKELGSQILKEHPVENTQLQNEKLYLYYLQNGRDMYVDQELDINRLSDYDVDHIVPQSFLKDDSIDNKVLTRSDKARGKSDNVPSEEVVKKMKNYWRQLLNAKLITQRKFDNLTKAERGGLSELDKAGFIKRQLVETRQITKHVAQILDSRMNTKYDENDKLIREVKVITLKSKLVSDFRKDFQFYKVREINNYHHAHDAYLNAVVGTALIKKYPKLESEFVYGDYKVYDVRKMIAKSEQEIGKATAKYFFYSNIMNFFKTEITLANGEIRKRPLIETNGETGEIVWDKGRDFATVRKVLSMPQVNIVKKTEVQTGGFSKESILPKRNSDKLIARKKDWDPKKYGGFDSPTVAYSVLVVAKVEKGKSKKLKSVKELLGITIMERSSFEKNPIDFLEAKGYKEVKKDLIIKLPKYSLFELENGRKRMLASAGELQKGNELALPSKYVNFLYLASHYEKLKGSPEDNEQKQLFVEQHKHYLDEIIEQISEFSKRVILADANLDKVLSAYNKHRDKPIREQAENIIHLFTLTNLGAPAAFKYFDTTIDRKRYTSTKEVLDATLIHQSITGLYETRIDLSQLGGDGGGSSEAAAKGGSGGGRDIMKDIKVRLMTDSPDDSQDLMIGAIESNLFADQISWKSDQPVWLNQWPLKQEKLQALQQLVTEQLQLGHLEESNSPWNTPVFVIKKKSGKWRLLQDLRAVNATMHDMGALQPGLPSPVAPPKGWEIIIIDLQDCFFNIKLHPEDCKRFAFSVPSPNFKRPYQRFQWKVLPQGMKNSPTLCQKFVDKAILTVRDKYQDSYIVHYMDDILLAHPSRSIVDEILTSMIQALNKHGLVVSTEKIQKYDNLKYLGTHIQGDSVSYQKLQIRTDKLRTLNDFQKLLGNINWIRPFLKLTTGELKPLFEILNPDSNPISTRKLTPEACKALQLMNERLSTARVKRLDLSQPWSLCILKTEYTPTACLWQDGVVEWIHLPHISPKVITPYDIFCTQLIIKGRHRSKELFSKDPDYIVVPYTKVQFDLLLQEKEDWPISLLGFLGEVHFHLPKDPLLTFTLQTAIIFPHMTSTTPLEKGIVIFTDGSANGRSVTYIQGREPIIKENTQNTAQQAEIVAVITAFEEVSQPFNLYTDSKYVTGLFPEIETATLSPRTKIYTELKHLQRLIHKRQEKFYIGHIRGHTGLPGPLAQGNAYADSLTRILTAGKRTADGSEFEKRTADGSEFESPKKKAKVE

SEQ ID NO: 3245 - protein, 2125 aa, synthetic construct
MPAAKRVKLDGGDKKYSIGLDIGTNSVGWAVITDEYKVPSKKFKVLGNTDRHSIKKNLIGALLFDSGETAEATRLKRTARRRYTRRKNRICYLQEIFSNEMAKVDDSFFHRLEESFLVEEDKKHERHPIFGNIVDEVAYHEKYPTIYHLRKKLVDSTDKADLRLIYLALAHMIKFRGHFLIEGDLNPDNSDVDKLFIQLVQTYNQLFEENPINASGVDAKAILSARLSKSRRLENLIAQLPGEKKNGLFGNLIALSLGLTPNFKSNFDLAEDAKLQLSKDTYDDDLDNLLAQIGDQYADLFLAAKNLSDAILLSDILRVNTEITKAPLSASMIKRYDEHHQDLTLLKALVRQQLPEKYKEIFFDQSKNGYAGYIDGGASQEEFYKFIKPILEKMDGTEELLVKLNREDLLRKQRTFDNGSIPHQIHLGELHAILRRQEDFYPFLKDNREKIEKILTFRIPYYVGPLARGNSRFAWMTRKSEETITPWNFEEVVDKGASAQSFIERMTNFDKNLPNEKVLPKHSLLYEYFTVYNELTKVKYVTEGMRKPAFLSGEQKKAIVDLLFKTNRKVTVKQLKEDYFKKIECFDSVEISGVEDRFNASLGTYHDLLKIIKDKDFLDNEENEDILEDIVLTLTLFEDREMIEERLKTYAHLFDDKVMKQLKRRRYTGWGRLSRKLINGIRDKQSGKTILDFLKSDGFANRNFMQLIHDDSLTFKEDIQKAQVSGQGDSLHEHIANLAGSPAIKKGILQTVKVVDELVKVMGRHKPENIVIEMARENQTTQKGQKNSRERMKRIEEGIKELGSQILKEHPVENTQLQNEKLYLYYLQNGRDMYVDQELDINRLSDYDVDHIVPQSFLKDDSIDNKVLTRSDKARGKSDNVPSEEVVKKMKNYWRQLLNAKLITQRKFDNLTKAERGGLSELDKAGFIKRQLVETRQITKHVAQILDSRMNTKYDENDKLIREVKVITLKSKLVSDFRKDFQFYKVREINNYHHAHDAYLNAVVGTALIKKYPKLESEFVYGDYKVYDVRKMIAKSEQEIGKATAKYFFYSNIMNFFKTEITLANGEIRKRPLIETNGETGEIVWDKGRDFATVRKVLSMPQVNIVKKTEVQTGGFSKESILPKRNSDKLIARKKDWDPKKYGGFDSPTVAYSVLVVAKVEKGKSKKLKSVKELLGITIMERSSFEKNPIDFLEAKGYKEVKKDLIIKLPKYSLFELENGRKRMLASAGELQKGNELALPSKYVNFLYLASHYEKLKGSPEDNEQKQLFVEQHKHYLDEIIEQISEFSKRVILADANLDKVLSAYNKHRDKPIREQAENIIHLFTLTNLGAPAAFKYFDTTIDRKRYTSTKEVLDATLIHQSITGLYETRIDLSQLGGDGGEAAAKEAAAKEAAAKEAAAKGGWVQEISDSRPMLHIYLNGRRFLGLLNTGADKTCIAGRDWPANWPIHQTESSLQGLGMACGVARSSQPLRWQHEDKSGIIHPFVIPTLPFTLWGRDIMKDIKVRLMTDSPDDSQDLMIGAIESNLFADQISWKSDQPVWLNQWPLKQEKLQALQQLVTEQLQLGHLEESNSPWNTPVFVIKKKSGKWRLLQDLRAVNATMHDMGALQPGLPSPVAVPKGWEIIIIDLQDCFFNIKLHPEDCKRFAFSVPSPNFKRPYQRFQWKVLPQGMKNSPTLCQKFVDKAILTVRDKYQDSYIVHYMDDILLAHPSRSIVDEILTSMIQALNKHGLVVSTEKIQKYDNLKYLGTHIQGDSVSYQKLQIRTDKLRTLNDFQKLLGNINWIRPFLKLTTGELKPLFEILNPDSNPISTRKLTPEACKALQLMNERLSTARVKRLDLSQPWSLCILKTEYTPTACLWQDGVVEWIHLPHISPKVITPYDIFCTQLIIKGRHRSKELFSKDPDYIVVPYTKVQFDLLLQEKEDWPISLLGFLGEVHFHLPKDPLLTFTLQTAIIFPHMTSTTPLEKGIVIFTDGSANGRSVTYIQGREPIIKENTQNTAQQAEIVAVITAFEEVSQPFNLYTDSKYVTGLFPEIETATLSPRTKIYTELKHLQRLIHKRQEKFYIGHIRGHTGLPGPLAQGNAYADSLTRILTAGKRTADGSEFEKRTADGSEFESPKKKAKVE

SEQ ID NO: 3246 - protein, 2116 aa, synthetic construct
MPAAKRVKLDGGDKKYSIGLDIGTNSVGWAVITDEYKVPSKKFKVLGNTDRHSIKKNLIGALLFDSGETAEATRLKRTARRRYTRRKNRICYLQEIFSNEMAKVDDSFFHRLEESFLVEEDKKHERHPIFGNIVDEVAYHEKYPTIYHLRKKLVDSTDKADLRLIYLALAHMIKFRGHFLIEGDLNPDNSDVDKLFIQLVQTYNQLFEENPINASGVDAKAILSARLSKSRRLENLIAQLPGEKKNGLFGNLIALSLGLTPNFKSNFDLAEDAKLQLSKDTYDDDLDNLLAQIGDQYADLFLAAKNLSDAILLSDILRVNTEITKAPLSASMIKRYDEHHQDLTLLKALVRQQLPEKYKEIFFDQSKNGYAGYIDGGASQEEFYKFIKPILEKMDGTEELLVKLNREDLLRKQRTFDNGSIPHQIHLGELHAILRRQEDFYPFLKDNREKIEKILTFRIPYYVGPLARGNSRFAWMTRKSEETITPWNFEEVVDKGASAQSFIERMTNFDKNLPNEKVLPKHSLLYEYFTVYNELTKVKYVTEGMRKPAFLSGEQKKAIVDLLFKTNRKVTVKQLKEDYFKKIECFDSVEISGVEDRFNASLGTYHDLLKIIKDKDFLDNEENEDILEDIVLTLTLFEDREMIEERLKTYAHLFDDKVMKQLKRRRYTGWGRLSRKLINGIRDKQSGKTILDFLKSDGFANRNFMQLIHDDSLTFKEDIQKAQVSGQGDSLHEHIANLAGSPAIKKGILQTVKVVDELVKVMGRHKPENIVIEMARENQTTQKGQKNSRERMKRIEEGIKELGSQILKEHPVENTQLQNEKLYLYYLQNGRDMYVDQELDINRLSDYDVDHIVPQSFLKDDSIDNKVLTRSDKARGKSDNVPSEEVVKKMKNYWRQLLNAKLITQRKFDNLTKAERGGLSELDKAGFIKRQLVETRQITKHVAQILDSRMNTKYDENDKLIREVKVITLKSKLVSDFRKDFQFYKVREINNYHHAHDAYLNAVVGTALIKKYPKLESEFVYGDYKVYDVRKMIAKSEQEIGKATAKYFFYSNIMNFFKTEITLANGEIRKRPLIETNGETGEIVWDKGRDFATVRKVLSMPQVNIVKKTEVQTGGFSKESILPKRNSDKLIARKKDWDPKKYGGFDSPTVAYSVLVVAKVEKGKSKKLKSVKELLGITIMERSSFEKNPIDFLEAKGYKEVKKDLIIKLPKYSLFELENGRKRMLASAGELQKGNELALPSKYVNFLYLASHYEKLKGSPEDNEQKQLFVEQHKHYLDEIIEQISEFSKRVILADANLDKVLSAYNKHRDKPIREQAENIIHLFTLTNLGAPAAFKYFDTTIDRKRYTSTKEVLDATLIHQSITGLYETRIDLSQLGGDGGGSSGGSEAAAKGGWVQEISDSRPMLHIYLNGRRFLGLLNTGADKTCIAGRDWPANWPIHQTESSLQGLGMACGVARSSQPLRWQHEDKSGIIHPFVIPTLPFTLWGRDIMKDIKVRLMTDSPDDSQDLMIGAIESNLFADQISWKSDQPVWLNQWPLKQEKLQALQQLVTEQLQLGHLEESNSPWNTPVFVIKKKSGKWRLLQDLRAVNATMHDMGALQPGLPSPVAVPKGWEIIIIDLQDCFFNIKLHPEDCKRFAFSVPSPNFKRPYQRFQWKVLPQGMKNSPTLCQKFVDKAILTVRDKYQDSYIVHYMDDILLAHPSRSIVDEILTSMIQALNKHGLVVSTEKIQKYDNLKYLGTHIQGDSVSYQKLQIRTDKLRTLNDFQKLLGNINWIRPFLKLTTGELKPLFEILNPDSNPISTRKLTPEACKALQLMNERLSTARVKRLDLSQPWSLCILKTEYTPTACLWQDGVVEWIHLPHISPKVITPYDIFCTQLIIKGRHRSKELFSKDPDYIVVPYTKVQFDLLLQEKEDWPISLLGFLGEVHFHLPKDPLLTFTLQTAIIFPHMTSTTPLEKGIVIFTDGSANGRSVTYIQGREPIIKENTQNTAQQAEIVAVITAFEEVSQPFNLYTDSKYVTGLFPEIETATLSPRTKIYTELKHLQRLIHKRQEKFYIGHIRGHTGLPGPLAQGNAYADSLTRILTAGKRTADGSEFEKRTADGSEFESPKKKAKVE

SEQ ID NO: 3247 - protein, 2114 aa, synthetic construct
MPAAKRVKLDGGDKKYSIGLDIGTNSVGWAVITDEYKVPSKKFKVLGNTDRHSIKKNLIGALLFDSGETAEATRLKRTARRRYTRRKNRICYLQEIFSNEMAKVDDSFFHRLEESFLVEEDKKHERHPIFGNIVDEVAYHEKYPTIYHLRKKLVDSTDKADLRLIYLALAHMIKFRGHFLIEGDLNPDNSDVDKLFIQLVQTYNQLFEENPINASGVDAKAILSARLSKSRRLENLIAQLPGEKKNGLFGNLIALSLGLTPNFKSNFDLAEDAKLQLSKDTYDDDLDNLLAQIGDQYADLFLAAKNLSDAILLSDILRVNTEITKAPLSASMIKRYDEHHQDLTLLKALVRQQLPEKYKEIFFDQSKNGYAGYIDGGASQEEFYKFIKPILEKMDGTEELLVKLNREDLLRKQRTFDNGSIPHQIHLGELHAILRRQEDFYPFLKDNREKIEKILTFRIPYYVGPLARGNSRFAWMTRKSEETITPWNFEEVVDKGASAQSFIERMTNFDKNLPNEKVLPKHSLLYEYFTVYNELTKVKYVTEGMRKPAFLSGEQKKAIVDLLFKTNRKVTVKQLKEDYFKKIECFDSVEISGVEDRFNASLGTYHDLLKIIKDKDFLDNEENEDILEDIVLTLTLFEDREMIEERLKTYAHLFDDKVMKQLKRRRYTGWGRLSRKLINGIRDKQSGKTILDFLKSDGFANRNFMQLIHDDSLTFKEDIQKAQVSGQGDSLHEHIANLAGSPAIKKGILQTVKVVDELVKVMGRHKPENIVIEMARENQTTQKGQKNSRERMKRIEEGIKELGSQILKEHPVENTQLQNEKLYLYYLQNGRDMYVDQELDINRLSDYDVDHIVPQSFLKDDSIDNKVLTRSDKARGKSDNVPSEEVVKKMKNYWRQLLNAKLITQRKFDNLTKAERGGLSELDKAGFIKRQLVETRQITKHVAQILDSRMNTKYDENDKLIREVKVITLKSKLVSDFRKDFQFYKVREINNYHHAHDAYLNAVVGTALIKKYPKLESEFVYGDYKVYDVRKMIAKSEQEIGKATAKYFFYSNIMNFFKTEITLANGEIRKRPLIETNGETGEIVWDKGRDFATVRKVLSMPQVNIVKKTEVQTGGFSKESILPKRNSDKLIARKKDWDPKKYGGFDSPTVAYSVLVVAKVEKGKSKKLKSVKELLGITIMERSSFEKNPIDFLEAKGYKEVKKDLIIKLPKYSLFELENGRKRMLASAGELQKGNELALPSKYVNFLYLASHYEKLKGSPEDNEQKQLFVEQHKHYLDEIIEQISEFSKRVILADANLDKVLSAYNKHRDKPIREQAENIIHLFTLTNLGAPAAFKYFDTTIDRKRYTSTKEVLDATLIHQSITGLYETRIDLSQLGGDGGGGGGGSGSSGGWVQEISDSRPMLHIYLNGRRFLGLLNTGADKTCIAGRDWPANWPIHQTESSLQGLGMACGVARSSQPLRWQHEDKSGIIHPFVIPTLPFTLWGRDIMKDIKVRLMTDSPDDSQDLMIGAIESNLFADQISWKSDQPVWLNQWPLKQEKLQALQQLVTEQLQLGHLEESNSPWNTPVFVIKKKSGKWRLLQDLRAVNATMHDMGALQPGLPSPVAVPKGWEIIIIDLQDCFFNIKLHPEDCKRFAFSVPSPNFKRPYQRFQWKVLPQGMKNSPTLCQKFVDKAILTVRDKYQDSYIVHYMDDILLAHPSRSIVDEILTSMIQALNKHGLVVSTEKIQKYDNLKYLGTHIQGDSVSYQKLQIRTDKLRTLNDFQKLLGNINWIRPFLKLTTGELKPLFEILNPDSNPISTRKLTPEACKALQLMNERLSTARVKRLDLSQPWSLCILKTEYTPTACLWQDGVVEWIHLPHISPKVITPYDIFCTQLIIKGRHRSKELFSKDPDYIVVPYTKVQFDLLLQEKEDWPISLLGFLGEVHFHLPKDPLLTFTLQTAIIFPHMTSTTPLEKGIVIFTDGSANGRSVTYIQGREPIIKENTQNTAQQAEIVAVITAFEEVSQPFNLYTDSKYVTGLFPEIETATLSPRTKIYTELKHLQRLIHKRQEKFYIGHIRGHTGLPGPLAQGNAYADSLTRILTAGKRTADGSEFEKRTADGSEFESPKKKAKVE

SEQ ID NO: 3248 - protein, 2116 aa, synthetic construct
MPAAKRVKLDGGDKKYSIGLDIGTNSVGWAVITDEYKVPSKKFKVLGNTDRHSIKKNLIGALLFDSGETAEATRLKRTARRRYTRRKNRICYLQEIFSNEMAKVDDSFFHRLEESFLVEEDKKHERHPIFGNIVDEVAYHEKYPTIYHLRKKLVDSTDKADLRLIYLALAHMIKFRGHFLIEGDLNPDNSDVDKLFIQLVQTYNQLFEENPINASGVDAKAILSARLSKSRRLENLIAQLPGEKKNGLFGNLIALSLGLTPNFKSNFDLAEDAKLQLSKDTYDDDLDNLLAQIGDQYADLFLAAKNLSDAILLSDILRVNTEITKAPLSASMIKRYDEHHQDLTLLKALVRQQLPEKYKEIFFDQSKNGYAGYIDGGASQEEFYKFIKPILEKMDGTEELLVKLNREDLLRKQRTFDNGSIPHQIHLGELHAILRRQEDFYPFLKDNREKIEKILTFRIPYYVGPLARGNSRFAWMTRKSEETITPWNFEEVVDKGASAQSFIERMTNFDKNLPNEKVLPKHSLLYEYFTVYNELTKVKYVTEGMRKPAFLSGEQKKAIVDLLFKTNRKVTVKQLKEDYFKKIECFDSVEISGVEDRFNASLGTYHDLLKIIKDKDFLDNEENEDILEDIVLTLTLFEDREMIEERLKTYAHLFDDKVMKQLKRRRYTGWGRLSRKLINGIRDKQSGKTILDFLKSDGFANRNFMQLIHDDSLTFKEDIQKAQVSGQGDSLHEHIANLAGSPAIKKGILQTVKVVDELVKVMGRHKPENIVIEMARENQTTQKGQKNSRERMKRIEEGIKELGSQILKEHPVENTQLQNEKLYLYYLQNGRDMYVDQELDINRLSDYDVDHIVPQSFLKDDSIDNKVLTRSDKARGKSDNVPSEEVVKKMKNYWRQLLNAKLITQRKFDNLTKAERGGLSELDKAGFIKRQLVETRQITKHVAQILDSRMNTKYDENDKLIREVKVITLKSKLVSDFRKDFQFYKVREINNYHHAHDAYLNAVVGTALIKKYPKLESEFVYGDYKVYDVRKMIAKSEQEIGKATAKYFFYSNIMNFFKTEITLANGEIRKRPLIETNGETGEIVWDKGRDFATVRKVLSMPQVNIVKKTEVQTGGFSKESILPKRNSDKLIARKKDWDPKKYGGFDSPTVAYSVLVVAKVEKGKSKKLKSVKELLGITIMERSSFEKNPIDFLEAKGYKEVKKDLIIKLPKYSLFELENGRKRMLASAGELQKGNELALPSKYVNFLYLASHYEKLKGSPEDNEQKQLFVEQHKHYLDEIIEQISEFSKRVILADANLDKVLSAYNKHRDKPIREQAENIIHLFTLTNLGAPAAFKYFDTTIDRKRYTSTKEVLDATLIHQSITGLYETRIDLSQLGGDGGGGGEAAAKGSSGGWVQEISDSRPMLHIYLNGRRFLGLLNTGADKTCIAGRDWPANWPIHQTESSLQGLGMACGVARSSQPLRWQHEDKSGIIHPFVIPTLPFTLWGRDIMKDIKVRLMTDSPDDSQDLMIGAIESNLFADQISWKSDQPVWLNQWPLKQEKLQALQQLVTEQLQLGHLEESNSPWNTPVFVIKKKSGKWRLLQDLRAVNATMHDMGALQPGLPSPVAPPKGWEIIIIDLQDCFFNIKLHPEDCKRFAFSVPSPNFKRPYQRFQWKVLPQGMKNSPTLCQKFVDKAILTVRDKYQDSYIVHYMDDILLAHPSRSIVDEILTSMIQALNKHGLVVSTEKIQKYDNLKYLGTHIQGDSVSYQKLQIRTDKLRTLNDFQKLLGNINWIRPFLKLTTGELKPLFEILNPDSNPISTRKLTPEACKALQLMNERLSTARVKRLDLSQPWSLCILKTEYTPTACLWQDGVVEWIHLPHISPKVITPYDIFCTQLIIKGRHRSKELFSKDPDYIVVPYTKVQFDLLLQEKEDWPISLLGFLGEVHFHLPKDPLLTFTLQTAIIFPHMTSTTPLEKGIVIFTDGSANGRSVTYIQGREPIIKENTQNTAQQAEIVAVITAFEEVSQPFNLYTDSKYVTGLFPEIETATLSPRTKIYTELKHLQRLIHKRQEKFYIGHIRGHTGLPGPLAQGNAYADSLTRILTAGKRTADGSEFEKRTADGSEFESPKKKAKVE

SEQ ID NO: 3249 - protein, 2116 aa, synthetic construct
MPAAKRVKLDGGDKKYSIGLDIGTNSVGWAVITDEYKVPSKKFKVLGNTDRHSIKKNLIGALLFDSGETAEATRLKRTARRRYTRRKNRICYLQEIFSNEMAKVDDSFFHRLEESFLVEEDKKHERHPIFGNIVDEVAYHEKYPTIYHLRKKLVDSTDKADLRLIYLALAHMIKFRGHFLIEGDLNPDNSDVDKLFIQLVQTYNQLFEENPINASGVDAKAILSARLSKSRRLENLIAQLPGEKKNGLFGNLIALSLGLTPNFKSNFDLAEDAKLQLSKDTYDDDLDNLLAQIGDQYADLFLAAKNLSDAILLSDILRVNTEITKAPLSASMIKRYDEHHQDLTLLKALVRQQLPEKYKEIFFDQSKNGYAGYIDGGASQEEFYKFIKPILEKMDGTEELLVKLNREDLLRKQRTFDNGSIPHQIHLGELHAILRRQEDFYPFLKDNREKIEKILTFRIPYYVGPLARGNSRFAWMTRKSEETITPWNFEEVVDKGASAQSFIERMTNFDKNLPNEKVLPKHSLLYEYFTVYNELTKVKYVTEGMRKPAFLSGEQKKAIVDLLFKTNRKVTVKQLKEDYFKKIECFDSVEISGVEDRFNASLGTYHDLLKIIKDKDFLDNEENEDILEDIVLTLTLFEDREMIEERLKTYAHLFDDKVMKQLKRRRYTGWGRLSRKLINGIRDKQSGKTILDFLKSDGFANRNFMQLIHDDSLTFKEDIQKAQVSGQGDSLHEHIANLAGSPAIKKGILQTVKVVDELVKVMGRHKPENIVIEMARENQTTQKGQKNSRERMKRIEEGIKELGSQILKEHPVENTQLQNEKLYLYYLQNGRDMYVDQELDINRLSDYDVDHIVPQSFLKDDSIDNKVLTRSDKARGKSDNVPSEEVVKKMKNYWRQLLNAKLITQRKFDNLTKAERGGLSELDKAGFIKRQLVETRQITKHVAQILDSRMNTKYDENDKLIREVKVITLKSKLVSDFRKDFQFYKVREINNYHHAHDAYLNAVVGTALIKKYPKLESEFVYGDYKVYDVRKMIAKSEQEIGKATAKYFFYSNIMNFFKTEITLANGEIRKRPLIETNGETGEIVWDKGRDFATVRKVLSMPQVNIVKKTEVQTGGFSKESILPKRNSDKLIARKKDWDPKKYGGFDSPTVAYSVLVVAKVEKGKSKKLKSVKELLGITIMERSSFEKNPIDFLEAKGYKEVKKDLIIKLPKYSLFELENGRKRMLASAGELQKGNELALPSKYVNFLYLASHYEKLKGSPEDNEQKQLFVEQHKHYLDEIIEQISEFSKRVILADANLDKVLSAYNKHRDKPIREQAENIIHLFTLTNLGAPAAFKYFDTTIDRKRYTSTKEVLDATLIHQSITGLYETRIDLSQLGGDGGEAAAKGGGGSSGGWVQEISDSRPMLHIYLNGRRFLGLLNTGADKTCIAGRDWPANWPIHQTESSLQGLGMACGVARSSQPLRWQHEDKSGIIHPFVIPTLPFTLWGRDIMKDIKVRLMTDSPDDSQDLMIGAIESNLFADQISWKSDQPVWLNQWPLKQEKLQALQQLVTEQLQLGHLEESNSPWNTPVFVIKKKSGKWRLLQDLRAVNATMHDMGALQPGLPSPVAPPKGWEIIIIDLQDCFFNIKLHPEDCKRFAFSVPSPNFKRPYQRFQWKVLPQGMKNSPTLCQKFVDKAILTVRDKYQDSYIVHYMDDILLAHPSRSIVDEILTSMIQALNKHGLVVSTEKIQKYDNLKYLGTHIQGDSVSYQKLQIRTDKLRTLNDFQKLLGNINWIRPFLKLTTGELKPLFEILNPDSNPISTRKLTPEACKALQLMNERLSTARVKRLDLSQPWSLCILKTEYTPTACLWQDGVVEWIHLPHISPKVITPYDIFCTQLIIKGRHRSKELFSKDPDYIVVPYTKVQFDLLLQEKEDWPISLLGFLGEVHFHLPKDPLLTFTLQTAIIFPHMTSTTPLEKGIVIFTDGSANGRSVTYIQGREPIIKENTQNTAQQAEIVAVITAFEEVSQPFNLYTDSKYVTGLFPEIETATLSPRTKIYTELKHLQRLIHKRQEKFYIGHIRGHTGLPGPLAQGNAYADSLTRILTAGKRTADGSEFEKRTADGSEFESPKKKAKVE

SEQ ID NO: 3250 - protein, 2116 aa, synthetic construct
MPAAKRVKLDGGDKKYSIGLDIGTNSVGWAVITDEYKVPSKKFKVLGNTDRHSIKKNLIGALLFDSGETAEATRLKRTARRRYTRRKNRICYLQEIFSNEMAKVDDSFFHRLEESFLVEEDKKHERHPIFGNIVDEVAYHEKYPTIYHLRKKLVDSTDKADLRLIYLALAHMIKFRGHFLIEGDLNPDNSDVDKLFIQLVQTYNQLFEENPINASGVDAKAILSARLSKSRRLENLIAQLPGEKKNGLFGNLIALSLGLTPNFKSNFDLAEDAKLQLSKDTYDDDLDNLLAQIGDQYADLFLAAKNLSDAILLSDILRVNTEITKAPLSASMIKRYDEHHQDLTLLKALVRQQLPEKYKEIFFDQSKNGYAGYIDGGASQEEFYKFIKPILEKMDGTEELLVKLNREDLLRKQRTFDNGSIPHQIHLGELHAILRRQEDFYPFLKDNREKIEKILTFRIPYYVGPLARGNSRFAWMTRKSEETITPWNFEEVVDKGASAQSFIERMTNFDKNLPNEKVLPKHSLLYEYFTVYNELTKVKYVTEGMRKPAFLSGEQKKAIVDLLFKTNRKVTVKQLKEDYFKKIECFDSVEISGVEDRFNASLGTYHDLLKIIKDKDFLDNEENEDILEDIVLTLTLFEDREMIEERLKTYAHLFDDKVMKQLKRRRYTGWGRLSRKLINGIRDKQSGKTILDFLKSDGFANRNFMQLIHDDSLTFKEDIQKAQVSGQGDSLHEHIANLAGSPAIKKGILQTVKVVDELVKVMGRHKPENIVIEMARENQTTQKGQKNSRERMKRIEEGIKELGSQILKEHPVENTQLQNEKLYLYYLQNGRDMYVDQELDINRLSDYDVDHIVPQSFLKDDSIDNKVLTRSDKARGKSDNVPSEEVVKKMKNYWRQLLNAKLITQRKFDNLTKAERGGLSELDKAGFIKRQLVETRQITKHVAQILDSRMNTKYDENDKLIREVKVITLKSKLVSDFRKDFQFYKVREINNYHHAHDAYLNAVVGTALIKKYPKLESEFVYGDYKVYDVRKMIAKSEQEIGKATAKYFFYSNIMNFFKTEITLANGEIRKRPLIETNGETGEIVWDKGRDFATVRKVLSMPQVNIVKKTEVQTGGFSKESILPKRNSDKLIARKKDWDPKKYGGFDSPTVAYSVLVVAKVEKGKSKKLKSVKELLGITIMERSSFEKNPIDFLEAKGYKEVKKDLIIKLPKYSLFELENGRKRMLASAGELQKGNELALPSKYVNFLYLASHYEKLKGSPEDNEQKQLFVEQHKHYLDEIIEQISEFSKRVILADANLDKVLSAYNKHRDKPIREQAENIIHLFTLTNLGAPAAFKYFDTTIDRKRYTSTKEVLDATLIHQSITGLYETRIDLSQLGGDGGEAAAKGSSGGSGGVQEISDSRPMLHIYLNGRRFLGLLDTGADKTCIAGRDWPANWPIHQTESSLQGLGMACGVARSSQPLRWQHEDKSGIIHPFVIPTLPFTLWGRDIMKDIKVRLMTDSPDDSQDLMIGAIESNLFADQISWKSDQPVWLNQWPLKQEKLQALQQLVTEQLQLGHLEESNSPWNTPVFVIKKKSGKWRLLQDLRAVNATMHDMGALQPGLPSPPAVPKGWEIIIIDLQDCFFNIKLHPEDCKRFAFSVPSPNFKRPYQRFQWKVLPQGMKNSPTLCQKFVDKAILTVRDKYQDSYIVHYMDDILLAHPSRSIVDEILTSMIQALNKHGLVVSTEKIQKYDNLKYLGTHIQGDSVSYQKLQIRTDKLRTLNDFQKLLGNINWIRPFLKLTTGELKPLFEILNPDSNPISTRKLTPEACKALQLMNERLSTARVKRLDLSQPWSLCILKTEYTPTACLWQDGVVEWIHLPHISPKVITPYDIFCTQLIIKGRHRSKELFSKDPDYIVVPYTKVQFDLLLQEKEDWPISLLGFLGEVHFHLPKDPLLTFTLQTAIIFPHMTSTTPLEKGIVIFTDGSANGRSVTYIQGREPIIKENTQNTAQQAEIVAVITAFEEVSQPFNLYTDSKYVTGLFPEIETATLSPRTKIYTELKHLQRLIHKRQEKFYIGHIRGHTGLPGPLAQGNAYADSLTRILTAAGKRTADGSEFEKRTADGSEFESPKKKAKVE

SEQ ID NO: 3251 - protein, 2116 aa, synthetic construct
MPAAKRVKLDGGDKKYSIGLDIGTNSVGWAVITDEYKVPSKKFKVLGNTDRHSIKKNLIGALLFDSGETAEATRLKRTARRRYTRRKNRICYLQEIFSNEMAKVDDSFFHRLEESFLVEEDKKHERHPIFGNIVDEVAYHEKYPTIYHLRKKLVDSTDKADLRLIYLALAHMIKFRGHFLIEGDLNPDNSDVDKLFIQLVQTYNQLFEENPINASGVDAKAILSARLSKSRRLENLIAQLPGEKKNGLFGNLIALSLGLTPNFKSNFDLAEDAKLQLSKDTYDDDLDNLLAQIGDQYADLFLAAKNLSDAILLSDILRVNTEITKAPLSASMIKRYDEHHQDLTLLKALVRQQLPEKYKEIFFDQSKNGYAGYIDGGASQEEFYKFIKPILEKMDGTEELLVKLNREDLLRKQRTFDNGSIPHQIHLGELHAILRRQEDFYPFLKDNREKIEKILTFRIPYYVGPLARGNSRFAWMTRKSEETITPWNFEEVVDKGASAQSFIERMTNFDKNLPNEKVLPKHSLLYEYFTVYNELTKVKYVTEGMRKPAFLSGEQKKAIVDLLFKTNRKVTVKQLKEDYFKKIECFDSVEISGVEDRFNASLGTYHDLLKIIKDKDFLDNEENEDILEDIVLTLTLFEDREMIEERLKTYAHLFDDKVMKQLKRRRYTGWGRLSRKLINGIRDKQSGKTILDFLKSDGFANRNFMQLIHDDSLTFKEDIQKAQVSGQGDSLHEHIANLAGSPAIKKGILQTVKVVDELVKVMGRHKPENIVIEMARENQTTQKGQKNSRERMKRIEEGIKELGSQILKEHPVENTQLQNEKLYLYYLQNGRDMYVDQELDINRLSDYDVDHIVPQSFLKDDSIDNKVLTRSDKARGKSDNVPSEEVVKKMKNYWRQLLNAKLITQRKFDNLTKAERGGLSELDKAGFIKRQLVETRQITKHVAQILDSRMNTKYDENDKLIREVKVITLKSKLVSDFRKDFQFYKVREINNYHHAHDAYLNAVVGTALIKKYPKLESEFVYGDYKVYDVRKMIAKSEQEIGKATAKYFFYSNIMNFFKTEITLANGEIRKRPLIETNGETGEIVWDKGRDFATVRKVLSMPQVNIVKKTEVQTGGFSKESILPKRNSDKLIARKKDWDPKKYGGFDSPTVAYSVLVVAKVEKGKSKKLKSVKELLGITIMERSSFEKNPIDFLEAKGYKEVKKDLIIKLPKYSLFELENGRKRMLASAGELQKGNELALPSKYVNFLYLASHYEKLKGSPEDNEQKQLFVEQHKHYLDEIIEQISEFSKRVILADANLDKVLSAYNKHRDKPIREQAENIIHLFTLTNLGAPAAFKYFDTTIDRKRYTSTKEVLDATLIHQSITGLYETRIDLSQLGGDGGPAPEAAAKGGSGGVQEISDSRPMLHIYLNGRRFLGLLDTGADKTCIAGRDWPANWPIHQTESSLQGLGMACGVARSSQPLRWQHEDKSGIIHPFVIPTLPFTLWGRDIMKDIKVRLMTDSPDDSQDLMIGAIESNLFADQISWKSDQPVWLNQWPLKQEKLQALQQLVTEQLQLGHLEESNSPWNTPVFVIKKKSGKWRLLQDLRAVNATMHDMGALQPGLPSPPAVPKGWEIIIIDLQDCFFNIKLHPEDCKRFAFSVPSPNFKRPYQRFQWKVLPQGMKNSPTLCQKFVDKAILTVRDKYQDSYIVHYMDDILLAHPSRSIVDEILTSMIQALNKHGLVVSTEKIQKYDNLKYLGTHIQGDSVSYQKLQIRTDKLRTLNDFQKLLGNINWIRPFLKLTTGELKPLFEILNPDSNPISTRKLTPEACKALQLMNERLSTARVKRLDLSQPWSLCILKTEYTPTACLWQDGVVEWIHLPHISPKVITPYDIFCTQLIIKGRHRSKELFSKDPDYIVVPYTKVQFDLLLQEKEDWPISLLGFLGEVHFHLPKDPLLTFTLQTAIIFPHMTSTTPLEKGIVIFTDGSANGRSVTYIQGREPIIKENTQNTAQQAEIVAVITAFEEVSQPFNLYTDSKYVTGLFPEIETATLSPRTKIYTELKHLQRLIHKRQEKFYIGHIRGHTGLPGPLAQGNAYADSLTRILTAAGKRTADGSEFEKRTADGSEFESPKKKAKVE

SEQ ID NO: 3252 - protein, 2116 aa, synthetic construct
MPAAKRVKLDGGDKKYSIGLDIGTNSVGWAVITDEYKVPSKKFKVLGNTDRHSIKKNLIGALLFDSGETAEATRLKRTARRRYTRRKNRICYLQEIFSNEMAKVDDSFFHRLEESFLVEEDKKHERHPIFGNIVDEVAYHEKYPTIYHLRKKLVDSTDKADLRLIYLALAHMIKFRGHFLIEGDLNPDNSDVDKLFIQLVQTYNQLFEENPINASGVDAKAILSARLSKSRRLENLIAQLPGEKKNGLFGNLIALSLGLTPNFKSNFDLAEDAKLQLSKDTYDDDLDNLLAQIGDQYADLFLAAKNLSDAILLSDILRVNTEITKAPLSASMIKRYDEHHQDLTLLKALVRQQLPEKYKEIFFDQSKNGYAGYIDGGASQEEFYKFIKPILEKMDGTEELLVKLNREDLLRKQRTFDNGSIPHQIHLGELHAILRRQEDFYPFLKDNREKIEKILTFRIPYYVGPLARGNSRFAWMTRKSEETITPWNFEEVVDKGASAQSFIERMTNFDKNLPNEKVLPKHSLLYEYFTVYNELTKVKYVTEGMRKPAFLSGEQKKAIVDLLFKTNRKVTVKQLKEDYFKKIECFDSVEISGVEDRFNASLGTYHDLLKIIKDKDFLDNEENEDILEDIVLTLTLFEDREMIEERLKTYAHLFDDKVMKQLKRRRYTGWGRLSRKLINGIRDKQSGKTILDFLKSDGFANRNFMQLIHDDSLTFKEDIQKAQVSGQGDSLHEHIANLAGSPAIKKGILQTVKVVDELVKVMGRHKPENIVIEMARENQTTQKGQKNSRERMKRIEEGIKELGSQILKEHPVENTQLQNEKLYLYYLQNGRDMYVDQELDINRLSDYDVDHIVPQSFLKDDSIDNKVLTRSDKARGKSDNVPSEEVVKKMKNYWRQLLNAKLITQRKFDNLTKAERGGLSELDKAGFIKRQLVETRQITKHVAQILDSRMNTKYDENDKLIREVKVITLKSKLVSDFRKDFQFYKVREINNYHHAHDAYLNAVVGTALIKKYPKLESEFVYGDYKVYDVRKMIAKSEQEIGKATAKYFFYSNIMNFFKTEITLANGEIRKRPLIETNGETGEIVWDKGRDFATVRKVLSMPQVNIVKKTEVQTGGFSKESILPKRNSDKLIARKKDWDPKKYGGFDSPTVAYSVLVVAKVEKGKSKKLKSVKELLGITIMERSSFEKNPIDFLEAKGYKEVKKDLIIKLPKYSLFELENGRKRMLASAGELQKGNELALPSKYVNFLYLASHYEKLKGSPEDNEQKQLFVEQHKHYLDEIIEQISEFSKRVILADANLDKVLSAYNKHRDKPIREQAENIIHLFTLTNLGAPAAFKYFDTTIDRKRYTSTKEVLDATLIHQSITGLYETRIDLSQLGGDGGGGGGSSEAAAKGGVQEISDSRPMLHIYLNGRRFLGLLDTGADKTCIAGRDWPANWPIHQTESSLQGLGMACGVARSSQPLRWQHEDKSGIIHPFVIPTLPFTLWGRDIMKDIKVRLMTDSPDDSQDLMIGAIESNLFADQISWKSDQPVWLNQWPLKQEKLQALQQLVTEQLQLGHLEESNSPWNTPVFVIKKKSGKWRLLQDLRAVNATMHDMGALQPGLPSPVAVPKGWEIIIIDLQDCFFNIKLHPEDCKRFAFSVPSPNFKRPYQRFQWKVLPQGMKNSPTLCQKFVDKAILTVRDKYQDSYIVHYMDDILLAHPSRSIVDEILTSMIQALNKHGLVVSTEKIQKYDNLKYLGTHIQGDSVSYQKLQIRTDKLRTLNDFQKLLGNINWIRPFLKLTTGELKPLFEILNPDSNPISTRKLTPEACKALQLMNERLSTARVKRLDLSQPWSLCILKTEYTPTACLWQDGVVEWIHLPHISPKVITPYDIFCTQLIIKGRHRSKELFSKDPDYIVVPYTKVQFDLLLQEKEDWPISLLGFLGEVHFHLPKDPLLTFTLQTAIIFPHMTSTTPLEKGIVIFTDGSANGRSVTYIQGREPIIKENTQNTAQQAEIVAVITAFEEVSQPFNLYTDSKYVTGLFPEIETATLSPRTKIYTELKHLQRLIHKRQEKFYIGHIRGHTGLPGPLAQGNAYADSLTRILTAAGKRTADGSEFEKRTADGSEFESPKKKAKVE

SEQ ID NO: 3253 - protein, 2114 aa, synthetic construct
MPAAKRVKLDGGDKKYSIGLDIGTNSVGWAVITDEYKVPSKKFKVLGNTDRHSIKKNLIGALLFDSGETAEATRLKRTARRRYTRRKNRICYLQEIFSNEMAKVDDSFFHRLEESFLVEEDKKHERHPIFGNIVDEVAYHEKYPTIYHLRKKLVDSTDKADLRLIYLALAHMIKFRGHFLIEGDLNPDNSDVDKLFIQLVQTYNQLFEENPINASGVDAKAILSARLSKSRRLENLIAQLPGEKKNGLFGNLIALSLGLTPNFKSNFDLAEDAKLQLSKDTYDDDLDNLLAQIGDQYADLFLAAKNLSDAILLSDILRVNTEITKAPLSASMIKRYDEHHQDLTLLKALVRQQLPEKYKEIFFDQSKNGYAGYIDGGASQEEFYKFIKPILEKMDGTEELLVKLNREDLLRKQRTFDNGSIPHQIHLGELHAILRRQEDFYPFLKDNREKIEKILTFRIPYYVGPLARGNSRFAWMTRKSEETITPWNFEEVVDKGASAQSFIERMTNFDKNLPNEKVLPKHSLLYEYFTVYNELTKVKYVTEGMRKPAFLSGEQKKAIVDLLFKTNRKVTVKQLKEDYFKKIECFDSVEISGVEDRFNASLGTYHDLLKIIKDKDFLDNEENEDILEDIVLTLTLFEDREMIEERLKTYAHLFDDKVMKQLKRRRYTGWGRLSRKLINGIRDKQSGKTILDFLKSDGFANRNFMQLIHDDSLTFKEDIQKAQVSGQGDSLHEHIANLAGSPAIKKGILQTVKVVDELVKVMGRHKPENIVIEMARENQTTQKGQKNSRERMKRIEEGIKELGSQILKEHPVENTQLQNEKLYLYYLQNGRDMYVDQELDINRLSDYDVDHIVPQSFLKDDSIDNKVLTRSDKARGKSDNVPSEEVVKKMKNYWRQLLNAKLITQRKFDNLTKAERGGLSELDKAGFIKRQLVETRQITKHVAQILDSRMNTKYDENDKLIREVKVITLKSKLVSDFRKDFQFYKVREINNYHHAHDAYLNAVVGTALIKKYPKLESEFVYGDYKVYDVRKMIAKSEQEIGKATAKYFFYSNIMNFFKTEITLANGEIRKRPLIETNGETGEIVWDKGRDFATVRKVLSMPQVNIVKKTEVQTGGFSKESILPKRNSDKLIARKKDWDPKKYGGFDSPTVAYSVLVVAKVEKGKSKKLKSVKELLGITIMERSSFEKNPIDFLEAKGYKEVKKDLIIKLPKYSLFELENGRKRMLASAGELQKGNELALPSKYVNFLYLASHYEKLKGSPEDNEQKQLFVEQHKHYLDEIIEQISEFSKRVILADANLDKVLSAYNKHRDKPIREQAENIIHLFTLTNLGAPAAFKYFDTTIDRKRYTSTKEVLDATLIHQSITGLYETRIDLSQLGGDGGGGGGGSGSSGGVQEISDSRPMLHIYLNGRRFLGLLDTGADKTCIAGRDWPANWPIHQTESSLQGLGMACGVARSSQPLRWQHEDKSGIIHPFVIPTLPFTLWGRDIMKDIKVRLMTDSPDDSQDLMIGAIESNLFADQISWKSDQPVWLNQWPLKQEKLQALQQLVTEQLQLGHLEESNSPWNTPVFVIKKKSGKWRLLQDLRAVNATMHDMGALQPGLPSPVAVPKGWEIIIIDLQDCFFNIKLHPEDCKRFAFSVPSPNFKRPYQRFQWKVLPQGMKNSPTLCQKFVDKAILTVRDKYQDSYIVHYMDDILLAHPSRSIVDEILTSMIQALNKHGLVVSTEKIQKYDNLKYLGTHIQGDSVSYQKLQIRTDKLRTLNDFQKLLGNINWIRPFLKLTTGELKPLFEILNPDSNPISTRKLTPEACKALQLMNERLSTARVKRLDLSQPWSLCILKTEYTPTACLWQDGVVEWIHLPHISPKVITPYDIFCTQLIIKGRHRSKELFSKDPDYIVVPYTKVQFDLLLQEKEDWPISLLGFLGEVHFHLPKDPLLTFTLQTAIIFPHMTSTTPLEKGIVIFTDGSANGRSVTYIQGREPIIKENTQNTAQQAEIVAVITAFEEVSQPFNLYTDSKYVTGLFPEIETATLSPRTKIYTELKHLQRLIHKRQEKFYIGHIRGHTGLPGPLAQGNAYADSLTRILTAAGKRTADGSEFEKRTADGSEFESPKKKAKVE

SEQ ID NO: 3254 - protein, 2125 aa, synthetic construct
MPAAKRVKLDGGDKKYSIGLDIGTNSVGWAVITDEYKVPSKKFKVLGNTDRHSIKKNLIGALLFDSGETAEATRLKRTARRRYTRRKNRICYLQEIFSNEMAKVDDSFFHRLEESFLVEEDKKHERHPIFGNIVDEVAYHEKYPTIYHLRKKLVDSTDKADLRLIYLALAHMIKFRGHFLIEGDLNPDNSDVDKLFIQLVQTYNQLFEENPINASGVDAKAILSARLSKSRRLENLIAQLPGEKKNGLFGNLIALSLGLTPNFKSNFDLAEDAKLQLSKDTYDDDLDNLLAQIGDQYADLFLAAKNLSDAILLSDILRVNTEITKAPLSASMIKRYDEHHQDLTLLKALVRQQLPEKYKEIFFDQSKNGYAGYIDGGASQEEFYKFIKPILEKMDGTEELLVKLNREDLLRKQRTFDNGSIPHQIHLGELHAILRRQEDFYPFLKDNREKIEKILTFRIPYYVGPLARGNSRFAWMTRKSEETITPWNFEEVVDKGASAQSFIERMTNFDKNLPNEKVLPKHSLLYEYFTVYNELTKVKYVTEGMRKPAFLSGEQKKAIVDLLFKTNRKVTVKQLKEDYFKKIECFDSVEISGVEDRFNASLGTYHDLLKIIKDKDFLDNEENEDILEDIVLTLTLFEDREMIEERLKTYAHLFDDKVMKQLKRRRYTGWGRLSRKLINGIRDKQSGKTILDFLKSDGFANRNFMQLIHDDSLTFKEDIQKAQVSGQGDSLHEHIANLAGSPAIKKGILQTVKVVDELVKVMGRHKPENIVIEMARENQTTQKGQKNSRERMKRIEEGIKELGSQILKEHPVENTQLQNEKLYLYYLQNGRDMYVDQELDINRLSDYDVDHIVPQSFLKDDSIDNKVLTRSDKARGKSDNVPSEEVVKKMKNYWRQLLNAKLITQRKFDNLTKAERGGLSELDKAGFIKRQLVETRQITKHVAQILDSRMNTKYDENDKLIREVKVITLKSKLVSDFRKDFQFYKVREINNYHHAHDAYLNAVVGTALIKKYPKLESEFVYGDYKVYDVRKMIAKSEQEIGKATAKYFFYSNIMNFFKTEITLANGEIRKRPLIETNGETGEIVWDKGRDFATVRKVLSMPQVNIVKKTEVQTGGFSKESILPKRNSDKLIARKKDWDPKKYGGFDSPTVAYSVLVVAKVEKGKSKKLKSVKELLGITIMERSSFEKNPIDFLEAKGYKEVKKDLIIKLPKYSLFELENGRKRMLASAGELQKGNELALPSKYVNFLYLASHYEKLKGSPEDNEQKQLFVEQHKHYLDEIIEQISEFSKRVILADANLDKVLSAYNKHRDKPIREQAENIIHLFTLTNLGAPAAFKYFDTTIDRKRYTSTKEVLDATLIHQSITGLYETRIDLSQLGGDGGGGGGSGGGGSGGGGSGGGGSGGVQEISDSRPMLHIYLNGRRFLGLLDTGADKTCIAGRDWPANWPIHQTESSLQGLGMACGVARSSQPLRWQHEDKSGIIHPFVIPTLPFTLWGRDIMKDIKVRLMTDSPDDSQDLMIGAIESNLFADQISWKSDQPVWLNQWPLKQEKLQALQQLVTEQLQLGHLEESNSPWNTPVFVIKKKSGKWRLLQDLRAVNATMHDMGALQPGLPSPVAVPKGWEIIIIDLQDCFFNIKLHPEDCKRFAFSVPSPNFKRPYQRFQWKVLPQGMKNSPTLCQKFVDKAILTVRDKYQDSYIVHYMDDILLAHPSRSIVDEILTSMIQALNKHGLVVSTEKIQKYDNLKYLGTHIQGDSVSYQKLQIRTDKLRTLNDFQKLLGNINWIRPFLKLTTGELKPLFEILNPDSNPISTRKLTPEACKALQLMNERLSTARVKRLDLSQPWSLCILKTEYTPTACLWQDGVVEWIHLPHISPKVITPYDIFCTQLIIKGRHRSKELFSKDPDYIVVPYTKVQFDLLLQEKEDWPISLLGFLGEVHFHLPKDPLLTFTLQTAIIFPHMTSTTPLEKGIVIFTDGSANGRSVTYIQGREPIIKENTQNTAQQAEIVAVITAFEEVSQPFNLYTDSKYVTGLFPEIETATLSPRTKIYTELKHLQRLIHKRQEKFYIGHIRGHTGLPGPLAQGNAYADSLTRILTAAGKRTADGSEFEKRTADGSEFESPKKKAKVE

SEQ ID NO: 3255 - protein, 2116 aa, synthetic construct
MPAAKRVKLDGGDKKYSIGLDIGTNSVGWAVITDEYKVPSKKFKVLGNTDRHSIKKNLIGALLFDSGETAEATRLKRTARRRYTRRKNRICYLQEIFSNEMAKVDDSFFHRLEESFLVEEDKKHERHPIFGNIVDEVAYHEKYPTIYHLRKKLVDSTDKADLRLIYLALAHMIKFRGHFLIEGDLNPDNSDVDKLFIQLVQTYNQLFEENPINASGVDAKAILSARLSKSRRLENLIAQLPGEKKNGLFGNLIALSLGLTPNFKSNFDLAEDAKLQLSKDTYDDDLDNLLAQIGDQYADLFLAAKNLSDAILLSDILRVNTEITKAPLSASMIKRYDEHHQDLTLLKALVRQQLPEKYKEIFFDQSKNGYAGYIDGGASQEEFYKFIKPILEKMDGTEELLVKLNREDLLRKQRTFDNGSIPHQIHLGELHAILRRQEDFYPFLKDNREKIEKILTFRIPYYVGPLARGNSRFAWMTRKSEETITPWNFEEVVDKGASAQSFIERMTNFDKNLPNEKVLPKHSLLYEYFTVYNELTKVKYVTEGMRKPAFLSGEQKKAIVDLLFKTNRKVTVKQLKEDYFKKIECFDSVEISGVEDRFNASLGTYHDLLKIIKDKDFLDNEENEDILEDIVLTLTLFEDREMIEERLKTYAHLFDDKVMKQLKRRRYTGWGRLSRKLINGIRDKQSGKTILDFLKSDGFANRNFMQLIHDDSLTFKEDIQKAQVSGQGDSLHEHIANLAGSPAIKKGILQTVKVVDELVKVMGRHKPENIVIEMARENQTTQKGQKNSRERMKRIEEGIKELGSQILKEHPVENTQLQNEKLYLYYLQNGRDMYVDQELDINRLSDYDVDHIVPQSFLKDDSIDNKVLTRSDKARGKSDNVPSEEVVKKMKNYWRQLLNAKLITQRKFDNLTKAERGGLSELDKAGFIKRQLVETRQITKHVAQILDSRMNTKYDENDKLIREVKVITLKSKLVSDFRKDFQFYKVREINNYHHAHDAYLNAVVGTALIKKYPKLESEFVYGDYKVYDVRKMIAKSEQEIGKATAKYFFYSNIMNFFKTEITLANGEIRKRPLIETNGETGEIVWDKGRDFATVRKVLSMPQVNIVKKTEVQTGGFSKESILPKRNSDKLIARKKDWDPKKYGGFDSPTVAYSVLVVAKVEKGKSKKLKSVKELLGITIMERSSFEKNPIDFLEAKGYKEVKKDLIIKLPKYSLFELENGRKRMLASAGELQKGNELALPSKYVNFLYLASHYEKLKGSPEDNEQKQLFVEQHKHYLDEIIEQISEFSKRVILADANLDKVLSAYNKHRDKPIREQAENIIHLFTLTNLGAPAAFKYFDTTIDRKRYTSTKEVLDATLIHQSITGLYETRIDLSQLGGDGGPAPEAAAKGGGGGVQEISDSRPMLHIYLNGRRFLGLLDTGADKTCIAGRDWPANWPIHQTESSLQGLGMACGVARSSQPLRWQHEDKSGIIHPFVIPTLPFTLWGRDIMKDIKVRLMTDSPDDSQDLMIGAIESNLFADQISWKSDQPVWLNQWPLKQEKLQALQQLVTEQLQLGHLEESNSPWNTPVFVIKKKSGKWRLLQDLRAVNATMHDMGALQPGLPSPVAVPKGWEIIIIDLQDCFFNIKLHPEDCKRFAFSVPSPNFKRPYQRFQWKVLPQGMKNSPTLCQKFVDKAILTVRDKYQDSYIVHYMDDILLAHPSRSIVDEILTSMIQALNKHGLVVSTEKIQKYDNLKYLGTHIQGDSVSYQKLQIRTDKLRTLNDFQKLLGNINWIRPFLKLTTGELKPLFEILNPDSNPISTRKLTPEACKALQLMNERLSTARVKRLDLSQPWSLCILKTEYTPTACLWQDGVVEWIHLPHISPKVITPYDIFCTQLIIKGRHRSKELFSKDPDYIVVPYTKVQFDLLLQEKEDWPISLLGFLGEVHFHLPKDPLLTFTLQTAIIFPHMTSTTPLEKGIVIFTDGSANGRSVTYIQGREPIIKENTQNTAQQAEIVAVITAFEEVSQPFNLYTDSKYVTGLFPEIETATLSPRTKIYTELKHLQRLIHKRQEKFYIGHIRGHTGLPGPLAQGNAYADSLTRILTAAGKRTADGSEFEKRTADGSEFESPKKKAKVE

SEQ ID NO: 3256 - protein, 2112 aa, synthetic construct
MPAAKRVKLDGGDKKYSIGLDIGTNSVGWAVITDEYKVPSKKFKVLGNTDRHSIKKNLIGALLFDSGETAEATRLKRTARRRYTRRKNRICYLQEIFSNEMAKVDDSFFHRLEESFLVEEDKKHERHPIFGNIVDEVAYHEKYPTIYHLRKKLVDSTDKADLRLIYLALAHMIKFRGHFLIEGDLNPDNSDVDKLFIQLVQTYNQLFEENPINASGVDAKAILSARLSKSRRLENLIAQLPGEKKNGLFGNLIALSLGLTPNFKSNFDLAEDAKLQLSKDTYDDDLDNLLAQIGDQYADLFLAAKNLSDAILLSDILRVNTEITKAPLSASMIKRYDEHHQDLTLLKALVRQQLPEKYKEIFFDQSKNGYAGYIDGGASQEEFYKFIKPILEKMDGTEELLVKLNREDLLRKQRTFDNGSIPHQIHLGELHAILRRQEDFYPFLKDNREKIEKILTFRIPYYVGPLARGNSRFAWMTRKSEETITPWNFEEVVDKGASAQSFIERMTNFDKNLPNEKVLPKHSLLYEYFTVYNELTKVKYVTEGMRKPAFLSGEQKKAIVDLLFKTNRKVTVKQLKEDYFKKIECFDSVEISGVEDRFNASLGTYHDLLKIIKDKDFLDNEENEDILEDIVLTLTLFEDREMIEERLKTYAHLFDDKVMKQLKRRRYTGWGRLSRKLINGIRDKQSGKTILDFLKSDGFANRNFMQLIHDDSLTFKEDIQKAQVSGQGDSLHEHIANLAGSPAIKKGILQTVKVVDELVKVMGRHKPENIVIEMARENQTTQKGQKNSRERMKRIEEGIKELGSQILKEHPVENTQLQNEKLYLYYLQNGRDMYVDQELDINRLSDYDVDHIVPQSFLKDDSIDNKVLTRSDKARGKSDNVPSEEVVKKMKNYWRQLLNAKLITQRKFDNLTKAERGGLSELDKAGFIKRQLVETRQITKHVAQILDSRMNTKYDENDKLIREVKVITLKSKLVSDFRKDFQFYKVREINNYHHAHDAYLNAVVGTALIKKYPKLESEFVYGDYKVYDVRKMIAKSEQEIGKATAKYFFYSNIMNFFKTEITLANGEIRKRPLIETNGETGEIVWDKGRDFATVRKVLSMPQVNIVKKTEVQTGGFSKESILPKRNSDKLIARKKDWDPKKYGGFDSPTVAYSVLVVAKVEKGKSKKLKSVKELLGITIMERSSFEKNPIDFLEAKGYKEVKKDLIIKLPKYSLFELENGRKRMLASAGELQKGNELALPSKYVNFLYLASHYEKLKGSPEDNEQKQLFVEQHKHYLDEIIEQISEFSKRVILADANLDKVLSAYNKHRDKPIREQAENIIHLFTLTNLGAPAAFKYFDTTIDRKRYTSTKEVLDATLIHQSITGLYETRIDLSQLGGDGGPAPAPAPGGVQEISDSRPMLHIYLNGRRFLGLLDTGADKTCIAGRDWPANWPIHQTESSLQGLGMACGVARSSQPLRWQHEDKSGIIHPFVIPTLPFTLWGRDIMKDIKVRLMTDSPDDSQDLMIGAIESNLFADQISWKSDQPVWLNQWPLKQEKLQALQQLVTEQLQLGHLEESNSPWNTPVFVIKKKSGKWRLLQDLRAVNATMHDMGALQPGLPSPVAVPKGWEIIIIDLQDCFFNIKLHPEDCKRFAFSVPSPNFKRPYQRFQWKVLPQGMKNSPTLCQKFVDKAILTVRDKYQDSYIVHYMDDILLAHPSRSIVDEILTSMIQALNKHGLVVSTEKIQKYDNLKYLGTHIQGDSVSYQKLQIRTDKLRTLNDFQKLLGNINWIRPFLKLTTGELKPLFEILNPDSNPISTRKLTPEACKALQLMNERLSTARVKRLDLSQPWSLCILKTEYTPTACLWQDGVVEWIHLPHISPKVITPYDIFCTQLIIKGRHRSKELFSKDPDYIVVPYTKVQFDLLLQEKEDWPISLLGFLGEVHFHLPKDPLLTFTLQTAIIFPHMTSTTPLEKGIVIFTDGSANGRSVTYIQGREPIIKENTQNTAQQAEIVAVITAFEEVSQPFNLYTDSKYVTGLFPEIETATLSPRTKIYTELKHLQRLIHKRQEKFYIGHIRGHTGLPGPLAQGNAYADSLTRILTAAGKRTADGSEFEKRTADGSEFESPKKKAKVE

SEQ ID NO: 3257 - protein, 2116 aa, synthetic construct
MPAAKRVKLDGGDKKYSIGLDIGTNSVGWAVITDEYKVPSKKFKVLGNTDRHSIKKNLIGALLFDSGETAEATRLKRTARRRYTRRKNRICYLQEIFSNEMAKVDDSFFHRLEESFLVEEDKKHERHPIFGNIVDEVAYHEKYPTIYHLRKKLVDSTDKADLRLIYLALAHMIKFRGHFLIEGDLNPDNSDVDKLFIQLVQTYNQLFEENPINASGVDAKAILSARLSKSRRLENLIAQLPGEKKNGLFGNLIALSLGLTPNFKSNFDLAEDAKLQLSKDTYDDDLDNLLAQIGDQYADLFLAAKNLSDAILLSDILRVNTEITKAPLSASMIKRYDEHHQDLTLLKALVRQQLPEKYKEIFFDQSKNGYAGYIDGGASQEEFYKFIKPILEKMDGTEELLVKLNREDLLRKQRTFDNGSIPHQIHLGELHAILRRQEDFYPFLKDNREKIEKILTFRIPYYVGPLARGNSRFAWMTRKSEETITPWNFEEVVDKGASAQSFIERMTNFDKNLPNEKVLPKHSLLYEYFTVYNELTKVKYVTEGMRKPAFLSGEQKKAIVDLLFKTNRKVTVKQLKEDYFKKIECFDSVEISGVEDRFNASLGTYHDLLKIIKDKDFLDNEENEDILEDIVLTLTLFEDREMIEERLKTYAHLFDDKVMKQLKRRRYTGWGRLSRKLINGIRDKQSGKTILDFLKSDGFANRNFMQLIHDDSLTFKEDIQKAQVSGQGDSLHEHIANLAGSPAIKKGILQTVKVVDELVKVMGRHKPENIVIEMARENQTTQKGQKNSRERMKRIEEGIKELGSQILKEHPVENTQLQNEKLYLYYLQNGRDMYVDQELDINRLSDYDVDHIVPQSFLKDDSIDNKVLTRSDKARGKSDNVPSEEVVKKMKNYWRQLLNAKLITQRKFDNLTKAERGGLSELDKAGFIKRQLVETRQITKHVAQILDSRMNTKYDENDKLIREVKVITLKSKLVSDFRKDFQFYKVREINNYHHAHDAYLNAVVGTALIKKYPKLESEFVYGDYKVYDVRKMIAKSEQEIGKATAKYFFYSNIMNFFKTEITLANGEIRKRPLIETNGETGEIVWDKGRDFATVRKVLSMPQVNIVKKTEVQTGGFSKESILPKRNSDKLIARKKDWDPKKYGGFDSPTVAYSVLVVAKVEKGKSKKLKSVKELLGITIMERSSFEKNPIDFLEAKGYKEVKKDLIIKLPKYSLFELENGRKRMLASAGELQKGNELALPSKYVNFLYLASHYEKLKGSPEDNEQKQLFVEQHKHYLDEIIEQISEFSKRVILADANLDKVLSAYNKHRDKPIREQAENIIHLFTLTNLGAPAAFKYFDTTIDRKRYTSTKEVLDATLIHQSITGLYETRIDLSQLGGDGGEAAAKPAPGGGGGVQEISDSRPMLHIYLNGRRFLGLLDTGADKTCIAGRDWPANWPIHQTESSLQGLGMACGVARSSQPLRWQHEDKSGIIHPFVIPTLPFTLWGRDIMKDIKVRLMTDSPDDSQDLMIGAIESNLFADQISWKSDQPVWLNQWPLKQEKLQALQQLVTEQLQLGHLEESNSPWNTPVFVIKKKSGKWRLLQDLRAVNATMHDMGALQPGLPSPVAVPKGWEIIIIDLQDCFFNIKLHPEDCKRFAFSVPSPNFKRPYQRFQWKVLPQGMKNSPTLCQKFVDKAILTVRDKYQDSYIVHYMDDILLAHPSRSIVDEILTSMIQALNKHGLVVSTEKIQKYDNLKYLGTHIQGDSVSYQKLQIRTDKLRTLNDFQKLLGNINWIRPFLKLTTGELKPLFEILNPDSNPISTRKLTPEACKALQLMNERLSTARVKRLDLSQPWSLCILKTEYTPTACLWQDGVVEWIHLPHISPKVITPYDIFCTQLIIKGRHRSKELFSKDPDYIVVPYTKVQFDLLLQEKEDWPISLLGFLGEVHFHLPKDPLLTFTLQTAIIFPHMTSTTPLEKGIVIFTDGSANGRSVTYIQGREPIIKENTQNTAQQAEIVAVITAFEEVSQPFNLYTDSKYVTGLFPEIETATLSPRTKIYTELKHLQRLIHKRQEKFYIGHIRGHTGLPGPLAQGNAYADSLTRILTAAGKRTADGSEFEKRTADGSEFESPKKKAKVE

SEQ ID NO: 3258 - protein, 2116 aa, synthetic construct
MPAAKRVKLDGGDKKYSIGLDIGTNSVGWAVITDEYKVPSKKFKVLGNTDRHSIKKNLIGALLFDSGETAEATRLKRTARRRYTRRKNRICYLQEIFSNEMAKVDDSFFHRLEESFLVEEDKKHERHPIFGNIVDEVAYHEKYPTIYHLRKKLVDSTDKADLRLIYLALAHMIKFRGHFLIEGDLNPDNSDVDKLFIQLVQTYNQLFEENPINASGVDAKAILSARLSKSRRLENLIAQLPGEKKNGLFGNLIALSLGLTPNFKSNFDLAEDAKLQLSKDTYDDDLDNLLAQIGDQYADLFLAAKNLSDAILLSDILRVNTEITKAPLSASMIKRYDEHHQDLTLLKALVRQQLPEKYKEIFFDQSKNGYAGYIDGGASQEEFYKFIKPILEKMDGTEELLVKLNREDLLRKQRTFDNGSIPHQIHLGELHAILRRQEDFYPFLKDNREKIEKILTFRIPYYVGPLARGNSRFAWMTRKSEETITPWNFEEVVDKGASAQSFIERMTNFDKNLPNEKVLPKHSLLYEYFTVYNELTKVKYVTEGMRKPAFLSGEQKKAIVDLLFKTNRKVTVKQLKEDYFKKIECFDSVEISGVEDRFNASLGTYHDLLKIIKDKDFLDNEENEDILEDIVLTLTLFEDREMIEERLKTYAHLFDDKVMKQLKRRRYTGWGRLSRKLINGIRDKQSGKTILDFLKSDGFANRNFMQLIHDDSLTFKEDIQKAQVSGQGDSLHEHIANLAGSPAIKKGILQTVKVVDELVKVMGRHKPENIVIEMARENQTTQKGQKNSRERMKRIEEGIKELGSQILKEHPVENTQLQNEKLYLYYLQNGRDMYVDQELDINRLSDYDVDHIVPQSFLKDDSIDNKVLTRSDKARGKSDNVPSEEVVKKMKNYWRQLLNAKLITQRKFDNLTKAERGGLSELDKAGFIKRQLVETRQITKHVAQILDSRMNTKYDENDKLIREVKVITLKSKLVSDFRKDFQFYKVREINNYHHAHDAYLNAVVGTALIKKYPKLESEFVYGDYKVYDVRKMIAKSEQEIGKATAKYFFYSNIMNFFKTEITLANGEIRKRPLIETNGETGEIVWDKGRDFATVRKVLSMPQVNIVKKTEVQTGGFSKESILPKRNSDKLIARKKDWDPKKYGGFDSPTVAYSVLVVAKVEKGKSKKLKSVKELLGITIMERSSFEKNPIDFLEAKGYKEVKKDLIIKLPKYSLFELENGRKRMLASAGELQKGNELALPSKYVNFLYLASHYEKLKGSPEDNEQKQLFVEQHKHYLDEIIEQISEFSKRVILADANLDKVLSAYNKHRDKPIREQAENIIHLFTLTNLGAPAAFKYFDTTIDRKRYTSTKEVLDATLIHQSITGLYETRIDLSQLGGDGGPAPGGSEAAAKGGVQEISDSRPMLHIYLNGRRFLGLLDTGADKTCIAGRDWPANWPIHQTESSLQGLGMACGVARSSQPLRWQHEDKSGIIHPFVIPTLPFTLWGRDIMKDIKVRLMTDSPDDSQDLMIGAIESNLFADQISWKSDQPVWLNQWPLKQEKLQALQQLVTEQLQLGHLEESNSPWNTPVFVIKKKSGKWRLLQDLRAVNATMHDMGALQPGLPSPVAVPKGWEIIIIDLQDCFFNIKLHPEDCKRFAFSVPSPNFKRPYQRFQWKVLPQGMKNSPTLCQKFVDKAILTVRDKYQDSYIVHYMDDILLAHPSRSIVDEILTSMIQALNKHGLVVSTEKIQKYDNLKYLGTHIQGDSVSYQKLQIRTDKLRTLNDFQKLLGNINWIRPFLKLTTGELKPLFEILNPDSNPISTRKLTPEACKALQLMNERLSTARVKRLDLSQPWSLCILKTEYTPTACLWQDGVVEWIHLPHISPKVITPYDIFCTQLIIKGRHRSKELFSKDPDYIVVPYTKVQFDLLLQEKEDWPISLLGFLGEVHFHLPKDPLLTFTLQTAIIFPHMTSTTPLEKGIVIFTDGSANGRSVTYIQGREPIIKENTQNTAQQAEIVAVITAFEEVSQPFNLYTDSKYVTGLFPEIETATLSPRTKIYTELKHLQRLIHKRQEKFYIGHIRGHTGLPGPLAQGNAYADSLTRILTAAGKRTADGSEFEKRTADGSEFESPKKKAKVE

SEQ ID NO: 3259 - protein, 2123 aa, synthetic construct
MPAAKRVKLDGGDKKYSIGLDIGTNSVGWAVITDEYKVPSKKFKVLGNTDRHSIKKNLIGALLFDSGETAEATRLKRTARRRYTRRKNRICYLQEIFSNEMAKVDDSFFHRLEESFLVEEDKKHERHPIFGNIVDEVAYHEKYPTIYHLRKKLVDSTDKADLRLIYLALAHMIKFRGHFLIEGDLNPDNSDVDKLFIQLVQTYNQLFEENPINASGVDAKAILSARLSKSRRLENLIAQLPGEKKNGLFGNLIALSLGLTPNFKSNFDLAEDAKLQLSKDTYDDDLDNLLAQIGDQYADLFLAAKNLSDAILLSDILRVNTEITKAPLSASMIKRYDEHHQDLTLLKALVRQQLPEKYKEIFFDQSKNGYAGYIDGGASQEEFYKFIKPILEKMDGTEELLVKLNREDLLRKQRTFDNGSIPHQIHLGELHAILRRQEDFYPFLKDNREKIEKILTFRIPYYVGPLARGNSRFAWMTRKSEETITPWNFEEVVDKGASAQSFIERMTNFDKNLPNEKVLPKHSLLYEYFTVYNELTKVKYVTEGMRKPAFLSGEQKKAIVDLLFKTNRKVTVKQLKEDYFKKIECFDSVEISGVEDRFNASLGTYHDLLKIIKDKDFLDNEENEDILEDIVLTLTLFEDREMIEERLKTYAHLFDDKVMKQLKRRRYTGWGRLSRKLINGIRDKQSGKTILDFLKSDGFANRNFMQLIHDDSLTFKEDIQKAQVSGQGDSLHEHIANLAGSPAIKKGILQTVKVVDELVKVMGRHKPENIVIEMARENQTTQKGQKNSRERMKRIEEGIKELGSQILKEHPVENTQLQNEKLYLYYLQNGRDMYVDQELDINRLSDYDVDHIVPQSFLKDDSIDNKVLTRSDKARGKSDNVPSEEVVKKMKNYWRQLLNAKLITQRKFDNLTKAERGGLSELDKAGFIKRQLVETRQITKHVAQILDSRMNTKYDENDKLIREVKVITLKSKLVSDFRKDFQFYKVREINNYHHAHDAYLNAVVGTALIKKYPKLESEFVYGDYKVYDVRKMIAKSEQEIGKATAKYFFYSNIMNFFKTEITLANGEIRKRPLIETNGETGEIVWDKGRDFATVRKVLSMPQVNIVKKTEVQTGGFSKESILPKRNSDKLIARKKDWDPKKYGGFDSPTVAYSVLVVAKVEKGKSKKLKSVKELLGITIMERSSFEKNPIDFLEAKGYKEVKKDLIIKLPKYSLFELENGRKRMLASAGELQKGNELALPSKYVNFLYLASHYEKLKGSPEDNEQKQLFVEQHKHYLDEIIEQISEFSKRVILADANLDKVLSAYNKHRDKPIREQAENIIHLFTLTNLGAPAAFKYFDTTIDRKRYTSTKEVLDATLIHQSITGLYETRIDLSQLGGDGGGSSGSSGSSGSSGSSGSSGGVQEISDSRPMLHIYLNGRRFLGLLDTGADKTCIAGRDWPANWPIHQTESSLQGLGMACGVARSSQPLRWQHEDKSGIIHPFVIPTLPFTLWGRDIMKDIKVRLMTDSPDDSQDLMIGAIESNLFADQISWKSDQPVWLNQWPLKQEKLQALQQLVTEQLQLGHLEESNSPWNTPVFVIKKKSGKWRLLQDLRAVNATMHDMGALQPGLPSPVAVPKGWEIIIIDLQDCFFNIKLHPEDCKRFAFSVPSPNFKRPYQRFQWKVLPQGMKNSPTLCQKFVDKAILTVRDKYQDSYIVHYMDDILLAHPSRSIVDEILTSMIQALNKHGLVVSTEKIQKYDNLKYLGTHIQGDSVSYQKLQIRTDKLRTLNDFQKLLGNINWIRPFLKLTTGELKPLFEILNPDSNPISTRKLTPEACKALQLMNERLSTARVKRLDLSQPWSLCILKTEYTPTACLWQDGVVEWIHLPHISPKVITPYDIFCTQLIIKGRHRSKELFSKDPDYIVVPYTKVQFDLLLQEKEDWPISLLGFLGEVHFHLPKDPLLTFTLQTAIIFPHMTSTTPLEKGIVIFTDGSANGRSVTYIQGREPIIKENTQNTAQQAEIVAVITAFEEVSQPFNLYTDSKYVTGLFPEIETATLSPRTKIYTELKHLQRLIHKRQEKFYIGHIRGHTGLPGPLAQGNAYADSLTRILTAAGKRTADGSEFEKRTADGSEFESPKKKAKVE

SEQ ID NO: 3260 - protein, 2125 aa, synthetic construct; identical to SEQ ID NO: 3157

SEQ ID NO: 3261 - protein, 2116 aa, synthetic construct
MPAAKRVKLDGGDKKYSIGLDIGTNSVGWAVITDEYKVPSKKFKVLGNTDRHSIKKNLIGALLFDSGETAEATRLKRTARRRYTRRKNRICYLQEIFSNEMAKVDDSFFHRLEESFLVEEDKKHERHPIFGNIVDEVAYHEKYPTIYHLRKKLVDSTDKADLRLIYLALAHMIKFRGHFLIEGDLNPDNSDVDKLFIQLVQTYNQLFEENPINASGVDAKAILSARLSKSRRLENLIAQLPGEKKNGLFGNLIALSLGLTPNFKSNFDLAEDAKLQLSKDTYDDDLDNLLAQIGDQYADLFLAAKNLSDAILLSDILRVNTEITKAPLSASMIKRYDEHHQDLTLLKALVRQQLPEKYKEIFFDQSKNGYAGYIDGGASQEEFYKFIKPILEKMDGTEELLVKLNREDLLRKQRTFDNGSIPHQIHLGELHAILRRQEDFYPFLKDNREKIEKILTFRIPYYVGPLARGNSRFAWMTRKSEETITPWNFEEVVDKGASAQSFIERMTNFDKNLPNEKVLPKHSLLYEYFTVYNELTKVKYVTEGMRKPAFLSGEQKKAIVDLLFKTNRKVTVKQLKEDYFKKIECFDSVEISGVEDRFNASLGTYHDLLKIIKDKDFLDNEENEDILEDIVLTLTLFEDREMIEERLKTYAHLFDDKVMKQLKRRRYTGWGRLSRKLINGIRDKQSGKTILDFLKSDGFANRNFMQLIHDDSLTFKEDIQKAQVSGQGDSLHEHIANLAGSPAIKKGILQTVKVVDELVKVMGRHKPENIVIEMARENQTTQKGQKNSRERMKRIEEGIKELGSQILKEHPVENTQLQNEKLYLYYLQNGRDMYVDQELDINRLSDYDVDHIVPQSFLKDDSIDNKVLTRSDKARGKSDNVPSEEVVKKMKNYWRQLLNAKLITQRKFDNLTKAERGGLSELDKAGFIKRQLVETRQITKHVAQILDSRMNTKYDENDKLIREVKVITLKSKLVSDFRKDFQFYKVREINNYHHAHDAYLNAVVGTALIKKYPKLESEFVYGDYKVYDVRKMIAKSEQEIGKATAKYFFYSNIMNFFKTEITLANGEIRKRPLIETNGETGEIVWDKGRDFATVRKVLSMPQVNIVKKTEVQTGGFSKESILPKRNSDKLIARKKDWDPKKYGGFDSPTVAYSVLVVAKVEKGKSKKLKSVKELLGITIMERSSFEKNPIDFLEAKGYKEVKKDLIIKLPKYSLFELENGRKRMLASAGELQKGNELALPSKYVNFLYLASHYEKLKGSPEDNEQKQLFVEQHKHYLDEIIEQISEFSKRVILADANLDKVLSAYNKHRDKPIREQAENIIHLFTLTNLGAPAAFKYFDTTIDRKRYTSTKEVLDATLIHQSITGLYETRIDLSQLGGDGGGGSGSSEAAAKGGVQEISDSRPMLHIYLNGRRFLGLLDTGADKTCIAGRDWPANWPIHQTESSLQGLGMACGVARSSQPLRWQHEDKSGIIHPFVIPTLPFTLWGRDIMKDIKVRLMTDSPDDSQDLMIGAIESNLFADQISWKSDQPVWLNQWPLKQEKLQALQQLVTEQLQLGHLEESNSPWNTPVFVIKKKSGKWRLLQDLRAVNATMHDMGALQPGLPSPVAVPKGWEIIIIDLQDCFFNIKLHPEDCKRFAFSVPSPNFKRPYQRFQWKVLPQGMKNSPTLCQKFVDKAILTVRDKYQDSYIVHYMDDILLAHPSRSIVDEILTSMIQALNKHGLVVSTEKIQKYDNLKYLGTHIQGDSVSYQKLQIRTDKLRTLNDFQKLLGNINWIRPFLKLTTGELKPLFEILNGDSNPISTRKLTPEACKALQLMNERLSTARVKRLDLSQPWSLCILKTEYTPTACLWQDGVVEWIHLPHISPKVITPYDIFCTQLIIKGRHRSKELFSKDPDYIVVPYTKVQFDLLLQEKEDWPISLLGFLGEVHFHLPKDPLLTFTLQTAIIFPHMTSTTPLEKGIVIFTDGSANGRSVTYIQGREPIIKENTQNTAQQAEIVAVITAFEEVSQPFNLYTDSKYVTGLFPEIETATLSPRTKIYTELKHLQRLIHKRQEKFYIGHIRGHTGLPGPLAQGNAYADSLTRILTAAGKRTADGSEFEKRTADGSEFESPKKKAKVE

SEQ ID NO: 3262 - protein, 2114 aa, synthetic construct
MPAAKRVKLDGGDKKYSIGLDIGTNSVGWAVITDEYKVPSKKFKVLGNTDRHSIKKNLIGALLFDSGETAEATRLKRTARRRYTRRKNRICYLQEIFSNEMAKVDDSFFHRLEESFLVEEDKKHERHPIFGNIVDEVAYHEKYPTIYHLRKKLVDSTDKADLRLIYLALAHMIKFRGHFLIEGDLNPDNSDVDKLFIQLVQTYNQLFEENPINASGVDAKAILSARLSKSRRLENLIAQLPGEKKNGLFGNLIALSLGLTPNFKSNFDLAEDAKLQLSKDTYDDDLDNLLAQIGDQYADLFLAAKNLSDAILLSDILRVNTEITKAPLSASMIKRYDEHHQDLTLLKALVRQQLPEKYKEIFFDQSKNGYAGYIDGGASQEEFYKFIKPILEKMDGTEELLVKLNREDLLRKQRTFDNGSIPHQIHLGELHAILRRQEDFYPFLKDNREKIEKILTFRIPYYVGPLARGNSRFAWMTRKSEETITPWNFEEVVDKGASAQSFIERMTNFDKNLPNEKVLPKHSLLYEYFTVYNELTKVKYVTEGMRKPAFLSGEQKKAIVDLLFKTNRKVTVKQLKEDYFKKIECFDSVEISGVEDRFNASLGTYHDLLKIIKDKDFLDNEENEDILEDIVLTLTLFEDREMIEERLKTYAHLFDDKVMKQLKRRRYTGWGRLSRKLINGIRDKQSGKTILDFLKSDGFANRNFMQLIHDDSLTFKEDIQKAQVSGQGDSLHEHIANLAGSPAIKKGILQTVKVVDELVKVMGRHKPENIVIEMARENQTTQKGQKNSRERMKRIEEGIKELGSQILKEHPVENTQLQNEKLYLYYLQNGRDMYVDQELDINRLSDYDVDHIVPQSFLKDDSIDNKVLTRSDKARGKSDNVPSEEVVKKMKNYWRQLLNAKLITQRKFDNLTKAERGGLSELDKAGFIKRQLVETRQITKHVAQILDSRMNTKYDENDKLIREVKVITLKSKLVSDFRKDFQFYKVREINNYHHAHDAYLNAVVGTALIKKYPKLESEFVYGDYKVYDVRKMIAKSEQEIGKATAKYFFYSNIMNFFKTEITLANGEIRKRPLIETNGETGEIVWDKGRDFATVRKVLSMPQVNIVKKTEVQTGGFSKESILPKRNSDKLIARKKDWDPKKYGGFDSPTVAYSVLVVAKVEKGKSKKLKSVKELLGITIMERSSFEKNPIDFLEAKGYKEVKKDLIIKLPKYSLFELENGRKRMLASAGELQKGNELALPSKYVNFLYLASHYEKLKGSPEDNEQKQLFVEQHKHYLDEIIEQISEFSKRVILADANLDKVLSAYNKHRDKPIREQAENIIHLFTLTNLGAPAAFKYFDTTIDRKRYTSTKEVLDATLIHQSITGLYETRIDLSQLGGDGGPAPAPAPAPGGVQEISDSRPMLHIYLNGRRFLGLLDTGADKTCIAGRDWPANWPIHQTESSLQGLGMACGVARSSQPLRWQHEDKSGIIHPFVIPTLPFTLWGRDIMKDIKVRLMTDSPDDSQDLMIGAIESNLFADQISWKSDQPVWLNQWPLKQEKLQALQQLVTEQLQLGHLEESNSPWNTPVFVIKKKSGKWRLLQDLRAVNATMHDMGALQPGLPSPVAVPKGWEIIIIDLQDCFFNIKLHPEDCKRFAFSVPSPNFKRPYQRFQWKVLPQGMKNSPTLCQKFVDKAILTVRDKYQDSYIVHYMDDILLAHPSRSIVDEILTSMIQALNKHGLVVSTEKIQKYDNLKYLGTHIQGDSVSYQKLQIRTDKLRTLNDFQKLLGNINWIRPFLKLTTGELKPLFEILNGDSNPISTRKLTPEACKALQLMNERLSTARVKRLDLSQPWSLCILKTEYTPTACLWQDGVVEWIHLPHISPKVITPYDIFCTQLIIKGRHRSKELFSKDPDYIVVPYTKVQFDLLLQEKEDWPISLLGFLGEVHFHLPKDPLLTFTLQTAIIFPHMTSTTPLEKGIVIFTDGSANGRSVTYIQGREPIIKENTQNTAQQAEIVAVITAFEEVSQPFNLYTDSKYVTGLFPEIETATLSPRTKIYTELKHLQRLIHKRQEKFYIGHIRGHTGLPGPLAQGNAYADSLTRILTAAGKRTADGSEFEKRTADGSEFESPKKKAKVE

SEQ ID NO: 3263 - protein, 2116 aa, synthetic construct; identical to SEQ ID NO: 3146

SEQ ID NO: 3264 - protein, 2114 aa, synthetic construct
MPAAKRVKLDGGDKKYSIGLDIGTNSVGWAVITDEYKVPSKKFKVLGNTDRHSIKKNLIGALLFDSGETAEATRLKRTARRRYTRRKNRICYLQEIFSNEMAKVDDSFFHRLEESFLVEEDKKHERHPIFGNIVDEVAYHEKYPTIYHLRKKLVDSTDKADLRLIYLALAHMIKFRGHFLIEGDLNPDNSDVDKLFIQLVQTYNQLFEENPINASGVDAKAILSARLSKSRRLENLIAQLPGEKKNGLFGNLIALSLGLTPNFKSNFDLAEDAKLQLSKDTYDDDLDNLLAQIGDQYADLFLAAKNLSDAILLSDILRVNTEITKAPLSASMIKRYDEHHQDLTLLKALVRQQLPEKYKEIFFDQSKNGYAGYIDGGASQEEFYKFIKPILEKMDGTEELLVKLNREDLLRKQRTFDNGSIPHQIHLGELHAILRRQEDFYPFLKDNREKIEKILTFRIPYYVGPLARGNSRFAWMTRKSEETITPWNFEEVVDKGASAQSFIERMTNFDKNLPNEKVLPKHSLLYEYFTVYNELTKVKYVTEGMRKPAFLSGEQKKAIVDLLFKTNRKVTVKQLKEDYFKKIECFDSVEISGVEDRFNASLGTYHDLLKIIKDKDFLDNEENEDILEDIVLTLTLFEDREMIEERLKTYAHLFDDKVMKQLKRRRYTGWGRLSRKLINGIRDKQSGKTILDFLKSDGFANRNFMQLIHDDSLTFKEDIQKAQVSGQGDSLHEHIANLAGSPAIKKGILQTVKVVDELVKVMGRHKPENIVIEMARENQTTQKGQKNSRERMKRIEEGIKELGSQILKEHPVENTQLQNEKLYLYYLQNGRDMYVDQELDINRLSDYDVDHIVPQSFLKDDSIDNKVLTRSDKARGKSDNVPSEEVVKKMKNYWRQLLNAKLITQRKFDNLTKAERGGLSELDKAGFIKRQLVETRQITKHVAQILDSRMNTKYDENDKLIREVKVITLKSKLVSDFRKDFQFYKVREINNYHHAHDAYLNAVVGTALIKKYPKLESEFVYGDYKVYDVRKMIAKSEQEIGKATAKYFFYSNIMNFFKTEITLANGEIRKRPLIETNGETGEIVWDKGRDFATVRKVLSMPQVNIVKKTEVQTGGFSKESILPKRNSDKLIARKKDWDPKKYGGFDSPTVAYSVLVVAKVEKGKSKKLKSVKELLGITIMERSSFEKNPIDFLEAKGYKEVKKDLIIKLPKYSLFELENGRKRMLASAGELQKGNELALPSKYVNFLYLASHYEKLKGSPEDNEQKQLFVEQHKHYLDEIIEQISEFSKRVILADANLDKVLSAYNKHRDKPIREQAENIIHLFTLTNLGAPAAFKYFDTTIDRKRYTSTKEVLDATLIHQSITGLYETRIDLSQLGGDGGGSSPAPGGGGGVQEISDSRPMLHIYLNGRRFLGLLDTGADKTCIAGRDWPANWPIHQTESSLQGLGMACGVARSSQPLRWQHEDKSGIIHPFVIPTLPFTLWGRDIMKDIKVRLMTDSPDDSQDLMIGAIESNLFADQISWKSDQPVWLNQWPLKQEKLQALQQLVTEQLQLGHLEESNSPWNTPVFVIKKKSGKWRLLQDLRAVNATMHDMGALQPGLPSPVAVPKGWEIIIIDLQDCFFNIKLHPEDCKRFAFSVPSPNFKRPYQRFQWKVLPQGMKNSPTLCQKFVDKAILTVRDKYQDSYIVHYMDDILLAHPSRSIVDEILTSMIQALNKHGLVVSTEKIQKYDNLKYLGTHIQGDSVSYQKLQIRTDKLRTLNDFQKLLGNINWIRPFLKLTTGELKPLFEILNGDSNPISTRKLTPEACKALQLMNERLSTARVKRLDLSQPWSLCILKTEYTPTACLWQDGVVEWIHLPHISPKVITPYDIFCTQLIIKGRHRSKELFSKDPDYIVVPYTKVQFDLLLQEKEDWPISLLGFLGEVHFHLPKDPLLTFTLQTAIIFPHMTSTTPLEKGIVIFTDGSANGRSVTYIQGREPIIKENTQNTAQQAEIVAVITAFEEVSQPFNLYTDSKYVTGLFPEIETATLSPRTKIYTELKHLQRLIHKRQEKFYIGHIRGHTGLPGPLAQGNAYADSLTRILTAAGKRTADGSEFEKRTADGSEFESPKKKAKVE

SEQ ID NO: 3265 - protein, 2116 aa, synthetic construct
MPAAKRVKLDGGDKKYSIGLDIGTNSVGWAVITDEYKVPSKKFKVLGNTDRHSIKKNLIGALLFDSGETAEATRLKRTARRRYTRRKNRICYLQEIFSNEMAKVDDSFFHRLEESFLVEEDKKHERHPIFGNIVDEVAYHEKYPTIYHLRKKLVDSTDKADLRLIYLALAHMIKFRGHFLIEGDLNPDNSDVDKLFIQLVQTYNQLFEENPINASGVDAKAILSARLSKSRRLENLIAQLPGEKKNGLFGNLIALSLGLTPNFKSNFDLAEDAKLQLSKDTYDDDLDNLLAQIGDQYADLFLAAKNLSDAILLSDILRVNTEITKAPLSASMIKRYDEHHQDLTLLKALVRQQLPEKYKEIFFDQSKNGYAGYIDGGASQEEFYKFIKPILEKMDGTEELLVKLNREDLLRKQRTFDNGSIPHQIHLGELHAILRRQEDFYPFLKDNREKIEKILTFRIPYYVGPLARGNSRFAWMTRKSEETITPWNFEEVVDKGASAQSFIERMTNFDKNLPNEKVLPKHSLLYEYFTVYNELTKVKYVTEGMRKPAFLSGEQKKAIVDLLFKTNRKVTVKQLKEDYFKKIECFDSVEISGVEDRFNASLGTYHDLLKIIKDKDFLDNEENEDILEDIVLTLTLFEDREMIEERLKTYAHLFDDKVMKQLKRRRYTGWGRLSRKLINGIRDKQSGKTILDFLKSDGFANRNFMQLIHDDSLTFKEDIQKAQVSGQGDSLHEHIANLAGSPAIKKGILQTVKVVDELVKVMGRHKPENIVIEMARENQTTQKGQKNSRERMKRIEEGIKELGSQILKEHPVENTQLQNEKLYLYYLQNGRDMYVDQELDINRLSDYDVDHIVPQSFLKDDSIDNKVLTRSDKARGKSDNVPSEEVVKKMKNYWRQLLNAKLITQRKFDNLTKAERGGLSELDKAGFIKRQLVETRQITKHVAQILDSRMNTKYDENDKLIREVKVITLKSKLVSDFRKDFQFYKVREINNYHHAHDAYLNAVVGTALIKKYPKLESEFVYGDYKVYDVRKMIAKSEQEIGKATAKYFFYSNIMNFFKTEITLANGEIRKRPLIETNGETGEIVWDKGRDFATVRKVLSMPQVNIVKKTEVQTGGFSKESILPKRNSDKLIARKKDWDPKKYGGFDSPTVAYSVLVVAKVEKGKSKKLKSVKELLGITIMERSSFEKNPIDFLEAKGYKEVKKDLIIKLPKYSLFELENGRKRMLASAGELQKGNELALPSKYVNFLYLASHYEKLKGSPEDNEQKQLFVEQHKHYLDEIIEQISEFSKRVILADANLDKVLSAYNKHRDKPIREQAENIIHLFTLTNLGAPAAFKYFDTTIDRKRYTSTKEVLDATLIHQSITGLYETRIDLSQLGGDGGGSSEAAAKPAPGGVQEISDSRPMLHIYLNGRRFLGLLDTGADKTCIAGRDWPANWPIHQTESSLQGLGMACGVARSSQPLRWQHEDKSGIIHPFVIPTLPFTLWGRDIMKDIKVRLMTDSPDDSQDLMIGAIESNLFADQISWKSDQPVWLNQWPLKQEKLQALQQLVTEQLQLGHLEESNSPWNTPVFVIKKKSGKWRLLQDLRAVNATMHDMGALQPGLPSPVAVPKGWEIIIIDLQDCFFNIKLHPEDCKRFAFSVPSPNFKRPYQRFQWKVLPQGMKNSPTLCQKFVDKAILTVRDKYQDSYIVHYMDDILLAHPSRSIVDEILTSMIQALNKHGLVVSTEKIQKYDNLKYLGTHIQGDSVSYQKLQIRTDKLRTLNDFQKLLGNINWIRPFLKLTTGELKPLFEILNGDSNPISTRKLTPEACKALQLMNERLSTARVKRLDLSQPWSLCILKTEYTPTACLWQDGVVEWIHLPHISPKVITPYDIFCTQLIIKGRHRSKELFSKDPDYIVVPYTKVQFDLLLQEKEDWPISLLGFLGEVHFHLPKDPLLTFTLQTAIIFPHMTSTTPLEKGIVIFTDGSANGRSVTYIQGREPIIKENTQNTAQQAEIVAVITAFEEVSQPFNLYTDSKYVTGLFPEIETATLSPRTKIYTELKHLQRLIHKRQEKFYIGHIRGHTGLPGPLAQGNAYADSLTRILTAAGKRTADGSEFEKRTADGSEFESPKKKAKVE

SEQ ID NO: 3266 - protein, 2120 aa, synthetic construct
MPAAKRVKLDGGDKKYSIGLDIGTNSVGWAVITDEYKVPSKKFKVLGNTDRHSIKKNLIGALLFDSGETAEATRLKRTARRRYTRRKNRICYLQEIFSNEMAKVDDSFFHRLEESFLVEEDKKHERHPIFGNIVDEVAYHEKYPTIYHLRKKLVDSTDKADLRLIYLALAHMIKFRGHFLIEGDLNPDNSDVDKLFIQLVQTYNQLFEENPINASGVDAKAILSARLSKSRRLENLIAQLPGEKKNGLFGNLIALSLGLTPNFKSNFDLAEDAKLQLSKDTYDDDLDNLLAQIGDQYADLFLAAKNLSDAILLSDILRVNTEITKAPLSASMIKRYDEHHQDLTLLKALVRQQLPEKYKEIFFDQSKNGYAGYIDGGASQEEFYKFIKPILEKMDGTEELLVKLNREDLLRKQRTFDNGSIPHQIHLGELHAILRRQEDFYPFLKDNREKIEKILTFRIPYYVGPLARGNSRFAWMTRKSEETITPWNFEEVVDKGASAQSFIERMTNFDKNLPNEKVLPKHSLLYEYFTVYNELTKVKYVTEGMRKPAFLSGEQKKAIVDLLFKTNRKVTVKQLKEDYFKKIECFDSVEISGVEDRFNASLGTYHDLLKIIKDKDFLDNEENEDILEDIVLTLTLFEDREMIEERLKTYAHLFDDKVMKQLKRRRYTGWGRLSRKLINGIRDKQSGKTILDFLKSDGFANRNFMQLIHDDSLTFKEDIQKAQVSGQGDSLHEHIANLAGSPAIKKGILQTVKVVDELVKVMGRHKPENIVIEMARENQTTQKGQKNSRERMKRIEEGIKELGSQILKEHPVENTQLQNEKLYLYYLQNGRDMYVDQELDINRLSDYDVDHIVPQSFLKDDSIDNKVLTRSDKARGKSDNVPSEEVVKKMKNYWRQLLNAKLITQRKFDNLTKAERGGLSELDKAGFIKRQLVETRQITKHVAQILDSRMNTKYDENDKLIREVKVITLKSKLVSDFRKDFQFYKVREINNYHHAHDAYLNAVVGTALIKKYPKLESEFVYGDYKVYDVRKMIAKSEQEIGKATAKYFFYSNIMNFFKTEITLANGEIRKRPLIETNGETGEIVWDKGRDFATVRKVLSMPQVNIVKKTEVQTGGFSKESILPKRNSDKLIARKKDWDPKKYGGFDSPTVAYSVLVVAKVEKGKSKKLKSVKELLGITIMERSSFEKNPIDFLEAKGYKEVKKDLIIKLPKYSLFELENGRKRMLASAGELQKGNELALPSKYVNFLYLASHYEKLKGSPEDNEQKQLFVEQHKHYLDEIIEQISEFSKRVILADANLDKVLSAYNKHRDKPIREQAENIIHLFTLTNLGAPAAFKYFDTTIDRKRYTSTKEVLDATLIHQSITGLYETRIDLSQLGGDGGGGSGGSGGSGGSGGSGGWVQEISDSRPMLHIYLNGRRFLGLLNTGADKTCIAGRDWPANWPIHQTESSLQGLGMACGVARSSQPLRWQHEDKSGIIHPFVIPTLPFTLWGRDIMKDIKVRLMTDSPDDSQDLMIGAIESNLFADQISWKSDQPVWLNQWPLKQEKLQALQQLVTEQLQLGHLEESNSPWNTPVFVIKKKSGKWRLLQDLRAVNATMHDMGALQPGLPSPVAVPKGWEIIIIDLQDCFFNIKLHPEDCKRFAFSVPSPNFKRPYQRFQWKVLPQGMKNSPTLCQKFVDKAILTVRDKYQDSYIVHYMDDILLAHPSRSIVDEILTSMIQALNKHGLVVSTEKIQKYDNLKYLGTHIQGDSVSYQKLQIRTDKLRTLNDFQKLLGNINWIRPFLKLTTGELKPLFEILNGDSNPISTRKLTPEACKALQLMNERLSTARVKRLDLSQPWSLCILKTEYTPTACLWQDGVVEWIHLPHISPKVITPYDIFCTQLIIKGRHRSKELFSKDPDYIVVPYTKVQFDLLLQEKEDWPISLLGFLGEVHFHLPKDPLLTFTLQTAIIFPHMTSTTPLEKGIVIFTDGSANGRSVTYIQGREPIIKENTQNTAQQAEIVAVITAFEEVSQPFNLYTDSKYVTGLFPEIETATLSPRTKIYTELKHLQRLIHKRQEKFYIGHIRGHTGLPGPLAQGNAYADSLTRILTAGKRTADGSEFEKRTADGSEFESPKKKAKVE

SEQ ID NO: 3267 - protein, 2151 aa, synthetic construct
MPAAKRVKLDGGDKKYSIGLDIGTNSVGWAVITDEYKVPSKKFKVLGNTDRHSIKKNLIGALLFDSGETAEATRLKRTARRRYTRRKNRICYLQEIFSNEMAKVDDSFFHRLEESFLVEEDKKHERHPIFGNIVDEVAYHEKYPTIYHLRKKLVDSTDKADLRLIYLALAHMIKFRGHFLIEGDLNPDNSDVDKLFIQLVQTYNQLFEENPINASGVDAKAILSARLSKSRRLENLIAQLPGEKKNGLFGNLIALSLGLTPNFKSNFDLAEDAKLQLSKDTYDDDLDNLLAQIGDQYADLFLAAKNLSDAILLSDILRVNTEITKAPLSASMIKRYDEHHQDLTLLKALVRQQLPEKYKEIFFDQSKNGYAGYIDGGASQEEFYKFIKPILEKMDGTEELLVKLNREDLLRKQRTFDNGSIPHQIHLGELHAILRRQEDFYPFLKDNREKIEKILTFRIPYYVGPLARGNSRFAWMTRKSEETITPWNFEEVVDKGASAQSFIERMTNFDKNLPNEKVLPKHSLLYEYFTVYNELTKVKYVTEGMRKPAFLSGEQKKAIVDLLFKTNRKVTVKQLKEDYFKKIECFDSVEISGVEDRFNASLGTYHDLLKIIKDKDFLDNEENEDILEDIVLTLTLFEDREMIEERLKTYAHLFDDKVMKQLKRRRYTGWGRLSRKLINGIRDKQSGKTILDFLKSDGFANRNFMQLIHDDSLTFKEDIQKAQVSGQGDSLHEHIANLAGSPAIKKGILQTVKVVDELVKVMGRHKPENIVIEMARENQTTQKGQKNSRERMKRIEEGIKELGSQILKEHPVENTQLQNEKLYLYYLQNGRDMYVDQELDINRLSDYDVDHIVPQSFLKDDSIDNKVLTRSDKARGKSDNVPSEEVVKKMKNYWRQLLNAKLITQRKFDNLTKAERGGLSELDKAGFIKRQLVETRQITKHVAQILDSRMNTKYDENDKLIREVKVITLKSKLVSDFRKDFQFYKVREINNYHHAHDAYLNAVVGTALIKKYPKLESEFVYGDYKVYDVRKMIAKSEQEIGKATAKYFFYSNIMNFFKTEITLANGEIRKRPLIETNGETGEIVWDKGRDFATVRKVLSMPQVNIVKKTEVQTGGFSKESILPKRNSDKLIARKKDWDPKKYGGFDSPTVAYSVLVVAKVEKGKSKKLKSVKELLGITIMERSSFEKNPIDFLEAKGYKEVKKDLIIKLPKYSLFELENGRKRMLASAGELQKGNELALPSKYVNFLYLASHYEKLKGSPEDNEQKQLFVEQHKHYLDEIIEQISEFSKRVILADANLDKVLSAYNKHRDKPIREQAENIIHLFTLTNLGAPAAFKYFDTTIDRKRYTSTKEVLDATLIHQSITGLYETRIDLSQLGGDGGAEAAAKEAAAKEAAAKEAAAKALEAEAAAKEAAAKEAAAKEAAAKAGGWVQEISDSRPMLHIYLNGRRFLGLLNTGADKTCIAGRDWPANWPIHQTESSLQGLGMACGVARSSQPLRWQHEDKSGIIHPFVIPTLPFTLWGRDIMKDIKVRLMTDSPDDSQDLMIGAIESNLFADQISWKSDQPVWLNQWPLKQEKLQALQQLVTEQLQLGHLEESNSPWNTPVFVIKKKSGKWRLLQDLRAVNATMHDMGALQPGLPSPVAVPKGWEIIIIDLQDCFFNIKLHPEDCKRFAFSVPSPNFKRPYQRFQWKVLPQGMKNSPTLCQKFVDKAILTVRDKYQDSYIVHYMDDILLAHPSRSIVDEILTSMIQALNKHGLVVSTEKIQKYDNLKYLGTHIQGDSVSYQKLQIRTDKLRTLNDFQKLLGNINWIRPFLKLTTGELKPLFEILNGDSNPISTRKLTPEACKALQLMNERLSTARVKRLDLSQPWSLCILKTEYTPTACLWQDGVVEWIHLPHISPKVITPYDIFCTQLIIKGRHRSKELFSKDPDYIVVPYTKVQFDLLLQEKEDWPISLLGFLGEVHFHLPKDPLLTFTLQTAIIFPHMTSTTPLEKGIVIFTDGSANGRSVTYIQGREPIIKENTQNTAQQAEIVAVITAFEEVSQPFNLYTDSKYVTGLFPEIETATLSPRTKIYTELKHLQRLIHKRQEKFYIGHIRGHTGLPGPLAQGNAYADSLTRILTAGKRTADGSEFEKRTADGSEFESPKKKAKVE

SEQ ID NO: 3268 - protein, 2135 aa, synthetic construct; identical to SEQ ID NO: 3172

SEQ ID NO: 3269 - protein, 2114 aa, synthetic construct
MPAAKRVKLDGGDKKYSIGLDIGTNSVGWAVITDEYKVPSKKFKVLGNTDRHSIKKNLIGALLFDSGETAEATRLKRTARRRYTRRKNRICYLQEIFSNEMAKVDDSFFHRLEESFLVEEDKKHERHPIFGNIVDEVAYHEKYPTIYHLRKKLVDSTDKADLRLIYLALAHMIKFRGHFLIEGDLNPDNSDVDKLFIQLVQTYNQLFEENPINASGVDAKAILSARLSKSRRLENLIAQLPGEKKNGLFGNLIALSLGLTPNFKSNFDLAEDAKLQLSKDTYDDDLDNLLAQIGDQYADLFLAAKNLSDAILLSDILRVNTEITKAPLSASMIKRYDEHHQDLTLLKALVRQQLPEKYKEIFFDQSKNGYAGYIDGGASQEEFYKFIKPILEKMDGTEELLVKLNREDLLRKQRTFDNGSIPHQIHLGELHAILRRQEDFYPFLKDNREKIEKILTFRIPYYVGPLARGNSRFAWMTRKSEETITPWNFEEVVDKGASAQSFIERMTNFDKNLPNEKVLPKHSLLYEYFTVYNELTKVKYVTEGMRKPAFLSGEQKKAIVDLLFKTNRKVTVKQLKEDYFKKIECFDSVEISGVEDRFNASLGTYHDLLKIIKDKDFLDNEENEDILEDIVLTLTLFEDREMIEERLKTYAHLFDDKVMKQLKRRRYTGWGRLSRKLINGIRDKQSGKTILDFLKSDGFANRNFMQLIHDDSLTFKEDIQKAQVSGQGDSLHEHIANLAGSPAIKKGILQTVKVVDELVKVMGRHKPENIVIEMARENQTTQKGQKNSRERMKRIEEGIKELGSQILKEHPVENTQLQNEKLYLYYLQNGRDMYVDQELDINRLSDYDVDHIVPQSFLKDDSIDNKVLTRSDKARGKSDNVPSEEVVKKMKNYWRQLLNAKLITQRKFDNLTKAERGGLSELDKAGFIKRQLVETRQITKHVAQILDSRMNTKYDENDKLIREVKVITLKSKLVSDFRKDFQFYKVREINNYHHAHDAYLNAVVGTALIKKYPKLESEFVYGDYKVYDVRKMIAKSEQEIGKATAKYFFYSNIMNFFKTEITLANGEIRKRPLIETNGETGEIVWDKGRDFATVRKVLSMPQVNIVKKTEVQTGGFSKESILPKRNSDKLIARKKDWDPKKYGGFDSPTVAYSVLVVAKVEKGKSKKLKSVKELLGITIMERSSFEKNPIDFLEAKGYKEVKKDLIIKLPKYSLFELENGRKRMLASAGELQKGNELALPSKYVNFLYLASHYEKLKGSPEDNEQKQLFVEQHKHYLDEIIEQISEFSKRVILADANLDKVLSAYNKHRDKPIREQAENIIHLFTLTNLGAPAAFKYFDTTIDRKRYTSTKEVLDATLIHQSITGLYETRIDLSQLGGDGGGGSGGGGSSGGWVQEISDSRPMLHIYLNGRRFLGLLNTGADKTCIAGRDWPANWPIHQTESSLQGLGMACGVARSSQPLRWQHEDKSGIIHPFVIPTLPFTLWGRDIMKDIKVRLMTDSPDDSQDLMIGAIESNLFADQISWKSDQPVWLNQWPLKQEKLQALQQLVTEQLQLGHLEESNSPWNTPVFVIKKKSGKWRLLQDLRAVNATMHDMGALQPGLPSPVAVPKGWEIIIIDLQDCFFNIKLHPEDCKRFAFSVPSPNFKRPYQRFQWKVLPQGMKNSPTLCQKFVDKAILTVRDKYQDSYIVHYMDDILLAHPSRSIVDEILTSMIQALNKHGLVVSTEKIQKYDNLKYLGTHIQGDSVSYQKLQIRTDKLRTLNDFQKLLGNINWIRPFLKLTTGELKPLFEILNGDSNPISTRKLTPEACKALQLMNERLSTARVKRLDLSQPWSLCILKTEYTPTACLWQDGVVEWIHLPHISPKVITPYDIFCTQLIIKGRHRSKELFSKDPDYIVVPYTKVQFDLLLQEKEDWPISLLGFLGEVHFHLPKDPLLTFTLQTAIIFPHMTSTTPLEKGIVIFTDGSANGRSVTYIQGREPIIKENTQNTAQQAEIVAVITAFEEVSQPFNLYTDSKYVTGLFPEIETATLSPRTKIYTELKHLQRLIHKRQEKFYIGHIRGHTGLPGPLAQGNAYADSLTRILTAGKRTADGSEFEKRTADGSEFESPKKKAKVE

SEQ ID NO: 3270 - protein, 2116 aa, synthetic construct; identical to SEQ ID NO: 3181

SEQ ID NO: 3271 - protein, 2116 aa, synthetic construct
MPAAKRVKLDGGDKKYSIGLDIGTNSVGWAVITDEYKVPSKKFKVLGNTDRHSIKKNLIGALLFDSGETAEATRLKRTARRRYTRRKNRICYLQEIFSNEMAKVDDSFFHRLEESFLVEEDKKHERHPIFGNIVDEVAYHEKYPTIYHLRKKLVDSTDKADLRLIYLALAHMIKFRGHFLIEGDLNPDNSDVDKLFIQLVQTYNQLFEENPINASGVDAKAILSARLSKSRRLENLIAQLPGEKKNGLFGNLIALSLGLTPNFKSNFDLAEDAKLQLSKDTYDDDLDNLLAQIGDQYADLFLAAKNLSDAILLSDILRVNTEITKAPLSASMIKRYDEHHQDLTLLKALVRQQLPEKYKEIFFDQSKNGYAGYIDGGASQEEFYKFIKPILEKMDGTEELLVKLNREDLLRKQRTFDNGSIPHQIHLGELHAILRRQEDFYPFLKDNREKIEKILTFRIPYYVGPLARGNSRFAWMTRKSEETITPWNFEEVVDKGASAQSFIERMTNFDKNLPNEKVLPKHSLLYEYFTVYNELTKVKYVTEGMRKPAFLSGEQKKAIVDLLFKTNRKVTVKQLKEDYFKKIECFDSVEISGVEDRFNASLGTYHDLLKIIKDKDFLDNEENEDILEDIVLTLTLFEDREMIEERLKTYAHLFDDKVMKQLKRRRYTGWGRLSRKLINGIRDKQSGKTILDFLKSDGFANRNFMQLIHDDSLTFKEDIQKAQVSGQGDSLHEHIANLAGSPAIKKGILQTVKVVDELVKVMGRHKPENIVIEMARENQTTQKGQKNSRERMKRIEEGIKELGSQILKEHPVENTQLQNEKLYLYYLQNGRDMYVDQELDINRLSDYDVDHIVPQSFLKDDSIDNKVLTRSDKARGKSDNVPSEEVVKKMKNYWRQLLNAKLITQRKFDNLTKAERGGLSELDKAGFIKRQLVETRQITKHVAQILDSRMNTKYDENDKLIREVKVITLKSKLVSDFRKDFQFYKVREINNYHHAHDAYLNAVVGTALIKKYPKLESEFVYGDYKVYDVRKMIAKSEQEIGKATAKYFFYSNIMNFFKTEITLANGEIRKRPLIETNGETGEIVWDKGRDFATVRKVLSMPQVNIVKKTEVQTGGFSKESILPKRNSDKLIARKKDWDPKKYGGFDSPTVAYSVLVVAKVEKGKSKKLKSVKELLGITIMERSSFEKNPIDFLEAKGYKEVKKDLIIKLPKYSLFELENGRKRMLASAGELQKGNELALPSKYVNFLYLASHYEKLKGSPEDNEQKQLFVEQHKHYLDEIIEQISEFSKRVILADANLDKVLSAYNKHRDKPIREQAENIIHLFTLTNLGAPAAFKYFDTTIDRKRYTSTKEVLDATLIHQSITGLYETRIDLSQLGGDGGEAAAKGSSGGGGGWVQEISDSRPMLHIYLNGRRFLGLLNTGADKTCIAGRDWPANWPIHQTESSLQGLGMACGVARSSQPLRWQHEDKSGIIHPFVIPTLPFTLWGRDIMKDIKVRLMTDSPDDSQDLMIGAIESNLFADQISWKSDQPVWLNQWPLKQEKLQALQQLVTEQLQLGHLEESNSPWNTPVFVIKKKSGKWRLLQDLRAVNATMHDMGALQPGLPSPVAVPKGWEIIIIDLQDCFFNIKLHPEDCKRFAFSVPSPNFKRPYQRFQWKVLPQGMKNSPTLCQKFVDKAILTVRDKYQDSYIVHYMDDILLAHPSRSIVDEILTSMIQALNKHGLVVSTEKIQKYDNLKYLGTHIQGDSVSYQKLQIRTDKLRTLNDFQKLLGNINWIRPFLKLTTGELKPLFEILNGDSNPISTRKLTPEACKALQLMNERLSTARVKRLDLSQPWSLCILKTEYTPTACLWQDGVVEWIHLPHISPKVITPYDIFCTQLIIKGRHRSKELFSKDPDYIVVPYTKVQFDLLLQEKEDWPISLLGFLGEVHFHLPKDPLLTFTLQTAIIFPHMTSTTPLEKGIVIFTDGSANGRSVTYIQGREPIIKENTQNTAQQAEIVAVITAFEEVSQPFNLYTDSKYVTGLFPEIETATLSPRTKIYTELKHLQRLIHKRQEKFYIGHIRGHTGLPGPLAQGNAYADSLTRILTAGKRTADGSEFEKRTADGSEFESPKKKAKVE

SEQ ID NO: 3272 - protein, 2114 aa, synthetic construct
MPAAKRVKLDGGDKKYSIGLDIGTNSVGWAVITDEYKVPSKKFKVLGNTDRHSIKKNLIGALLFDSGETAEATRLKRTARRRYTRRKNRICYLQEIFSNEMAKVDDSFFHRLEESFLVEEDKKHERHPIFGNIVDEVAYHEKYPTIYHLRKKLVDSTDKADLRLIYLALAHMIKFRGHFLIEGDLNPDNSDVDKLFIQLVQTYNQLFEENPINASGVDAKAILSARLSKSRRLENLIAQLPGEKKNGLFGNLIALSLGLTPNFKSNFDLAEDAKLQLSKDTYDDDLDNLLAQIGDQYADLFLAAKNLSDAILLSDILRVNTEITKAPLSASMIKRYDEHHQDLTLLKALVRQQLPEKYKEIFFDQSKNGYAGYIDGGASQEEFYKFIKPILEKMDGTEELLVKLNREDLLRKQRTFDNGSIPHQIHLGELHAILRRQEDFYPFLKDNREKIEKILTFRIPYYVGPLARGNSRFAWMTRKSEETITPWNFEEVVDKGASAQSFIERMTNFDKNLPNEKVLPKHSLLYEYFTVYNELTKVKYVTEGMRKPAFLSGEQKKAIVDLLFKTNRKVTVKQLKEDYFKKIECFDSVEISGVEDRFNASLGTYHDLLKIIKDKDFLDNEENEDILEDIVLTLTLFEDREMIEERLKTYAHLFDDKVMKQLKRRRYTGWGRLSRKLINGIRDKQSGKTILDFLKSDGFANRNFMQLIHDDSLTFKEDIQKAQVSGQGDSLHEHIANLAGSPAIKKGILQTVKVVDELVKVMGRHKPENIVIEMARENQTTQKGQKNSRERMKRIEEGIKELGSQILKEHPVENTQLQNEKLYLYYLQNGRDMYVDQELDINRLSDYDVDHIVPQSFLKDDSIDNKVLTRSDKARGKSDNVPSEEVVKKMKNYWRQLLNAKLITQRKFDNLTKAERGGLSELDKAGFIKRQLVETRQITKHVAQILDSRMNTKYDENDKLIREVKVITLKSKLVSDFRKDFQFYKVREINNYHHAHDAYLNAVVGTALIKKYPKLESEFVYGDYKVYDVRKMIAKSEQEIGKATAKYFFYSNIMNFFKTEITLANGEIRKRPLIETNGETGEIVWDKGRDFATVRKVLSMPQVNIVKKTEVQTGGFSKESILPKRNSDKLIARKKDWDPKKYGGFDSPTVAYSVLVVAKVEKGKSKKLKSVKELLGITIMERSSFEKNPIDFLEAKGYKEVKKDLIIKLPKYSLFELENGRKRMLASAGELQKGNELALPSKYVNFLYLASHYEKLKGSPEDNEQKQLFVEQHKHYLDEIIEQISEFSKRVILADANLDKVLSAYNKHRDKPIREQAENIIHLFTLTNLGAPAAFKYFDTTIDRKRYTSTKEVLDATLIHQSITGLYETRIDLSQLGGDGGGGGGGSGSSGGWVQEISDSRPMLHIYLNGRRFLGLLNTGADKTCIAGRDWPANWPIHQTESSLQGLGMACGVARSSQPLRWQHEDKSGIIHPFVIPTLPFTLWGRDIMKDIKVRLMTDSPDDSQDLMIGAIESNLFADQISWKSDQPVWLNQWPLKQEKLQALQQLVTEQLQLGHLEESNSPWNTPVFVIKKKSGKWRLLQDLRAVNATMHDMGALQPGLPSPVAVPKGWEIIIIDLQDCFFNIKLHPEDCKRFAFSVPSPNFKRPYQRFQWKVLPQGMKNSPTLCQKFVDKAILTVRDKYQDSYIVHYMDDILLAHPSRSIVDEILTSMIQALNKHGLVVSTEKIQKYDNLKYLGTHIQGDSVSYQKLQIRTDKLRTLNDFQKLLGNINWIRPFLKLTTGELKPLFEILNGDSNPISTRKLTPEACKALQLMNERLSTARVKRLDLSQPWSLCILKTEYTPTACLWQDGVVEWIHLPHISPKVITPYDIFCTQLIIKGRHRSKELFSKDPDYIVVPYTKVQFDLLLQEKEDWPISLLGFLGEVHFHLPKDPLLTFTLQTAIIFPHMTSTTPLEKGIVIFTDGSANGRSVTYIQGREPIIKENTQNTAQQAEIVAVITAFEEVSQPFNLYTDSKYVTGLFPEIETATLSPRTKIYTELKHLQRLIHKRQEKFYIGHIRGHTGLPGPLAQGNAYADSLTRILTAGKRTADGSEFEKRTADGSEFESPKKKAKVE

SEQ ID NO: 3273 - protein, 2116 aa, synthetic construct
MPAAKRVKLDGGDKKYSIGLDIGTNSVGWAVITDEYKVPSKKFKVLGNTDRHSIKKNLIGALLFDSGETAEATRLKRTARRRYTRRKNRICYLQEIFSNEMAKVDDSFFHRLEESFLVEEDKKHERHPIFGNIVDEVAYHEKYPTIYHLRKKLVDSTDKADLRLIYLALAHMIKFRGHFLIEGDLNPDNSDVDKLFIQLVQTYNQLFEENPINASGVDAKAILSARLSKSRRLENLIAQLPGEKKNGLFGNLIALSLGLTPNFKSNFDLAEDAKLQLSKDTYDDDLDNLLAQIGDQYADLFLAAKNLSDAILLSDILRVNTEITKAPLSASMIKRYDEHHQDLTLLKALVRQQLPEKYKEIFFDQSKNGYAGYIDGGASQEEFYKFIKPILEKMDGTEELLVKLNREDLLRKQRTFDNGSIPHQIHLGELHAILRRQEDFYPFLKDNREKIEKILTFRIPYYVGPLARGNSRFAWMTRKSEETITPWNFEEVVDKGASAQSFIERMTNFDKNLPNEKVLPKHSLLYEYFTVYNELTKVKYVTEGMRKPAFLSGEQKKAIVDLLFKTNRKVTVKQLKEDYFKKIECFDSVEISGVEDRFNASLGTYHDLLKIIKDKDFLDNEENEDILEDIVLTLTLFEDREMIEERLKTYAHLFDDKVMKQLKRRRYTGWGRLSRKLINGIRDKQSGKTILDFLKSDGFANRNFMQLIHDDSLTFKEDIQKAQVSGQGDSLHEHIANLAGSPAIKKGILQTVKVVDELVKVMGRHKPENIVIEMARENQTTQKGQKNSRERMKRIEEGIKELGSQILKEHPVENTQLQNEKLYLYYLQNGRDMYVDQELDINRLSDYDVDHIVPQSFLKDDSIDNKVLTRSDKARGKSDNVPSEEVVKKMKNYWRQLLNAKLITQRKFDNLTKAERGGLSELDKAGFIKRQLVETRQITKHVAQILDSRMNTKYDENDKLIREVKVITLKSKLVSDFRKDFQFYKVREINNYHHAHDAYLNAVVGTALIKKYPKLESEFVYGDYKVYDVRKMIAKSEQEIGKATAKYFFYSNIMNFFKTEITLANGEIRKRPLIETNGETGEIVWDKGRDFATVRKVLSMPQVNIVKKTEVQTGGFSKESILPKRNSDKLIARKKDWDPKKYGGFDSPTVAYSVLVVAKVEKGKSKKLKSVKELLGITIMERSSFEKNPIDFLEAKGYKEVKKDLIIKLPKYSLFELENGRKRMLASAGELQKGNELALPSKYVNFLYLASHYEKLKGSPEDNEQKQLFVEQHKHYLDEIIEQISEFSKRVILADANLDKVLSAYNKHRDKPIREQAENIIHLFTLTNLGAPAAFKYFDTTIDRKRYTSTKEVLDATLIHQSITGLYETRIDLSQLGGDGGEAAAKGGGPAPGGWVQEISDSRPMLHIYLNGRRFLGLLNTGADKTCIAGRDWPANWPIHQTESSLQGLGMACGVARSSQPLRWQHEDKSGIIHPFVIPTLPFTLWGRDIMKDIKVRLMTDSPDDSQDLMIGAIESNLFADQISWKSDQPVWLNQWPLKQEKLQALQQLVTEQLQLGHLEESNSPWNTPVFVIKKKSGKWRLLQDLRAVNATMHDMGALQPGLPSPVAVPKGWEIIIIDLQDCFFNIKLHPEDCKRFAFSVPSPNFKRPYQRFQWKVLPQGMKNSPTLCQKFVDKAILTVRDKYQDSYIVHYMDDILLAHPSRSIVDEILTSMIQALNKHGLVVSTEKIQKYDNLKYLGTHIQGDSVSYQKLQIRTDKLRTLNDFQKLLGNINWIRPFLKLTTGELKPLFEILNGDSNPISTRKLTPEACKALQLMNERLSTARVKRLDLSQPWSLCILKTEYTPTACLWQDGVVEWIHLPHISPKVITPYDIFCTQLIIKGRHRSKELFSKDPDYIVVPYTKVQFDLLLQEKEDWPISLLGFLGEVHFHLPKDPLLTFTLQTAIIFPHMTSTTPLEKGIVIFTDGSANGRSVTYIQGREPIIKENTQNTAQQAEIVAVITAFEEVSQPFNLYTDSKYVTGLFPEIETATLSPRTKIYTELKHLQRLIHKRQEKFYIGHIRGHTGLPGPLAQGNAYADSLTRILTAGKRTADGSEFEKRTADGSEFESPKKKAKVE

SEQ ID NO: 3274 - protein, 2116 aa, synthetic construct
MPAAKRVKLDGGDKKYSIGLDIGTNSVGWAVITDEYKVPSKKFKVLGNTDRHSIKKNLIGALLFDSGETAEATRLKRTARRRYTRRKNRICYLQEIFSNEMAKVDDSFFHRLEESFLVEEDKKHERHPIFGNIVDEVAYHEKYPTIYHLRKKLVDSTDKADLRLIYLALAHMIKFRGHFLIEGDLNPDNSDVDKLFIQLVQTYNQLFEENPINASGVDAKAILSARLSKSRRLENLIAQLPGEKKNGLFGNLIALSLGLTPNFKSNFDLAEDAKLQLSKDTYDDDLDNLLAQIGDQYADLFLAAKNLSDAILLSDILRVNTEITKAPLSASMIKRYDEHHQDLTLLKALVRQQLPEKYKEIFFDQSKNGYAGYIDGGASQEEFYKFIKPILEKMDGTEELLVKLNREDLLRKQRTFDNGSIPHQIHLGELHAILRRQEDFYPFLKDNREKIEKILTFRIPYYVGPLARGNSRFAWMTRKSEETITPWNFEEVVDKGASAQSFIERMTNFDKNLPNEKVLPKHSLLYEYFTVYNELTKVKYVTEGMRKPAFLSGEQKKAIVDLLFKTNRKVTVKQLKEDYFKKIECFDSVEISGVEDRFNASLGTYHDLLKIIKDKDFLDNEENEDILEDIVLTLTLFEDREMIEERLKTYAHLFDDKVMKQLKRRRYTGWGRLSRKLINGIRDKQSGKTILDFLKSDGFANRNFMQLIHDDSLTFKEDIQKAQVSGQGDSLHEHIANLAGSPAIKKGILQTVKVVDELVKVMGRHKPENIVIEMARENQTTQKGQKNSRERMKRIEEGIKELGSQILKEHPVENTQLQNEKLYLYYLQNGRDMYVDQELDINRLSDYDVDHIVPQSFLKDDSIDNKVLTRSDKARGKSDNVPSEEVVKKMKNYWRQLLNAKLITQRKFDNLTKAERGGLSELDKAGFIKRQLVETRQITKHVAQILDSRMNTKYDENDKLIREVKVITLKSKLVSDFRKDFQFYKVREINNYHHAHDAYLNAVVGTALIKKYPKLESEFVYGDYKVYDVRKMIAKSEQEIGKATAKYFFYSNIMNFFKTEITLANGEIRKRPLIETNGETGEIVWDKGRDFATVRKVLSMPQVNIVKKTEVQTGGFSKESILPKRNSDKLIARKKDWDPKKYGGFDSPTVAYSVLVVAKVEKGKSKKLKSVKELLGITIMERSSFEKNPIDFLEAKGYKEVKKDLIIKLPKYSLFELENGRKRMLASAGELQKGNELALPSKYVNFLYLASHYEKLKGSPEDNEQKQLFVEQHKHYLDEIIEQISEFSKRVILADANLDKVLSAYNKHRDKPIREQAENIIHLFTLTNLGAPAAFKYFDTTIDRKRYTSTKEVLDATLIHQSITGLYETRIDLSQLGGDGGPAPEAAAKGGGGGWVQEISDSRPMLHIYLNGRRFLGLLNTGADKTCIAGRDWPANWPIHQTESSLQGLGMACGVARSSQPLRWQHEDKSGIIHPFVIPTLPFTLWGRDIMKDIKVRLMTDSPDDSQDLMIGAIESNLFADQISWKSDQPVWLNQWPLKQEKLQALQQLVTEQLQLGHLEESNSPWNTPVFVIKKKSGKWRLLQDLRAVNATMHDMGALQPGLPSPVAVPKGWEIIIIDLQDCFFNIKLHPEDCKRFAFSVPSPNFKRPYQRFQWKVLPQGMKNSPTLCQKFVDKAILTVRDKYQDSYIVHYMDDILLAHPSRSIVDEILTSMIQALNKHGLVVSTEKIQKYDNLKYLGTHIQGDSVSYQKLQIRTDKLRTLNDFQKLLGNINWIRPFLKLTTGELKPLFEILNGDSNPISTRKLTPEACKALQLMNERLSTARVKRLDLSQPWSLCILKTEYTPTACLWQDGVVEWIHLPHISPKVITPYDIFCTQLIIKGRHRSKELFSKDPDYIVVPYTKVQFDLLLQEKEDWPISLLGFLGEVHFHLPKDPLLTFTLQTAIIFPHMTSTTPLEKGIVIFTDGSANGRSVTYIQGREPIIKENTQNTAQQAEIVAVITAFEEVSQPFNLYTDSKYVTGLFPEIETATLSPRTKIYTELKHLQRLIHKRQEKFYIGHIRGHTGLPGPLAQGNAYADSLTRILTAGKRTADGSEFEKRTADGSEFESPKKKAKVE

SEQ ID NO: 3275 - protein, 2114 aa, synthetic construct
MPAAKRVKLDGGDKKYSIGLDIGTNSVGWAVITDEYKVPSKKFKVLGNTDRHSIKKNLIGALLFDSGETAEATRLKRTARRRYTRRKNRICYLQEIFSNEMAKVDDSFFHRLEESFLVEEDKKHERHPIFGNIVDEVAYHEKYPTIYHLRKKLVDSTDKADLRLIYLALAHMIKFRGHFLIEGDLNPDNSDVDKLFIQLVQTYNQLFEENPINASGVDAKAILSARLSKSRRLENLIAQLPGEKKNGLFGNLIALSLGLTPNFKSNFDLAEDAKLQLSKDTYDDDLDNLLAQIGDQYADLFLAAKNLSDAILLSDILRVNTEITKAPLSASMIKRYDEHHQDLTLLKALVRQQLPEKYKEIFFDQSKNGYAGYIDGGASQEEFYKFIKPILEKMDGTEELLVKLNREDLLRKQRTFDNGSIPHQIHLGELHAILRRQEDFYPFLKDNREKIEKILTFRIPYYVGPLARGNSRFAWMTRKSEETITPWNFEEVVDKGASAQSFIERMTNFDKNLPNEKVLPKHSLLYEYFTVYNELTKVKYVTEGMRKPAFLSGEQKKAIVDLLFKTNRKVTVKQLKEDYFKKIECFDSVEISGVEDRFNASLGTYHDLLKIIKDKDFLDNEENEDILEDIVLTLTLFEDREMIEERLKTYAHLFDDKVMKQLKRRRYTGWGRLSRKLINGIRDKQSGKTILDFLKSDGFANRNFMQLIHDDSLTFKEDIQKAQVSGQGDSLHEHIANLAGSPAIKKGILQTVKVVDELVKVMGRHKPENIVIEMARENQTTQKGQKNSRERMKRIEEGIKELGSQILKEHPVENTQLQNEKLYLYYLQNGRDMYVDQELDINRLSDYDVDHIVPQSFLKDDSIDNKVLTRSDKARGKSDNVPSEEVVKKMKNYWRQLLNAKLITQRKFDNLTKAERGGLSELDKAGFIKRQLVETRQITKHVAQILDSRMNTKYDENDKLIREVKVITLKSKLVSDFRKDFQFYKVREINNYHHAHDAYLNAVVGTALIKKYPKLESEFVYGDYKVYDVRKMIAKSEQEIGKATAKYFFYSNIMNFFKTEITLANGEIRKRPLIETNGETGEIVWDKGRDFATVRKVLSMPQVNIVKKTEVQTGGFSKESILPKRNSDKLIARKKDWDPKKYGGFDSPTVAYSVLVVAKVEKGKSKKLKSVKELLGITIMERSSFEKNPIDFLEAKGYKEVKKDLIIKLPKYSLFELENGRKRMLASAGELQKGNELALPSKYVNFLYLASHYEKLKGSPEDNEQKQLFVEQHKHYLDEIIEQISEFSKRVILADANLDKVLSAYNKHRDKPIREQAENIIHLFTLTNLGAPAAFKYFDTTIDRKRYTSTKEVLDATLIHQSITGLYETRIDLSQLGGDGGGGGPAPGGSGGWVQEISDSRPMLHIYLNGRRFLGLLNTGADKTCIAGRDWPANWPIHQTESSLQGLGMACGVARSSQPLRWQHEDKSGIIHPFVIPTLPFTLWGRDIMKDIKVRLMTDSPDDSQDLMIGAIESNLFADQISWKSDQPVWLNQWPLKQEKLQALQQLVTEQLQLGHLEESNSPWNTPVFVIKKKSGKWRLLQDLRAVNATMHDMGALQPGLPSPVAVPKGWEIIIIDLQDCFFNIKLHPEDCKRFAFSVPSPNFKRPYQRFQWKVLPQGMKNSPTLCQKFVDKAILTVRDKYQDSYIVHYMDDILLAHPSRSIVDEILTSMIQALNKHGLVVSTEKIQKYDNLKYLGTHIQGDSVSYQKLQIRTDKLRTLNDFQKLLGNINWIRPFLKLTTGELKPLFEILNGDSNPISTRKLTPEACKALQLMNERLSTARVKRLDLSQPWSLCILKTEYTPTACLWQDGVVEWIHLPHISPKVITPYDIFCTQLIIKGRHRSKELFSKDPDYIVVPYTKVQFDLLLQEKEDWPISLLGFLGEVHFHLPKDPLLTFTLQTAIIFPHMTSTTPLEKGIVIFTDGSANGRSVTYIQGREPIIKENTQNTAQQAEIVAVITAFEEVSQPFNLYTDSKYVTGLFPEIETATLSPRTKIYTELKHLQRLIHKRQEKFYIGHIRGHTGLPGPLAQGNAYADSLTRILTAGKRTADGSEFEKRTADGSEFESPKKKAKVE

SEQ ID NO: 3276 - protein, 2114 aa, synthetic construct
MPAAKRVKLDGGDKKYSIGLDIGTNSVGWAVITDEYKVPSKKFKVLGNTDRHSIKKNLIGALLFDSGETAEATRLKRTARRRYTRRKNRICYLQEIFSNEMAKVDDSFFHRLEESFLVEEDKKHERHPIFGNIVDEVAYHEKYPTIYHLRKKLVDSTDKADLRLIYLALAHMIKFRGHFLIEGDLNPDNSDVDKLFIQLVQTYNQLFEENPINASGVDAKAILSARLSKSRRLENLIAQLPGEKKNGLFGNLIALSLGLTPNFKSNFDLAEDAKLQLSKDTYDDDLDNLLAQIGDQYADLFLAAKNLSDAILLSDILRVNTEITKAPLSASMIKRYDEHHQDLTLLKALVRQQLPEKYKEIFFDQSKNGYAGYIDGGASQEEFYKFIKPILEKMDGTEELLVKLNREDLLRKQRTFDNGSIPHQIHLGELHAILRRQEDFYPFLKDNREKIEKILTFRIPYYVGPLARGNSRFAWMTRKSEETITPWNFEEVVDKGASAQSFIERMTNFDKNLPNEKVLPKHSLLYEYFTVYNELTKVKYVTEGMRKPAFLSGEQKKAIVDLLFKTNRKVTVKQLKEDYFKKIECFDSVEISGVEDRFNASLGTYHDLLKIIKDKDFLDNEENEDILEDIVLTLTLFEDREMIEERLKTYAHLFDDKVMKQLKRRRYTGWGRLSRKLINGIRDKQSGKTILDFLKSDGFANRNFMQLIHDDSLTFKEDIQKAQVSGQGDSLHEHIANLAGSPAIKKGILQTVKVVDELVKVMGRHKPENIVIEMARENQTTQKGQKNSRERMKRIEEGIKELGSQILKEHPVENTQLQNEKLYLYYLQNGRDMYVDQELDINRLSDYDVDHIVPQSFLKDDSIDNKVLTRSDKARGKSDNVPSEEVVKKMKNYWRQLLNAKLITQRKFDNLTKAERGGLSELDKAGFIKRQLVETRQITKHVAQILDSRMNTKYDENDKLIREVKVITLKSKLVSDFRKDFQFYKVREINNYHHAHDAYLNAVVGTALIKKYPKLESEFVYGDYKVYDVRKMIAKSEQEIGKATAKYFFYSNIMNFFKTEITLANGEIRKRPLIETNGETGEIVWDKGRDFATVRKVLSMPQVNIVKKTEVQTGGFSKESILPKRNSDKLIARKKDWDPKKYGGFDSPTVAYSVLVVAKVEKGKSKKLKSVKELLGITIMERSSFEKNPIDFLEAKGYKEVKKDLIIKLPKYSLFELENGRKRMLASAGELQKGNELALPSKYVNFLYLASHYEKLKGSPEDNEQKQLFVEQHKHYLDEIIEQISEFSKRVILADANLDKVLSAYNKHRDKPIREQAENIIHLFTLTNLGAPAAFKYFDTTIDRKRYTSTKEVLDATLIHQSITGLYETRIDLSQLGGDGGGGSGGGPAPGGWVQEISDSRPMLHIYLNGRRFLGLLNTGADKTCIAGRDWPANWPIHQTESSLQGLGMACGVARSSQPLRWQHEDKSGIIHPFVIPTLPFTLWGRDIMKDIKVRLMTDSPDDSQDLMIGAIESNLFADQISWKSDQPVWLNQWPLKQEKLQALQQLVTEQLQLGHLEESNSPWNTPVFVIKKKSGKWRLLQDLRAVNATMHDMGALQPGLPSPVAVPKGWEIIIIDLQDCFFNIKLHPEDCKRFAFSVPSPNFKRPYQRFQWKVLPQGMKNSPTLCQKFVDKAILTVRDKYQDSYIVHYMDDILLAHPSRSIVDEILTSMIQALNKHGLVVSTEKIQKYDNLKYLGTHIQGDSVSYQKLQIRTDKLRTLNDFQKLLGNINWIRPFLKLTTGELKPLFEILNGDSNPISTRKLTPEACKALQLMNERLSTARVKRLDLSQPWSLCILKTEYTPTACLWQDGVVEWIHLPHISPKVITPYDIFCTQLIIKGRHRSKELFSKDPDYIVVPYTKVQFDLLLQEKEDWPISLLGFLGEVHFHLPKDPLLTFTLQTAIIFPHMTSTTPLEKGIVIFTDGSANGRSVTYIQGREPIIKENTQNTAQQAEIVAVITAFEEVSQPFNLYTDSKYVTGLFPEIETATLSPRTKIYTELKHLQRLIHKRQEKFYIGHIRGHTGLPGPLAQGNAYADSLTRILTAGKRTADGSEFEKRTADGSEFESPKKKAKVE

SEQ ID NO: 3277 - protein, 2135 aa, synthetic construct; identical to SEQ ID NO: 3173

SEQ ID NO: 3278 - protein, 2110 aa, synthetic construct
MPAAKRVKLDGGDKKYSIGLDIGTNSVGWAVITDEYKVPSKKFKVLGNTDRHSIKKNLIGALLFDSGETAEATRLKRTARRRYTRRKNRICYLQEIFSNEMAKVDDSFFHRLEESFLVEEDKKHERHPIFGNIVDEVAYHEKYPTIYHLRKKLVDSTDKADLRLIYLALAHMIKFRGHFLIEGDLNPDNSDVDKLFIQLVQTYNQLFEENPINASGVDAKAILSARLSKSRRLENLIAQLPGEKKNGLFGNLIALSLGLTPNFKSNFDLAEDAKLQLSKDTYDDDLDNLLAQIGDQYADLFLAAKNLSDAILLSDILRVNTEITKAPLSASMIKRYDEHHQDLTLLKALVRQQLPEKYKEIFFDQSKNGYAGYIDGGASQEEFYKFIKPILEKMDGTEELLVKLNREDLLRKQRTFDNGSIPHQIHLGELHAILRRQEDFYPFLKDNREKIEKILTFRIPYYVGPLARGNSRFAWMTRKSEETITPWNFEEVVDKGASAQSFIERMTNFDKNLPNEKVLPKHSLLYEYFTVYNELTKVKYVTEGMRKPAFLSGEQKKAIVDLLFKTNRKVTVKQLKEDYFKKIECFDSVEISGVEDRFNASLGTYHDLLKIIKDKDFLDNEENEDILEDIVLTLTLFEDREMIEERLKTYAHLFDDKVMKQLKRRRYTGWGRLSRKLINGIRDKQSGKTILDFLKSDGFANRNFMQLIHDDSLTFKEDIQKAQVSGQGDSLHEHIANLAGSPAIKKGILQTVKVVDELVKVMGRHKPENIVIEMARENQTTQKGQKNSRERMKRIEEGIKELGSQILKEHPVENTQLQNEKLYLYYLQNGRDMYVDQELDINRLSDYDVDHIVPQSFLKDDSIDNKVLTRSDKARGKSDNVPSEEVVKKMKNYWRQLLNAKLITQRKFDNLTKAERGGLSELDKAGFIKRQLVETRQITKHVAQILDSRMNTKYDENDKLIREVKVITLKSKLVSDFRKDFQFYKVREINNYHHAHDAYLNAVVGTALIKKYPKLESEFVYGDYKVYDVRKMIAKSEQEIGKATAKYFFYSNIMNFFKTEITLANGEIRKRPLIETNGETGEIVWDKGRDFATVRKVLSMPQVNIVKKTEVQTGGFSKESILPKRNSDKLIARKKDWDPKKYGGFDSPTVAYSVLVVAKVEKGKSKKLKSVKELLGITIMERSSFEKNPIDFLEAKGYKEVKKDLIIKLPKYSLFELENGRKRMLASAGELQKGNELALPSKYVNFLYLASHYEKLKGSPEDNEQKQLFVEQHKHYLDEIIEQISEFSKRVILADANLDKVLSAYNKHRDKPIREQAENIIHLFTLTNLGAPAAFKYFDTTIDRKRYTSTKEVLDATLIHQSITGLYETRIDLSQLGGDGGEAAAKGGWVQEISDSRPMLHIYLNGRRFLGLLNTGADKTCIAGRDWPANWPIHQTESSLQGLGMACGVARSSQPLRWQHEDKSGIIHPFVIPTLPFTLWGRDIMKDIKVRLMTDSPDDSQDLMIGAIESNLFADQISWKSDQPVWLNQWPLKQEKLQALQQLVTEQLQLGHLEESNSPWNTPVFVIKKKSGKWRLLQDLRAVNATMHDMGALQPGLPSPVAVPKGWEIIIIDLQDCFFNIKLHPEDCKRFAFSVPSPNFKRPYQRFQWKVLPQGMKNSPTLCQKFVDKAILTVRDKYQDSYIVHYMDDILLAHPSRSIVDEILTSMIQALNKHGLVVSTEKIQKYDNLKYLGTHIQGDSVSYQKLQIRTDKLRTLNDFQKLLGNINWIRPFLKLTTGELKPLFEILNGDSNPISTRKLTPEACKALQLMNERLSTARVKRLDLSQPWSLCILKTEYTPTACLWQDGVVEWIHLPHISPKVITPYDIFCTQLIIKGRHRSKELFSKDPDYIVVPYTKVQFDLLLQEKEDWPISLLGFLGEVHFHLPKDPLLTFTLQTAIIFPHMTSTTPLEKGIVIFTDGSANGRSVTYIQGREPIIKENTQNTAQQAEIVAVITAFEEVSQPFNLYTDSKYVTGLFPEIETATLSPRTKIYTELKHLQRLIHKRQEKFYIGHIRGHTGLPGPLAQGNAYADSLTRILTAGKRTADGSEFEKRTADGSEFESPKKKAKVE

SEQ ID NO: 3279 - protein, 2116 aa, synthetic construct
MPAAKRVKLDGGDKKYSIGLDIGTNSVGWAVITDEYKVPSKKFKVLGNTDRHSIKKNLIGALLFDSGETAEATRLKRTARRRYTRRKNRICYLQEIFSNEMAKVDDSFFHRLEESFLVEEDKKHERHPIFGNIVDEVAYHEKYPTIYHLRKKLVDSTDKADLRLIYLALAHMIKFRGHFLIEGDLNPDNSDVDKLFIQLVQTYNQLFEENPINASGVDAKAILSARLSKSRRLENLIAQLPGEKKNGLFGNLIALSLGLTPNFKSNFDLAEDAKLQLSKDTYDDDLDNLLAQIGDQYADLFLAAKNLSDAILLSDILRVNTEITKAPLSASMIKRYDEHHQDLTLLKALVRQQLPEKYKEIFFDQSKNGYAGYIDGGASQEEFYKFIKPILEKMDGTEELLVKLNREDLLRKQRTFDNGSIPHQIHLGELHAILRRQEDFYPFLKDNREKIEKILTFRIPYYVGPLARGNSRFAWMTRKSEETITPWNFEEVVDKGASAQSFIERMTNFDKNLPNEKVLPKHSLLYEYFTVYNELTKVKYVTEGMRKPAFLSGEQKKAIVDLLFKTNRKVTVKQLKEDYFKKIECFDSVEISGVEDRFNASLGTYHDLLKIIKDKDFLDNEENEDILEDIVLTLTLFEDREMIEERLKTYAHLFDDKVMKQLKRRRYTGWGRLSRKLINGIRDKQSGKTILDFLKSDGFANRNFMQLIHDDSLTFKEDIQKAQVSGQGDSLHEHIANLAGSPAIKKGILQTVKVVDELVKVMGRHKPENIVIEMARENQTTQKGQKNSRERMKRIEEGIKELGSQILKEHPVENTQLQNEKLYLYYLQNGRDMYVDQELDINRLSDYDVDHIVPQSFLKDDSIDNKVLTRSDKARGKSDNVPSEEVVKKMKNYWRQLLNAKLITQRKFDNLTKAERGGLSELDKAGFIKRQLVETRQITKHVAQILDSRMNTKYDENDKLIREVKVITLKSKLVSDFRKDFQFYKVREINNYHHAHDAYLNAVVGTALIKKYPKLESEFVYGDYKVYDVRKMIAKSEQEIGKATAKYFFYSNIMNFFKTEITLANGEIRKRPLIETNGETGEIVWDKGRDFATVRKVLSMPQVNIVKKTEVQTGGFSKESILPKRNSDKLIARKKDWDPKKYGGFDSPTVAYSVLVVAKVEKGKSKKLKSVKELLGITIMERSSFEKNPIDFLEAKGYKEVKKDLIIKLPKYSLFELENGRKRMLASAGELQKGNELALPSKYVNFLYLASHYEKLKGSPEDNEQKQLFVEQHKHYLDEIIEQISEFSKRVILADANLDKVLSAYNKHRDKPIREQAENIIHLFTLTNLGAPAAFKYFDTTIDRKRYTSTKEVLDATLIHQSITGLYETRIDLSQLGGDGGGGGGGSEAAAKGGWVQEISDSRPMLHIYLNGRRFLGLLNTGADKTCIAGRDWPANWPIHQTESSLQGLGMACGVARSSQPLRWQHEDKSGIIHPFVIPTLPFTLWGRDIMKDIKVRLMTDSPDDSQDLMIGAIESNLFADQISWKSDQPVWLNQWPLKQEKLQALQQLVTEQLQLGHLEESNSPWNTPVFVIKKKSGKWRLLQDLRAVNATMHDMGALQPGLPSPVAVPKGWEIIIIDLQDCFFNIKLHPEDCKRFAFSVPSPNFKRPYQRFQWKVLPQGMKNSPTLCQKFVDKAILTVRDKYQDSYIVHYMDDILLAHPSRSIVDEILTSMIQALNKHGLVVSTEKIQKYDNLKYLGTHIQGDSVSYQKLQIRTDKLRTLNDFQKLLGNINWIRPFLKLTTGELKPLFEILNGDSNPISTRKLTPEACKALQLMNERLSTARVKRLDLSQPWSLCILKTEYTPTACLWQDGVVEWIHLPHISPKVITPYDIFCTQLIIKGRHRSKELFSKDPDYIVVPYTKVQFDLLLQEKEDWPISLLGFLGEVHFHLPKDPLLTFTLQTAIIFPHMTSTTPLEKGIVIFTDGSANGRSVTYIQGREPIIKENTQNTAQQAEIVAVITAFEEVSQPFNLYTDSKYVTGLFPEIETATLSPRTKIYTELKHLQRLIHKRQEKFYIGHIRGHTGLPGPLAQGNAYADSLTRILTAGKRTADGSEFEKRTADGSEFESPKKKAKVE

SEQ ID NO: 3280 - protein, 2125 aa, synthetic construct; identical to SEQ ID NO: 3193

SEQ ID NO: 3281 - protein, 2120 aa, synthetic construct
MPAAKRVKLDGGDKKYSIGLDIGTNSVGWAVITDEYKVPSKKFKVLGNTDRHSIKKNLIGALLFDSGETAEATRLKRTARRRYTRRKNRICYLQEIFSNEMAKVDDSFFHRLEESFLVEEDKKHERHPIFGNIVDEVAYHEKYPTIYHLRKKLVDSTDKADLRLIYLALAHMIKFRGHFLIEGDLNPDNSDVDKLFIQLVQTYNQLFEENPINASGVDAKAILSARLSKSRRLENLIAQLPGEKKNGLFGNLIALSLGLTPNFKSNFDLAEDAKLQLSKDTYDDDLDNLLAQIGDQYADLFLAAKNLSDAILLSDILRVNTEITKAPLSASMIKRYDEHHQDLTLLKALVRQQLPEKYKEIFFDQSKNGYAGYIDGGASQEEFYKFIKPILEKMDGTEELLVKLNREDLLRKQRTFDNGSIPHQIHLGELHAILRRQEDFYPFLKDNREKIEKILTFRIPYYVGPLARGNSRFAWMTRKSEETITPWNFEEVVDKGASAQSFIERMTNFDKNLPNEKVLPKHSLLYEYFTVYNELTKVKYVTEGMRKPAFLSGEQKKAIVDLLFKTNRKVTVKQLKEDYFKKIECFDSVEISGVEDRFNASLGTYHDLLKIIKDKDFLDNEENEDILEDIVLTLTLFEDREMIEERLKTYAHLFDDKVMKQLKRRRYTGWGRLSRKLINGIRDKQSGKTILDFLKSDGFANRNFMQLIHDDSLTFKEDIQKAQVSGQGDSLHEHIANLAGSPAIKKGILQTVKVVDELVKVMGRHKPENIVIEMARENQTTQKGQKNSRERMKRIEEGIKELGSQILKEHPVENTQLQNEKLYLYYLQNGRDMYVDQELDINRLSDYDVDHIVPQSFLKDDSIDNKVLTRSDKARGKSDNVPSEEVVKKMKNYWRQLLNAKLITQRKFDNLTKAERGGLSELDKAGFIKRQLVETRQITKHVAQILDSRMNTKYDENDKLIREVKVITLKSKLVSDFRKDFQFYKVREINNYHHAHDAYLNAVVGTALIKKYPKLESEFVYGDYKVYDVRKMIAKSEQEIGKATAKYFFYSNIMNFFKTEITLANGEIRKRPLIETNGETGEIVWDKGRDFATVRKVLSMPQVNIVKKTEVQTGGFSKESILPKRNSDKLIARKKDWDPKKYGGFDSPTVAYSVLVVAKVEKGKSKKLKSVKELLGITIMERSSFEKNPIDFLEAKGYKEVKKDLIIKLPKYSLFELENGRKRMLASAGELQKGNELALPSKYVNFLYLASHYEKLKGSPEDNEQKQLFVEQHKHYLDEIIEQISEFSKRVILADANLDKVLSAYNKHRDKPIREQAENIIHLFTLTNLGAPAAFKYFDTTIDRKRYTSTKEVLDATLIHQSITGLYETRIDLSQLGGDGGGSSGSSGSSGSSGSSGGWVQEISDSRPMLHIYLNGRRFLGLLNTGADKTCIAGRDWPANWPIHQTESSLQGLGMACGVARSSQPLRWQHEDKSGIIHPFVIPTLPFTLWGRDIMKDIKVRLMTDSPDDSQDLMIGAIESNLFADQISWKSDQPVWLNQWPLKQEKLQALQQLVTEQLQLGHLEESNSPWNTPVFVIKKKSGKWRLLQDLRAVNATMHDMGALQPGLPSPVAVPKGWEIIIIDLQDCFFNIKLHPEDCKRFAFSVPSPNFKRPYQRFQWKVLPQGMKNSPTLCQKFVDKAILTVRDKYQDSYIVHYMDDILLAHPSRSIVDEILTSMIQALNKHGLVVSTEKIQKYDNLKYLGTHIQGDSVSYQKLQIRTDKLRTLNDFQKLLGNINWIRPFLKLTTGELKPLFEILNGDSNPISTRKLTPEACKALQLMNERLSTARVKRLDLSQPWSLCILKTEYTPTACLWQDGVVEWIHLPHISPKVITPYDIFCTQLIIKGRHRSKELFSKDPDYIVVPYTKVQFDLLLQEKEDWPISLLGFLGEVHFHLPKDPLLTFTLQTAIIFPHMTSTTPLEKGIVIFTDGSANGRSVTYIQGREPIIKENTQNTAQQAEIVAVITAFEEVSQPFNLYTDSKYVTGLFPEIETATLSPRTKIYTELKHLQRLIHKRQEKFYIGHIRGHTGLPGPLAQGNAYADSLTRILTAGKRTADGSEFEKRTADGSEFESPKKKAKVE

SEQ ID NO: 3282 - protein, 2123 aa, synthetic construct
MPAAKRVKLDGGDKKYSIGLDIGTNSVGWAVITDEYKVPSKKFKVLGNTDRHSIKKNLIGALLFDSGETAEATRLKRTARRRYTRRKNRICYLQEIFSNEMAKVDDSFFHRLEESFLVEEDKKHERHPIFGNIVDEVAYHEKYPTIYHLRKKLVDSTDKADLRLIYLALAHMIKFRGHFLIEGDLNPDNSDVDKLFIQLVQTYNQLFEENPINASGVDAKAILSARLSKSRRLENLIAQLPGEKKNGLFGNLIALSLGLTPNFKSNFDLAEDAKLQLSKDTYDDDLDNLLAQIGDQYADLFLAAKNLSDAILLSDILRVNTEITKAPLSASMIKRYDEHHQDLTLLKALVRQQLPEKYKEIFFDQSKNGYAGYIDGGASQEEFYKFIKPILEKMDGTEELLVKLNREDLLRKQRTFDNGSIPHQIHLGELHAILRRQEDFYPFLKDNREKIEKILTFRIPYYVGPLARGNSRFAWMTRKSEETITPWNFEEVVDKGASAQSFIERMTNFDKNLPNEKVLPKHSLLYEYFTVYNELTKVKYVTEGMRKPAFLSGEQKKAIVDLLFKTNRKVTVKQLKEDYFKKIECFDSVEISGVEDRFNASLGTYHDLLKIIKDKDFLDNEENEDILEDIVLTLTLFEDREMIEERLKTYAHLFDDKVMKQLKRRRYTGWGRLSRKLINGIRDKQSGKTILDFLKSDGFANRNFMQLIHDDSLTFKEDIQKAQVSGQGDSLHEHIANLAGSPAIKKGILQTVKVVDELVKVMGRHKPENIVIEMARENQTTQKGQKNSRERMKRIEEGIKELGSQILKEHPVENTQLQNEKLYLYYLQNGRDMYVDQELDINRLSDYDVDHIVPQSFLKDDSIDNKVLTRSDKARGKSDNVPSEEVVKKMKNYWRQLLNAKLITQRKFDNLTKAERGGLSELDKAGFIKRQLVETRQITKHVAQILDSRMNTKYDENDKLIREVKVITLKSKLVSDFRKDFQFYKVREINNYHHAHDAYLNAVVGTALIKKYPKLESEFVYGDYKVYDVRKMIAKSEQEIGKATAKYFFYSNIMNFFKTEITLANGEIRKRPLIETNGETGEIVWDKGRDFATVRKVLSMPQVNIVKKTEVQTGGFSKESILPKRNSDKLIARKKDWDPKKYGGFDSPTVAYSVLVVAKVEKGKSKKLKSVKELLGITIMERSSFEKNPIDFLEAKGYKEVKKDLIIKLPKYSLFELENGRKRMLASAGELQKGNELALPSKYVNFLYLASHYEKLKGSPEDNEQKQLFVEQHKHYLDEIIEQISEFSKRVILADANLDKVLSAYNKHRDKPIREQAENIIHLFTLTNLGAPAAFKYFDTTIDRKRYTSTKEVLDATLIHQSITGLYETRIDLSQLGGDGGGSSGSSGSSGSSGSSGSSGGWVQEISDSRPMLHIYLNGRRFLGLLNTGADKTCIAGRDWPANWPIHQTESSLQGLGMACGVARSSQPLRWQHEDKSGIIHPFVIPTLPFTLWGRDIMKDIKVRLMTDSPDDSQDLMIGAIESNLFADQISWKSDQPVWLNQWPLKQEKLQALQQLVTEQLQLGHLEESNSPWNTPVFVIKKKSGKWRLLQDLRAVNATMHDMGALQPGLPSPVAVPKGWEIIIIDLQDCFFNIKLHPEDCKRFAFSVPSPNFKRPYQRFQWKVLPQGMKNSPTLCQKFVDKAILTVRDKYQDSYIVHYMDDILLAHPSRSIVDEILTSMIQALNKHGLVVSTEKIQKYDNLKYLGTHIQGDSVSYQKLQIRTDKLRTLNDFQKLLGNINWIRPFLKLTTGELKPLFEILNGDSNPISTRKLTPEACKALQLMNERLSTARVKRLDLSQPWSLCILKTEYTPTACLWQDGVVEWIHLPHISPKVITPYDIFCTQLIIKGRHRSKELFSKDPDYIVVPYTKVQFDLLLQEKEDWPISLLGFLGEVHFHLPKDPLLTFTLQTAIIFPHMTSTTPLEKGIVIFTDGSANGRSVTYIQGREPIIKENTQNTAQQAEIVAVITAFEEVSQPFNLYTDSKYVTGLFPEIETATLSPRTKIYTELKHLQRLIHKRQEKFYIGHIRGHTGLPGPLAQGNAYADSLTRILTAGKRTADGSEFEKRTADGSEFESPKKKAKVE

SEQ ID NO: 3283 - protein, 2116 aa, synthetic construct
MPAAKRVKLDGGDKKYSIGLDIGTNSVGWAVITDEYKVPSKKFKVLGNTDRHSIKKNLIGALLFDSGETAEATRLKRTARRRYTRRKNRICYLQEIFSNEMAKVDDSFFHRLEESFLVEEDKKHERHPIFGNIVDEVAYHEKYPTIYHLRKKLVDSTDKADLRLIYLALAHMIKFRGHFLIEGDLNPDNSDVDKLFIQLVQTYNQLFEENPINASGVDAKAILSARLSKSRRLENLIAQLPGEKKNGLFGNLIALSLGLTPNFKSNFDLAEDAKLQLSKDTYDDDLDNLLAQIGDQYADLFLAAKNLSDAILLSDILRVNTEITKAPLSASMIKRYDEHHQDLTLLKALVRQQLPEKYKEIFFDQSKNGYAGYIDGGASQEEFYKFIKPILEKMDGTEELLVKLNREDLLRKQRTFDNGSIPHQIHLGELHAILRRQEDFYPFLKDNREKIEKILTFRIPYYVGPLARGNSRFAWMTRKSEETITPWNFEEVVDKGASAQSFIERMTNFDKNLPNEKVLPKHSLLYEYFTVYNELTKVKYVTEGMRKPAFLSGEQKKAIVDLLFKTNRKVTVKQLKEDYFKKIECFDSVEISGVEDRFNASLGTYHDLLKIIKDKDFLDNEENEDILEDIVLTLTLFEDREMIEERLKTYAHLFDDKVMKQLKRRRYTGWGRLSRKLINGIRDKQSGKTILDFLKSDGFANRNFMQLIHDDSLTFKEDIQKAQVSGQGDSLHEHIANLAGSPAIKKGILQTVKVVDELVKVMGRHKPENIVIEMARENQTTQKGQKNSRERMKRIEEGIKELGSQILKEHPVENTQLQNEKLYLYYLQNGRDMYVDQELDINRLSDYDVDHIVPQSFLKDDSIDNKVLTRSDKARGKSDNVPSEEVVKKMKNYWRQLLNAKLITQRKFDNLTKAERGGLSELDKAGFIKRQLVETRQITKHVAQILDSRMNTKYDENDKLIREVKVITLKSKLVSDFRKDFQFYKVREINNYHHAHDAYLNAVVGTALIKKYPKLESEFVYGDYKVYDVRKMIAKSEQEIGKATAKYFFYSNIMNFFKTEITLANGEIRKRPLIETNGETGEIVWDKGRDFATVRKVLSMPQVNIVKKTEVQTGGFSKESILPKRNSDKLIARKKDWDPKKYGGFDSPTVAYSVLVVAKVEKGKSKKLKSVKELLGITIMERSSFEKNPIDFLEAKGYKEVKKDLIIKLPKYSLFELENGRKRMLASAGELQKGNELALPSKYVNFLYLASHYEKLKGSPEDNEQKQLFVEQHKHYLDEIIEQISEFSKRVILADANLDKVLSAYNKHRDKPIREQAENIIHLFTLTNLGAPAAFKYFDTTIDRKRYTSTKEVLDATLIHQSITGLYETRIDLSQLGGDGGEAAAKGGGGSSGGWVQEISDSRPMLHIYLNGRRFLGLLNTGADKTCIAGRDWPANWPIHQTESSLQGLGMACGVARSSQPLRWQHEDKSGIIHPFVIPTLPFTLWGRDIMKDIKVRLMTDSPDDSQDLMIGAIESNLFADQISWKSDQPVWLNQWPLKQEKLQALQQLVTEQLQLGHLEESNSPWNTPVFVIKKKSGKWRLLQDLRAVNATMHDMGALQPGLPSPVAVPKGWEIIIIDLQDCFFNIKLHPEDCKRFAFSVPSPNFKRPYQRFQWKVLPQGMKNSPTLCQKFVDKAILTVRDKYQDSYIVHYMDDILLAHPSRSIVDEILTSMIQALNKHGLVVSTEKIQKYDNLKYLGTHIQGDSVSYQKLQIRTDKLRTLNDFQKLLGNINWIRPFLKLTTGELKPLFEILNGDSNPISTRKLTPEACKALQLMNERLSTARVKRLDLSQPWSLCILKTEYTPTACLWQDGVVEWIHLPHISPKVITPYDIFCTQLIIKGRHRSKELFSKDPDYIVVPYTKVQFDLLLQEKEDWPISLLGFLGEVHFHLPKDPLLTFTLQTAIIFPHMTSTTPLEKGIVIFTDGSANGRSVTYIQGREPIIKENTQNTAQQAEIVAVITAFEEVSQPFNLYTDSKYVTGLFPEIETATLSPRTKIYTELKHLQRLIHKRQEKFYIGHIRGHTGLPGPLAQGNAYADSLTRILTAGKRTADGSEFEKRTADGSEFESPKKKAKVE

SEQ ID NO: 3284 - protein, 2116 aa, synthetic construct
MPAAKRVKLDGGDKKYSIGLDIGTNSVGWAVITDEYKVPSKKFKVLGNTDRHSIKKNLIGALLFDSGETAEATRLKRTARRRYTRRKNRICYLQEIFSNEMAKVDDSFFHRLEESFLVEEDKKHERHPIFGNIVDEVAYHEKYPTIYHLRKKLVDSTDKADLRLIYLALAHMIKFRGHFLIEGDLNPDNSDVDKLFIQLVQTYNQLFEENPINASGVDAKAILSARLSKSRRLENLIAQLPGEKKNGLFGNLIALSLGLTPNFKSNFDLAEDAKLQLSKDTYDDDLDNLLAQIGDQYADLFLAAKNLSDAILLSDILRVNTEITKAPLSASMIKRYDEHHQDLTLLKALVRQQLPEKYKEIFFDQSKNGYAGYIDGGASQEEFYKFIKPILEKMDGTEELLVKLNREDLLRKQRTFDNGSIPHQIHLGELHAILRRQEDFYPFLKDNREKIEKILTFRIPYYVGPLARGNSRFAWMTRKSEETITPWNFEEVVDKGASAQSFIERMTNFDKNLPNEKVLPKHSLLYEYFTVYNELTKVKYVTEGMRKPAFLSGEQKKAIVDLLFKTNRKVTVKQLKEDYFKKIECFDSVEISGVEDRFNASLGTYHDLLKIIKDKDFLDNEENEDILEDIVLTLTLFEDREMIEERLKTYAHLFDDKVMKQLKRRRYTGWGRLSRKLINGIRDKQSGKTILDFLKSDGFANRNFMQLIHDDSLTFKEDIQKAQVSGQGDSLHEHIANLAGSPAIKKGILQTVKVVDELVKVMGRHKPENIVIEMARENQTTQKGQKNSRERMKRIEEGIKELGSQILKEHPVENTQLQNEKLYLYYLQNGRDMYVDQELDINRLSDYDVDHIVPQSFLKDDSIDNKVLTRSDKARGKSDNVPSEEVVKKMKNYWRQLLNAKLITQRKFDNLTKAERGGLSELDKAGFIKRQLVETRQITKHVAQILDSRMNTKYDENDKLIREVKVITLKSKLVSDFRKDFQFYKVREINNYHHAHDAYLNAVVGTALIKKYPKLESEFVYGDYKVYDVRKMIAKSEQEIGKATAKYFFYSNIMNFFKTEITLANGEIRKRPLIETNGETGEIVWDKGRDFATVRKVLSMPQVNIVKKTEVQTGGFSKESILPKRNSDKLIARKKDWDPKKYGGFDSPTVAYSVLVVAKVEKGKSKKLKSVKELLGITIMERSSFEKNPIDFLEAKGYKEVKKDLIIKLPKYSLFELENGRKRMLASAGELQKGNELALPSKYVNFLYLASHYEKLKGSPEDNEQKQLFVEQHKHYLDEIIEQISEFSKRVILADANLDKVLSAYNKHRDKPIREQAENIIHLFTLTNLGAPAAFKYFDTTIDRKRYTSTKEVLDATLIHQSITGLYETRIDLSQLGGDGGEAAAKGGGGGSGGWVQEISDSRPMLHIYLNGRRFLGLLNTGADKTCIAGRDWPANWPIHQTESSLQGLGMACGVARSSQPLRWQHEDKSGIIHPFVIPTLPFTLWGRDIMKDIKVRLMTDSPDDSQDLMIGAIESNLFADQISWKSDQPVWLNQWPLKQEKLQALQQLVTEQLQLGHLEESNSPWNTPVFVIKKKSGKWRLLQDLRAVNATMHDMGALQPGLPSPVAVPKGWEIIIIDLQDCFFNIKLHPEDCKRFAFSVPSPNFKRPYQRFQWKVLPQGMKNSPTLCQKFVDKAILTVRDKYQDSYIVHYMDDILLAHPSRSIVDEILTSMIQALNKHGLVVSTEKIQKYDNLKYLGTHIQGDSVSYQKLQIRTDKLRTLNDFQKLLGNINWIRPFLKLTTGELKPLFEILNGDSNPISTRKLTPEACKALQLMNERLSTARVKRLDLSQPWSLCILKTEYTPTACLWQDGVVEWIHLPHISPKVITPYDIFCTQLIIKGRHRSKELFSKDPDYIVVPYTKVQFDLLLQEKEDWPISLLGFLGEVHFHLPKDPLLTFTLQTAIIFPHMTSTTPLEKGIVIFTDGSANGRSVTYIQGREPIIKENTQNTAQQAEIVAVITAFEEVSQPFNLYTDSKYVTGLFPEIETATLSPRTKIYTELKHLQRLIHKRQEKFYIGHIRGHTGLPGPLAQGNAYADSLTRILTAGKRTADGSEFEKRTADGSEFESPKKKAKVE

SEQ ID NO: 3285 - protein, 2116 aa, synthetic construct
MPAAKRVKLDGGDKKYSIGLDIGTNSVGWAVITDEYKVPSKKFKVLGNTDRHSIKKNLIGALLFDSGETAEATRLKRTARRRYTRRKNRICYLQEIFSNEMAKVDDSFFHRLEESFLVEEDKKHERHPIFGNIVDEVAYHEKYPTIYHLRKKLVDSTDKADLRLIYLALAHMIKFRGHFLIEGDLNPDNSDVDKLFIQLVQTYNQLFEENPINASGVDAKAILSARLSKSRRLENLIAQLPGEKKNGLFGNLIALSLGLTPNFKSNFDLAEDAKLQLSKDTYDDDLDNLLAQIGDQYADLFLAAKNLSDAILLSDILRVNTEITKAPLSASMIKRYDEHHQDLTLLKALVRQQLPEKYKEIFFDQSKNGYAGYIDGGASQEEFYKFIKPILEKMDGTEELLVKLNREDLLRKQRTFDNGSIPHQIHLGELHAILRRQEDFYPFLKDNREKIEKILTFRIPYYVGPLARGNSRFAWMTRKSEETITPWNFEEVVDKGASAQSFIERMTNFDKNLPNEKVLPKHSLLYEYFTVYNELTKVKYVTEGMRKPAFLSGEQKKAIVDLLFKTNRKVTVKQLKEDYFKKIECFDSVEISGVEDRFNASLGTYHDLLKIIKDKDFLDNEENEDILEDIVLTLTLFEDREMIEERLKTYAHLFDDKVMKQLKRRRYTGWGRLSRKLINGIRDKQSGKTILDFLKSDGFANRNFMQLIHDDSLTFKEDIQKAQVSGQGDSLHEHIANLAGSPAIKKGILQTVKVVDELVKVMGRHKPENIVIEMARENQTTQKGQKNSRERMKRIEEGIKELGSQILKEHPVENTQLQNEKLYLYYLQNGRDMYVDQELDINRLSDYDVDHIVPQSFLKDDSIDNKVLTRSDKARGKSDNVPSEEVVKKMKNYWRQLLNAKLITQRKFDNLTKAERGGLSELDKAGFIKRQLVETRQITKHVAQILDSRMNTKYDENDKLIREVKVITLKSKLVSDFRKDFQFYKVREINNYHHAHDAYLNAVVGTALIKKYPKLESEFVYGDYKVYDVRKMIAKSEQEIGKATAKYFFYSNIMNFFKTEITLANGEIRKRPLIETNGETGEIVWDKGRDFATVRKVLSMPQVNIVKKTEVQTGGFSKESILPKRNSDKLIARKKDWDPKKYGGFDSPTVAYSVLVVAKVEKGKSKKLKSVKELLGITIMERSSFEKNPIDFLEAKGYKEVKKDLIIKLPKYSLFELENGRKRMLASAGELQKGNELALPSKYVNFLYLASHYEKLKGSPEDNEQKQLFVEQHKHYLDEIIEQISEFSKRVILADANLDKVLSAYNKHRDKPIREQAENIIHLFTLTNLGAPAAFKYFDTTIDRKRYTSTKEVLDATLIHQSITGLYETRIDLSQLGGDGGGGGGSSEAAAKGGWVQEISDSRPMLHIYLNGRRFLGLLNTGADKTCIAGRDWPANWPIHQTESSLQGLGMACGVARSSQPLRWQHEDKSGIIHPFVIPTLPFTLWGRDIMKDIKVRLMTDSPDDSQDLMIGAIESNLFADQISWKSDQPVWLNQWPLKQEKLQALQQLVTEQLQLGHLEESNSPWNTPVFVIKKKSGKWRLLQDLRAVNATMHDMGALQPGLPSPVAVPKGWEIIIIDLQDCFFNIKLHPEDCKRFAFSVPSPNFKRPYQRFQWKVLPQGMKNSPTLCQKFVDKAILTVRDKYQDSYIVHYMDDILLAHPSRSIVDEILTSMIQALNKHGLVVSTEKIQKYDNLKYLGTHIQGDSVSYQKLQIRTDKLRTLNDFQKLLGNINWIRPFLKLTTGELKPLFEILNGDSNPISTRKLTPEACKALQLMNERLSTARVKRLDLSQPWSLCILKTEYTPTACLWQDGVVEWIHLPHISPKVITPYDIFCTQLIIKGRHRSKELFSKDPDYIVVPYTKVQFDLLLQEKEDWPISLLGFLGEVHFHLPKDPLLTFTLQTAIIFPHMTSTTPLEKGIVIFTDGSANGRSVTYIQGREPIIKENTQNTAQQAEIVAVITAFEEVSQPFNLYTDSKYVTGLFPEIETATLSPRTKIYTELKHLQRLIHKRQEKFYIGHIRGHTGLPGPLAQGNAYADSLTRILTAGKRTADGSEFEKRTADGSEFESPKKKAKVE

SEQ ID NO: 3286 - protein, 2116 aa, synthetic construct
MPAAKRVKLDGGDKKYSIGLDIGTNSVGWAVITDEYKVPSKKFKVLGNTDRHSIKKNLIGALLFDSGETAEATRLKRTARRRYTRRKNRICYLQEIFSNEMAKVDDSFFHRLEESFLVEEDKKHERHPIFGNIVDEVAYHEKYPTIYHLRKKLVDSTDKADLRLIYLALAHMIKFRGHFLIEGDLNPDNSDVDKLFIQLVQTYNQLFEENPINASGVDAKAILSARLSKSRRLENLIAQLPGEKKNGLFGNLIALSLGLTPNFKSNFDLAEDAKLQLSKDTYDDDLDNLLAQIGDQYADLFLAAKNLSDAILLSDILRVNTEITKAPLSASMIKRYDEHHQDLTLLKALVRQQLPEKYKEIFFDQSKNGYAGYIDGGASQEEFYKFIKPILEKMDGTEELLVKLNREDLLRKQRTFDNGSIPHQIHLGELHAILRRQEDFYPFLKDNREKIEKILTFRIPYYVGPLARGNSRFAWMTRKSEETITPWNFEEVVDKGASAQSFIERMTNFDKNLPNEKVLPKHSLLYEYFTVYNELTKVKYVTEGMRKPAFLSGEQKKAIVDLLFKTNRKVTVKQLKEDYFKKIECFDSVEISGVEDRFNASLGTYHDLLKIIKDKDFLDNEENEDILEDIVLTLTLFEDREMIEERLKTYAHLFDDKVMKQLKRRRYTGWGRLSRKLINGIRDKQSGKTILDFLKSDGFANRNFMQLIHDDSLTFKEDIQKAQVSGQGDSLHEHIANLAGSPAIKKGILQTVKVVDELVKVMGRHKPENIVIEMARENQTTQKGQKNSRERMKRIEEGIKELGSQILKEHPVENTQLQNEKLYLYYLQNGRDMYVDQELDINRLSDYDVDHIVPQSFLKDDSIDNKVLTRSDKARGKSDNVPSEEVVKKMKNYWRQLLNAKLITQRKFDNLTKAERGGLSELDKAGFIKRQLVETRQITKHVAQILDSRMNTKYDENDKLIREVKVITLKSKLVSDFRKDFQFYKVREINNYHHAHDAYLNAVVGTALIKKYPKLESEFVYGDYKVYDVRKMIAKSEQEIGKATAKYFFYSNIMNFFKTEITLANGEIRKRPLIETNGETGEIVWDKGRDFATVRKVLSMPQVNIVKKTEVQTGGFSKESILPKRNSDKLIARKKDWDPKKYGGFDSPTVAYSVLVVAKVEKGKSKKLKSVKELLGITIMERSSFEKNPIDFLEAKGYKEVKKDLIIKLPKYSLFELENGRKRMLASAGELQKGNELALPSKYVNFLYLASHYEKLKGSPEDNEQKQLFVEQHKHYLDEIIEQISEFSKRVILADANLDKVLSAYNKHRDKPIREQAENIIHLFTLTNLGAPAAFKYFDTTIDRKRYTSTKEVLDATLIHQSITGLYETRIDLSQLGGDGGGGSGGGEAAAKGGWVQEISDSRPMLHIYLNGRRFLGLLNTGADKTCIAGRDWPANWPIHQTESSLQGLGMACGVARSSQPLRWQHEDKSGIIHPFVIPTLPFTLWGRDIMKDIKVRLMTDSPDDSQDLMIGAIESNLFADQISWKSDQPVWLNQWPLKQEKLQALQQLVTEQLQLGHLEESNSPWNTPVFVIKKKSGKWRLLQDLRAVNATMHDMGALQPGLPSPVAVPKGWEIIIIDLQDCFFNIKLHPEDCKRFAFSVPSPNFKRPYQRFQWKVLPQGMKNSPTLCQKFVDKAILTVRDKYQDSYIVHYMDDILLAHPSRSIVDEILTSMIQALNKHGLVVSTEKIQKYDNLKYLGTHIQGDSVSYQKLQIRTDKLRTLNDFQKLLGNINWIRPFLKLTTGELKPLFEILNGDSNPISTRKLTPEACKALQLMNERLSTARVKRLDLSQPWSLCILKTEYTPTACLWQDGVVEWIHLPHISPKVITPYDIFCTQLIIKGRHRSKELFSKDPDYIVVPYTKVQFDLLLQEKEDWPISLLGFLGEVHFHLPKDPLLTFTLQTAIIFPHMTSTTPLEKGIVIFTDGSANGRSVTYIQGREPIIKENTQNTAQQAEIVAVITAFEEVSQPFNLYTDSKYVTGLFPEIETATLSPRTKIYTELKHLQRLIHKRQEKFYIGHIRGHTGLPGPLAQGNAYADSLTRILTAGKRTADGSEFEKRTADGSEFESPKKKAKVE

SEQ ID NO: 3287 - protein, 2114 aa, synthetic construct; identical to SEQ ID NO: 3179

SEQ ID NO: 3288 - protein, 2116 aa, synthetic construct
MPAAKRVKLDGGDKKYSIGLDIGTNSVGWAVITDEYKVPSKKFKVLGNTDRHSIKKNLIGALLFDSGETAEATRLKRTARRRYTRRKNRICYLQEIFSNEMAKVDDSFFHRLEESFLVEEDKKHERHPIFGNIVDEVAYHEKYPTIYHLRKKLVDSTDKADLRLIYLALAHMIKFRGHFLIEGDLNPDNSDVDKLFIQLVQTYNQLFEENPINASGVDAKAILSARLSKSRRLENLIAQLPGEKKNGLFGNLIALSLGLTPNFKSNFDLAEDAKLQLSKDTYDDDLDNLLAQIGDQYADLFLAAKNLSDAILLSDILRVNTEITKAPLSASMIKRYDEHHQDLTLLKALVRQQLPEKYKEIFFDQSKNGYAGYIDGGASQEEFYKFIKPILEKMDGTEELLVKLNREDLLRKQRTFDNGSIPHQIHLGELHAILRRQEDFYPFLKDNREKIEKILTFRIPYYVGPLARGNSRFAWMTRKSEETITPWNFEEVVDKGASAQSFIERMTNFDKNLPNEKVLPKHSLLYEYFTVYNELTKVKYVTEGMRKPAFLSGEQKKAIVDLLFKTNRKVTVKQLKEDYFKKIECFDSVEISGVEDRFNASLGTYHDLLKIIKDKDFLDNEENEDILEDIVLTLTLFEDREMIEERLKTYAHLFDDKVMKQLKRRRYTGWGRLSRKLINGIRDKQSGKTILDFLKSDGFANRNFMQLIHDDSLTFKEDIQKAQVSGQGDSLHEHIANLAGSPAIKKGILQTVKVVDELVKVMGRHKPENIVIEMARENQTTQKGQKNSRERMKRIEEGIKELGSQILKEHPVENTQLQNEKLYLYYLQNGRDMYVDQELDINRLSDYDVDHIVPQSFLKDDSIDNKVLTRSDKARGKSDNVPSEEVVKKMKNYWRQLLNAKLITQRKFDNLTKAERGGLSELDKAGFIKRQLVETRQITKHVAQILDSRMNTKYDENDKLIREVKVITLKSKLVSDFRKDFQFYKVREINNYHHAHDAYLNAVVGTALIKKYPKLESEFVYGDYKVYDVRKMIAKSEQEIGKATAKYFFYSNIMNFFKTEITLANGEIRKRPLIETNGETGEIVWDKGRDFATVRKVLSMPQVNIVKKTEVQTGGFSKESILPKRNSDKLIARKKDWDPKKYGGFDSPTVAYSVLVVAKVEKGKSKKLKSVKELLGITIMERSSFEKNPIDFLEAKGYKEVKKDLIIKLPKYSLFELENGRKRMLASAGELQKGNELALPSKYVNFLYLASHYEKLKGSPEDNEQKQLFVEQHKHYLDEIIEQISEFSKRVILADANLDKVLSAYNKHRDKPIREQAENIIHLFTLTNLGAPAAFKYFDTTIDRKRYTSTKEVLDATLIHQSITGLYETRIDLSQLGGDGGPAPEAAAKGGSGGWVQEISDSRPMLHIYLNGRRFLGLLNTGADKTCIAGRDWPANWPIHQTESSLQGLGMACGVARSSQPLRWQHEDKSGIIHPFVIPTLPFTLWGRDIMKDIKVRLMTDSPDDSQDLMIGAIESNLFADQISWKSDQPVWLNQWPLKQEKLQALQQLVTEQLQLGHLEESNSPWNTPVFVIKKKSGKWRLLQDLRAVNATMHDMGALQPGLPSPVAVPKGWEIIIIDLQDCFFNIKLHPEDCKRFAFSVPSPNFKRPYQRFQWKVLPQGMKNSPTLCQKFVDKAILTVRDKYQDSYIVHYMDDILLAHPSRSIVDEILTSMIQALNKHGLVVSTEKIQKYDNLKYLGTHIQGDSVSYQKLQIRTDKLRTLNDFQKLLGNINWIRPFLKLTTGELKPLFEILNGDSNPISTRKLTPEACKALQLMNERLSTARVKRLDLSQPWSLCILKTEYTPTACLWQDGVVEWIHLPHISPKVITPYDIFCTQLIIKGRHRSKELFSKDPDYIVVPYTKVQFDLLLQEKEDWPISLLGFLGEVHFHLPKDPLLTFTLQTAIIFPHMTSTTPLEKGIVIFTDGSANGRSVTYIQGREPIIKENTQNTAQQAEIVAVITAFEEVSQPFNLYTDSKYVTGLFPEIETATLSPRTKIYTELKHLQRLIHKRQEKFYIGHIRGHTGLPGPLAQGNAYADSLTRILTAGKRTADGSEFEKRTADGSEFESPKKKAKVE

SEQ ID NO: 3289 - protein, 2116 aa, synthetic construct; identical to SEQ ID NO: 3178

SEQ ID NO: 3290 - protein, 2116 aa, synthetic construct
MPAAKRVKLDGGDKKYSIGLDIGTNSVGWAVITDEYKVPSKKFKVLGNTDRHSIKKNLIGALLFDSGETAEATRLKRTARRRYTRRKNRICYLQEIFSNEMAKVDDSFFHRLEESFLVEEDKKHERHPIFGNIVDEVAYHEKYPTIYHLRKKLVDSTDKADLRLIYLALAHMIKFRGHFLIEGDLNPDNSDVDKLFIQLVQTYNQLFEENPINASGVDAKAILSARLSKSRRLENLIAQLPGEKKNGLFGNLIALSLGLTPNFKSNFDLAEDAKLQLSKDTYDDDLDNLLAQIGDQYADLFLAAKNLSDAILLSDILRVNTEITKAPLSASMIKRYDEHHQDLTLLKALVRQQLPEKYKEIFFDQSKNGYAGYIDGGASQEEFYKFIKPILEKMDGTEELLVKLNREDLLRKQRTFDNGSIPHQIHLGELHAILRRQEDFYPFLKDNREKIEKILTFRIPYYVGPLARGNSRFAWMTRKSEETITPWNFEEVVDKGASAQSFIERMTNFDKNLPNEKVLPKHSLLYEYFTVYNELTKVKYVTEGMRKPAFLSGEQKKAIVDLLFKTNRKVTVKQLKEDYFKKIECFDSVEISGVEDRFNASLGTYHDLLKIIKDKDFLDNEENEDILEDIVLTLTLFEDREMIEERLKTYAHLFDDKVMKQLKRRRYTGWGRLSRKLINGIRDKQSGKTILDFLKSDGFANRNFMQLIHDDSLTFKEDIQKAQVSGQGDSLHEHIANLAGSPAIKKGILQTVKVVDELVKVMGRHKPENIVIEMARENQTTQKGQKNSRERMKRIEEGIKELGSQILKEHPVENTQLQNEKLYLYYLQNGRDMYVDQELDINRLSDYDVDHIVPQSFLKDDSIDNKVLTRSDKARGKSDNVPSEEVVKKMKNYWRQLLNAKLITQRKFDNLTKAERGGLSELDKAGFIKRQLVETRQITKHVAQILDSRMNTKYDENDKLIREVKVITLKSKLVSDFRKDFQFYKVREINNYHHAHDAYLNAVVGTALIKKYPKLESEFVYGDYKVYDVRKMIAKSEQEIGKATAKYFFYSNIMNFFKTEITLANGEIRKRPLIETNGETGEIVWDKGRDFATVRKVLSMPQVNIVKKTEVQTGGFSKESILPKRNSDKLIARKKDWDPKKYGGFDSPTVAYSVLVVAKVEKGKSKKLKSVKELLGITIMERSSFEKNPIDFLEAKGYKEVKKDLIIKLPKYSLFELENGRKRMLASAGELQKGNELALPSKYVNFLYLASHYEKLKGSPEDNEQKQLFVEQHKHYLDEIIEQISEFSKRVILADANLDKVLSAYNKHRDKPIREQAENIIHLFTLTNLGAPAAFKYFDTTIDRKRYTSTKEVLDATLIHQSITGLYETRIDLSQLGGDGGPAPGGSEAAAKGGWVQEISDSRPMLHIYLNGRRFLGLLNTGADKTCIAGRDWPANWPIHQTESSLQGLGMACGVARSSQPLRWQHEDKSGIIHPFVIPTLPFTLWGRDIMKDIKVRLMTDSPDDSQDLMIGAIESNLFADQISWKSDQPVWLNQWPLKQEKLQALQQLVTEQLQLGHLEESNSPWNTPVFVIKKKSGKWRLLQDLRAVNATMHDMGALQPGLPSPVAVPKGWEIIIIDLQDCFFNIKLHPEDCKRFAFSVPSPNFKRPYQRFQWKVLPQGMKNSPTLCQKFVDKAILTVRDKYQDSYIVHYMDDILLAHPSRSIVDEILTSMIQALNKHGLVVSTEKIQKYDNLKYLGTHIQGDSVSYQKLQIRTDKLRTLNDFQKLLGNINWIRPFLKLTTGELKPLFEILNGDSNPISTRKLTPEACKALQLMNERLSTARVKRLDLSQPWSLCILKTEYTPTACLWQDGVVEWIHLPHISPKVITPYDIFCTQLIIKGRHRSKELFSKDPDYIVVPYTKVQFDLLLQEKEDWPISLLGFLGEVHFHLPKDPLLTFTLQTAIIFPHMTSTTPLEKGIVIFTDGSANGRSVTYIQGREPIIKENTQNTAQQAEIVAVITAFEEVSQPFNLYTDSKYVTGLFPEIETATLSPRTKIYTELKHLQRLIHKRQEKFYIGHIRGHTGLPGPLAQGNAYADSLTRILTAGKRTADGSEFEKRTADGSEFESPKKKAKVE

SEQ ID NO: 3291 - protein, 2116 aa, synthetic construct
MPAAKRVKLDGGDKKYSIGLDIGTNSVGWAVITDEYKVPSKKFKVLGNTDRHSIKKNLIGALLFDSGETAEATRLKRTARRRYTRRKNRICYLQEIFSNEMAKVDDSFFHRLEESFLVEEDKKHERHPIFGNIVDEVAYHEKYPTIYHLRKKLVDSTDKADLRLIYLALAHMIKFRGHFLIEGDLNPDNSDVDKLFIQLVQTYNQLFEENPINASGVDAKAILSARLSKSRRLENLIAQLPGEKKNGLFGNLIALSLGLTPNFKSNFDLAEDAKLQLSKDTYDDDLDNLLAQIGDQYADLFLAAKNLSDAILLSDILRVNTEITKAPLSASMIKRYDEHHQDLTLLKALVRQQLPEKYKEIFFDQSKNGYAGYIDGGASQEEFYKFIKPILEKMDGTEELLVKLNREDLLRKQRTFDNGSIPHQIHLGELHAILRRQEDFYPFLKDNREKIEKILTFRIPYYVGPLARGNSRFAWMTRKSEETITPWNFEEVVDKGASAQSFIERMTNFDKNLPNEKVLPKHSLLYEYFTVYNELTKVKYVTEGMRKPAFLSGEQKKAIVDLLFKTNRKVTVKQLKEDYFKKIECFDSVEISGVEDRFNASLGTYHDLLKIIKDKDFLDNEENEDILEDIVLTLTLFEDREMIEERLKTYAHLFDDKVMKQLKRRRYTGWGRLSRKLINGIRDKQSGKTILDFLKSDGFANRNFMQLIHDDSLTFKEDIQKAQVSGQGDSLHEHIANLAGSPAIKKGILQTVKVVDELVKVMGRHKPENIVIEMARENQTTQKGQKNSRERMKRIEEGIKELGSQILKEHPVENTQLQNEKLYLYYLQNGRDMYVDQELDINRLSDYDVDHIVPQSFLKDDSIDNKVLTRSDKARGKSDNVPSEEVVKKMKNYWRQLLNAKLITQRKFDNLTKAERGGLSELDKAGFIKRQLVETRQITKHVAQILDSRMNTKYDENDKLIREVKVITLKSKLVSDFRKDFQFYKVREINNYHHAHDAYLNAVVGTALIKKYPKLESEFVYGDYKVYDVRKMIAKSEQEIGKATAKYFFYSNIMNFFKTEITLANGEIRKRPLIETNGETGEIVWDKGRDFATVRKVLSMPQVNIVKKTEVQTGGFSKESILPKRNSDKLIARKKDWDPKKYGGFDSPTVAYSVLVVAKVEKGKSKKLKSVKELLGITIMERSSFEKNPIDFLEAKGYKEVKKDLIIKLPKYSLFELENGRKRMLASAGELQKGNELALPSKYVNFLYLASHYEKLKGSPEDNEQKQLFVEQHKHYLDEIIEQISEFSKRVILADANLDKVLSAYNKHRDKPIREQAENIIHLFTLTNLGAPAAFKYFDTTIDRKRYTSTKEVLDATLIHQSITGLYETRIDLSQLGGDGGGGSEAAAKGGGGGWVQEISDSRPMLHIYLNGRRFLGLLNTGADKTCIAGRDWPANWPIHQTESSLQGLGMACGVARSSQPLRWQHEDKSGIIHPFVIPTLPFTLWGRDIMKDIKVRLMTDSPDDSQDLMIGAIESNLFADQISWKSDQPVWLNQWPLKQEKLQALQQLVTEQLQLGHLEESNSPWNTPVFVIKKKSGKWRLLQDLRAVNATMHDMGALQPGLPSPVAVPKGWEIIIIDLQDCFFNIKLHPEDCKRFAFSVPSPNFKRPYQRFQWKVLPQGMKNSPTLCQKFVDKAILTVRDKYQDSYIVHYMDDILLAHPSRSIVDEILTSMIQALNKHGLVVSTEKIQKYDNLKYLGTHIQGDSVSYQKLQIRTDKLRTLNDFQKLLGNINWIRPFLKLTTGELKPLFEILNGDSNPISTRKLTPEACKALQLMNERLSTARVKRLDLSQPWSLCILKTEYTPTACLWQDGVVEWIHLPHISPKVITPYDIFCTQLIIKGRHRSKELFSKDPDYIVVPYTKVQFDLLLQEKEDWPISLLGFLGEVHFHLPKDPLLTFTLQTAIIFPHMTSTTPLEKGIVIFTDGSANGRSVTYIQGREPIIKENTQNTAQQAEIVAVITAFEEVSQPFNLYTDSKYVTGLFPEIETATLSPRTKIYTELKHLQRLIHKRQEKFYIGHIRGHTGLPGPLAQGNAYADSLTRILTAGKRTADGSEFEKRTADGSEFESPKKKAKVE

SEQ ID NO: 3292 - protein, 2114 aa, synthetic construct
MPAAKRVKLDGGDKKYSIGLDIGTNSVGWAVITDEYKVPSKKFKVLGNTDRHSIKKNLIGALLFDSGETAEATRLKRTARRRYTRRKNRICYLQEIFSNEMAKVDDSFFHRLEESFLVEEDKKHERHPIFGNIVDEVAYHEKYPTIYHLRKKLVDSTDKADLRLIYLALAHMIKFRGHFLIEGDLNPDNSDVDKLFIQLVQTYNQLFEENPINASGVDAKAILSARLSKSRRLENLIAQLPGEKKNGLFGNLIALSLGLTPNFKSNFDLAEDAKLQLSKDTYDDDLDNLLAQIGDQYADLFLAAKNLSDAILLSDILRVNTEITKAPLSASMIKRYDEHHQDLTLLKALVRQQLPEKYKEIFFDQSKNGYAGYIDGGASQEEFYKFIKPILEKMDGTEELLVKLNREDLLRKQRTFDNGSIPHQIHLGELHAILRRQEDFYPFLKDNREKIEKILTFRIPYYVGPLARGNSRFAWMTRKSEETITPWNFEEVVDKGASAQSFIERMTNFDKNLPNEKVLPKHSLLYEYFTVYNELTKVKYVTEGMRKPAFLSGEQKKAIVDLLFKTNRKVTVKQLKEDYFKKIECFDSVEISGVEDRFNASLGTYHDLLKIIKDKDFLDNEENEDILEDIVLTLTLFEDREMIEERLKTYAHLFDDKVMKQLKRRRYTGWGRLSRKLINGIRDKQSGKTILDFLKSDGFANRNFMQLIHDDSLTFKEDIQKAQVSGQGDSLHEHIANLAGSPAIKKGILQTVKVVDELVKVMGRHKPENIVIEMARENQTTQKGQKNSRERMKRIEEGIKELGSQILKEHPVENTQLQNEKLYLYYLQNGRDMYVDQELDINRLSDYDVDHIVPQSFLKDDSIDNKVLTRSDKARGKSDNVPSEEVVKKMKNYWRQLLNAKLITQRKFDNLTKAERGGLSELDKAGFIKRQLVETRQITKHVAQILDSRMNTKYDENDKLIREVKVITLKSKLVSDFRKDFQFYKVREINNYHHAHDAYLNAVVGTALIKKYPKLESEFVYGDYKVYDVRKMIAKSEQEIGKATAKYFFYSNIMNFFKTEITLANGEIRKRPLIETNGETGEIVWDKGRDFATVRKVLSMPQVNIVKKTEVQTGGFSKESILPKRNSDKLIARKKDWDPKKYGGFDSPTVAYSVLVVAKVEKGKSKKLKSVKELLGITIMERSSFEKNPIDFLEAKGYKEVKKDLIIKLPKYSLFELENGRKRMLASAGELQKGNELALPSKYVNFLYLASHYEKLKGSPEDNEQKQLFVEQHKHYLDEIIEQISEFSKRVILADANLDKVLSAYNKHRDKPIREQAENIIHLFTLTNLGAPAAFKYFDTTIDRKRYTSTKEVLDATLIHQSITGLYETRIDLSQLGGDGGGGSGGSGGSGGWVQEISDSRPMLHIYLNGRRFLGLLNTGADKTCIAGRDWPANWPIHQTESSLQGLGMACGVARSSQPLRWQHEDKSGIIHPFVIPTLPFTLWGRDIMKDIKVRLMTDSPDDSQDLMIGAIESNLFADQISWKSDQPVWLNQWPLKQEKLQALQQLVTEQLQLGHLEESNSPWNTPVFVIKKKSGKWRLLQDLRAVNATMHDMGALQPGLPSPVAVPKGWEIIIIDLQDCFFNIKLHPEDCKRFAFSVPSPNFKRPYQRFQWKVLPQGMKNSPTLCQKFVDKAILTVRDKYQDSYIVHYMDDILLAHPSRSIVDEILTSMIQALNKHGLVVSTEKIQKYDNLKYLGTHIQGDSVSYQKLQIRTDKLRTLNDFQKLLGNINWIRPFLKLTTGELKPLFEILNGDSNPISTRKLTPEACKALQLMNERLSTARVKRLDLSQPWSLCILKTEYTPTACLWQDGVVEWIHLPHISPKVITPYDIFCTQLIIKGRHRSKELFSKDPDYIVVPYTKVQFDLLLQEKEDWPISLLGFLGEVHFHLPKDPLLTFTLQTAIIFPHMTSTTPLEKGIVIFTDGSANGRSVTYIQGREPIIKENTQNTAQQAEIVAVITAFEEVSQPFNLYTDSKYVTGLFPEIETATLSPRTKIYTELKHLQRLIHKRQEKFYIGHIRGHTGLPGPLAQGNAYADSLTRILTAGKRTADGSEFEKRTADGSEFESPKKKAKVE

SEQ ID NO: 3293 - protein, 2113 aa, synthetic construct
MPAAKRVKLDGGDKKYSIGLDIGTNSVGWAVITDEYKVPSKKFKVLGNTDRHSIKKNLIGALLFDSGETAEATRLKRTARRRYTRRKNRICYLQEIFSNEMAKVDDSFFHRLEESFLVEEDKKHERHPIFGNIVDEVAYHEKYPTIYHLRKKLVDSTDKADLRLIYLALAHMIKFRGHFLIEGDLNPDNSDVDKLFIQLVQTYNQLFEENPINASGVDAKAILSARLSKSRRLENLIAQLPGEKKNGLFGNLIALSLGLTPNFKSNFDLAEDAKLQLSKDTYDDDLDNLLAQIGDQYADLFLAAKNLSDAILLSDILRVNTEITKAPLSASMIKRYDEHHQDLTLLKALVRQQLPEKYKEIFFDQSKNGYAGYIDGGASQEEFYKFIKPILEKMDGTEELLVKLNREDLLRKQRTFDNGSIPHQIHLGELHAILRRQEDFYPFLKDNREKIEKILTFRIPYYVGPLARGNSRFAWMTRKSEETITPWNFEEVVDKGASAQSFIERMTNFDKNLPNEKVLPKHSLLYEYFTVYNELTKVKYVTEGMRKPAFLSGEQKKAIVDLLFKTNRKVTVKQLKEDYFKKIECFDSVEISGVEDRFNASLGTYHDLLKIIKDKDFLDNEENEDILEDIVLTLTLFEDREMIEERLKTYAHLFDDKVMKQLKRRRYTGWGRLSRKLINGIRDKQSGKTILDFLKSDGFANRNFMQLIHDDSLTFKEDIQKAQVSGQGDSLHEHIANLAGSPAIKKGILQTVKVVDELVKVMGRHKPENIVIEMARENQTTQKGQKNSRERMKRIEEGIKELGSQILKEHPVENTQLQNEKLYLYYLQNGRDMYVDQELDINRLSDYDVDHIVPQSFLKDDSIDNKVLTRSDKARGKSDNVPSEEVVKKMKNYWRQLLNAKLITQRKFDNLTKAERGGLSELDKAGFIKRQLVETRQITKHVAQILDSRMNTKYDENDKLIREVKVITLKSKLVSDFRKDFQFYKVREINNYHHAHDAYLNAVVGTALIKKYPKLESEFVYGDYKVYDVRKMIAKSEQEIGKATAKYFFYSNIMNFFKTEITLANGEIRKRPLIETNGETGEIVWDKGRDFATVRKVLSMPQVNIVKKTEVQTGGFSKESILPKRNSDKLIARKKDWDPKKYGGFDSPTVAYSVLVVAKVEKGKSKKLKSVKELLGITIMERSSFEKNPIDFLEAKGYKEVKKDLIIKLPKYSLFELENGRKRMLASAGELQKGNELALPSKYVNFLYLASHYEKLKGSPEDNEQKQLFVEQHKHYLDEIIEQISEFSKRVILADANLDKVLSAYNKHRDKPIREQAENIIHLFTLTNLGAPAAFKYFDTTIDRKRYTSTKEVLDATLIHQSITGLYETRIDLSQLGGDGGGGSEAAAKGGWVQEISDSRPMLHIYLNGRRFLGLLNTGADKTCIAGRDWPANWPIHQTESSLQGLGMACGVARSSQPLRWQHEDKSGIIHPFVIPTLPFTLWGRDIMKDIKVRLMTDSPDDSQDLMIGAIESNLFADQISWKSDQPVWLNQWPLKQEKLQALQQLVTEQLQLGHLEESNSPWNTPVFVIKKKSGKWRLLQDLRAVNATMHDMGALQPGLPSPVAVPKGWEIIIIDLQDCFFNIKLHPEDCKRFAFSVPSPNFKRPYQRFQWKVLPQGMKNSPTLCQKFVDKAILTVRDKYQDSYIVHYMDDILLAHPSRSIVDEILTSMIQALNKHGLVVSTEKIQKYDNLKYLGTHIQGDSVSYQKLQIRTDKLRTLNDFQKLLGNINWIRPFLKLTTGELKPLFEILNGDSNPISTRKLTPEACKALQLMNERLSTARVKRLDLSQPWSLCILKTEYTPTACLWQDGVVEWIHLPHISPKVITPYDIFCTQLIIKGRHRSKELFSKDPDYIVVPYTKVQFDLLLQEKEDWPISLLGFLGEVHFHLPKDPLLTFTLQTAIIFPHMTSTTPLEKGIVIFTDGSANGRSVTYIQGREPIIKENTQNTAQQAEIVAVITAFEEVSQPFNLYTDSKYVTGLFPEIETATLSPRTKIYTELKHLQRLIHKRQEKFYIGHIRGHTGLPGPLAQGNAYADSLTRILTAGKRTADGSEFEKRTADGSEFESPKKKAKVE

SEQ ID NO: 3294 - protein, 2043 aa, synthetic construct
MPAAKRVKLDGGDKKYSIGLDIGTNSVGWAVITDEYKVPSKKFKVLGNTDRHSIKKNLIGALLFDSGETAEATRLKRTARRRYTRRKNRICYLQEIFSNEMAKVDDSFFHRLEESFLVEEDKKHERHPIFGNIVDEVAYHEKYPTIYHLRKKLVDSTDKADLRLIYLALAHMIKFRGHFLIEGDLNPDNSDVDKLFIQLVQTYNQLFEENPINASGVDAKAILSARLSKSRRLENLIAQLPGEKKNGLFGNLIALSLGLTPNFKSNFDLAEDAKLQLSKDTYDDDLDNLLAQIGDQYADLFLAAKNLSDAILLSDILRVNTEITKAPLSASMIKRYDEHHQDLTLLKALVRQQLPEKYKEIFFDQSKNGYAGYIDGGASQEEFYKFIKPILEKMDGTEELLVKLNREDLLRKQRTFDNGSIPHQIHLGELHAILRRQEDFYPFLKDNREKIEKILTFRIPYYVGPLARGNSRFAWMTRKSEETITPWNFEEVVDKGASAQSFIERMTNFDKNLPNEKVLPKHSLLYEYFTVYNELTKVKYVTEGMRKPAFLSGEQKKAIVDLLFKTNRKVTVKQLKEDYFKKIECFDSVEISGVEDRFNASLGTYHDLLKIIKDKDFLDNEENEDILEDIVLTLTLFEDREMIEERLKTYAHLFDDKVMKQLKRRRYTGWGRLSRKLINGIRDKQSGKTILDFLKSDGFANRNFMQLIHDDSLTFKEDIQKAQVSGQGDSLHEHIANLAGSPAIKKGILQTVKVVDELVKVMGRHKPENIVIEMARENQTTQKGQKNSRERMKRIEEGIKELGSQILKEHPVENTQLQNEKLYLYYLQNGRDMYVDQELDINRLSDYDVDHIVPQSFLKDDSIDNKVLTRSDKARGKSDNVPSEEVVKKMKNYWRQLLNAKLITQRKFDNLTKAERGGLSELDKAGFIKRQLVETRQITKHVAQILDSRMNTKYDENDKLIREVKVITLKSKLVSDFRKDFQFYKVREINNYHHAHDAYLNAVVGTALIKKYPKLESEFVYGDYKVYDVRKMIAKSEQEIGKATAKYFFYSNIMNFFKTEITLANGEIRKRPLIETNGETGEIVWDKGRDFATVRKVLSMPQVNIVKKTEVQTGGFSKESILPKRNSDKLIARKKDWDPKKYGGFDSPTVAYSVLVVAKVEKGKSKKLKSVKELLGITIMERSSFEKNPIDFLEAKGYKEVKKDLIIKLPKYSLFELENGRKRMLASAGELQKGNELALPSKYVNFLYLASHYEKLKGSPEDNEQKQLFVEQHKHYLDEIIEQISEFSKRVILADANLDKVLSAYNKHRDKPIREQAENIIHLFTLTNLGAPAAFKYFDTTIDRKRYTSTKEVLDATLIHQSITGLYETRIDLSQLGGDGGEAAAKEAAAKEAAAKEAAAKEAAAKEAAAKGGGRDIMKDIKVRLMTDSPDDSQDLMIGAIESNLFADQISWKSDQPVWLNQWPLKQEKLQALQQLVTEQLQLGHLEESNSPWNTPVFVIKKKSGKWRLLQDLRAVNATMHDMGALQPGLPSPVAVPKGWEIIIIDLQDCFFNIKLHPEDCKRFAFSVPSPNFKRPYQRFQWKVLPQGMKNSPTLCQKFVDKAILTVRDKYQDSYIVHYMDDILLAHPSRSIVDEILTSMIQALNKHGLVVSTEKIQKYDNLKYLGTHIQGDSVSYQKLQIRTDKLRTLNDFQKLLGNINWIRPFLKLTTGELKPLFEILNGDSNPISTRKLTPEACKALQLMNERLSTARVKRLDLSQPWSLCILKTEYTPTACLWQDGVVEWIHLPHISPKVITPYDIFCTQLIIKGRHRSKELFSKDPDYIVVPYTKVQFDLLLQEKEDWPISLLGFLGEVHFHLPKDPLLTFTLQTAIIFPHMTSTTPLEKGIVIFTDGSANGRSVTYIQGREPIIKENTQNTAQQAEIVAVITAFEEVSQPFNLYTDSKYVTGLFPEIETATLSPRTKIYTELKHLQRLIHKRQEKFYIGHIRGHTGLPGPLAQGNAYADSLTRILTAGKRTADGSEFEKRTADGSEFESPKKKAKVE

SEQ ID NO: 3295 - protein, 2046 aa, synthetic construct; identical to SEQ ID NO: 3238

SEQ ID NO: 3296 - protein, 2028 aa, synthetic construct; identical to SEQ ID NO: 3201

SEQ ID NO: 3297 - protein, 2031 aa, synthetic construct
MPAAKRVKLDGGDKKYSIGLDIGTNSVGWAVITDEYKVPSKKFKVLGNTDRHSIKKNLIGALLFDSGETAEATRLKRTARRRYTRRKNRICYLQEIFSNEMAKVDDSFFHRLEESFLVEEDKKHERHPIFGNIVDEVAYHEKYPTIYHLRKKLVDSTDKADLRLIYLALAHMIKFRGHFLIEGDLNPDNSDVDKLFIQLVQTYNQLFEENPINASGVDAKAILSARLSKSRRLENLIAQLPGEKKNGLFGNLIALSLGLTPNFKSNFDLAEDAKLQLSKDTYDDDLDNLLAQIGDQYADLFLAAKNLSDAILLSDILRVNTEITKAPLSASMIKRYDEHHQDLTLLKALVRQQLPEKYKEIFFDQSKNGYAGYIDGGASQEEFYKFIKPILEKMDGTEELLVKLNREDLLRKQRTFDNGSIPHQIHLGELHAILRRQEDFYPFLKDNREKIEKILTFRIPYYVGPLARGNSRFAWMTRKSEETITPWNFEEVVDKGASAQSFIERMTNFDKNLPNEKVLPKHSLLYEYFTVYNELTKVKYVTEGMRKPAFLSGEQKKAIVDLLFKTNRKVTVKQLKEDYFKKIECFDSVEISGVEDRFNASLGTYHDLLKIIKDKDFLDNEENEDILEDIVLTLTLFEDREMIEERLKTYAHLFDDKVMKQLKRRRYTGWGRLSRKLINGIRDKQSGKTILDFLKSDGFANRNFMQLIHDDSLTFKEDIQKAQVSGQGDSLHEHIANLAGSPAIKKGILQTVKVVDELVKVMGRHKPENIVIEMARENQTTQKGQKNSRERMKRIEEGIKELGSQILKEHPVENTQLQNEKLYLYYLQNGRDMYVDQELDINRLSDYDVDHIVPQSFLKDDSIDNKVLTRSDKARGKSDNVPSEEVVKKMKNYWRQLLNAKLITQRKFDNLTKAERGGLSELDKAGFIKRQLVETRQITKHVAQILDSRMNTKYDENDKLIREVKVITLKSKLVSDFRKDFQFYKVREINNYHHAHDAYLNAVVGTALIKKYPKLESEFVYGDYKVYDVRKMIAKSEQEIGKATAKYFFYSNIMNFFKTEITLANGEIRKRPLIETNGETGEIVWDKGRDFATVRKVLSMPQVNIVKKTEVQTGGFSKESILPKRNSDKLIARKKDWDPKKYGGFDSPTVAYSVLVVAKVEKGKSKKLKSVKELLGITIMERSSFEKNPIDFLEAKGYKEVKKDLIIKLPKYSLFELENGRKRMLASAGELQKGNELALPSKYVNFLYLASHYEKLKGSPEDNEQKQLFVEQHKHYLDEIIEQISEFSKRVILADANLDKVLSAYNKHRDKPIREQAENIIHLFTLTNLGAPAAFKYFDTTIDRKRYTSTKEVLDATLIHQSITGLYETRIDLSQLGGDGGGSSGSSGSSGSSGSSGSSGGGRDIMKDIKVRLMTDSPDDSQDLMIGAIESNLFADQISWKSDQPVWLNQWPLKQEKLQALQQLVTEQLQLGHLEESNSPWNTPVFVIKKKSGKWRLLQDLRAVNATMHDMGALQPGLPSPVAVPKGWEIIIIDLQDCFFNIKLHPEDCKRFAFSVPSPNFKRPYQRFQWKVLPQGMKNSPTLCQKFVDKAILTVRDKYQDSYIVHYMDDILLAHPSRSIVDEILTSMIQALNKHGLVVSTEKIQKYDNLKYLGTHIQGDSVSYQKLQIRTDKLRTLNDFQKLLGNINWIRPFLKLTTGELKPLFEILNGDSNPISTRKLTPEACKALQLMNERLSTARVKRLDLSQPWSLCILKTEYTPTACLWQDGVVEWIHLPHISPKVITPYDIFCTQLIIKGRHRSKELFSKDPDYIVVPYTKVQFDLLLQEKEDWPISLLGFLGEVHFHLPKDPLLTFTLQTAIIFPHMTSTTPLEKGIVIFTDGSANGRSVTYIQGREPIIKENTQNTAQQAEIVAVITAFEEVSQPFNLYTDSKYVTGLFPEIETATLSPRTKIYTELKHLQRLIHKRQEKFYIGHIRGHTGLPGPLAQGNAYADSLTRILTAGKRTADGSEFEKRTADGSEFESPKKKAKVE

SEQ ID NO: 3298 - protein, 2028 aa, synthetic construct
MPAAKRVKLDGGDKKYSIGLDIGTNSVGWAVITDEYKVPSKKFKVLGNTDRHSIKKNLIGALLFDSGETAEATRLKRTARRRYTRRKNRICYLQEIFSNEMAKVDDSFFHRLEESFLVEEDKKHERHPIFGNIVDEVAYHEKYPTIYHLRKKLVDSTDKADLRLIYLALAHMIKFRGHFLIEGDLNPDNSDVDKLFIQLVQTYNQLFEENPINASGVDAKAILSARLSKSRRLENLIAQLPGEKKNGLFGNLIALSLGLTPNFKSNFDLAEDAKLQLSKDTYDDDLDNLLAQIGDQYADLFLAAKNLSDAILLSDILRVNTEITKAPLSASMIKRYDEHHQDLTLLKALVRQQLPEKYKEIFFDQSKNGYAGYIDGGASQEEFYKFIKPILEKMDGTEELLVKLNREDLLRKQRTFDNGSIPHQIHLGELHAILRRQEDFYPFLKDNREKIEKILTFRIPYYVGPLARGNSRFAWMTRKSEETITPWNFEEVVDKGASAQSFIERMTNFDKNLPNEKVLPKHSLLYEYFTVYNELTKVKYVTEGMRKPAFLSGEQKKAIVDLLFKTNRKVTVKQLKEDYFKKIECFDSVEISGVEDRFNASLGTYHDLLKIIKDKDFLDNEENEDILEDIVLTLTLFEDREMIEERLKTYAHLFDDKVMKQLKRRRYTGWGRLSRKLINGIRDKQSGKTILDFLKSDGFANRNFMQLIHDDSLTFKEDIQKAQVSGQGDSLHEHIANLAGSPAIKKGILQTVKVVDELVKVMGRHKPENIVIEMARENQTTQKGQKNSRERMKRIEEGIKELGSQILKEHPVENTQLQNEKLYLYYLQNGRDMYVDQELDINRLSDYDVDHIVPQSFLKDDSIDNKVLTRSDKARGKSDNVPSEEVVKKMKNYWRQLLNAKLITQRKFDNLTKAERGGLSELDKAGFIKRQLVETRQITKHVAQILDSRMNTKYDENDKLIREVKVITLKSKLVSDFRKDFQFYKVREINNYHHAHDAYLNAVVGTALIKKYPKLESEFVYGDYKVYDVRKMIAKSEQEIGKATAKYFFYSNIMNFFKTEITLANGEIRKRPLIETNGETGEIVWDKGRDFATVRKVLSMPQVNIVKKTEVQTGGFSKESILPKRNSDKLIARKKDWDPKKYGGFDSPTVAYSVLVVAKVEKGKSKKLKSVKELLGITIMERSSFEKNPIDFLEAKGYKEVKKDLIIKLPKYSLFELENGRKRMLASAGELQKGNELALPSKYVNFLYLASHYEKLKGSPEDNEQKQLFVEQHKHYLDEIIEQISEFSKRVILADANLDKVLSAYNKHRDKPIREQAENIIHLFTLTNLGAPAAFKYFDTTIDRKRYTSTKEVLDATLIHQSITGLYETRIDLSQLGGDGGGGGGSEAAAKGGGGSGGGRDIMKDIKVRLMTDSPDDSQDLMIGAIESNLFADQISWKSDQPVWLNQWPLKQEKLQALQQLVTEQLQLGHLEESNSPWNTPVFVIKKKSGKWRLLQDLRAVNATMHDMGALQPGLPSPVAVPKGWEIIIIDLQDCFFNIKLHPEDCKRFAFSVPSPNFKRPYQRFQWKVLPQGMKNSPTLCQKFVDKAILTVRDKYQDSYIVHYMDDILLAHPSRSIVDEILTSMIQALNKHGLVVSTEKIQKYDNLKYLGTHIQGDSVSYQKLQIRTDKLRTLNDFQKLLGNINWIRPFLKLTTGELKPLFEILNGDSNPISTRKLTPEACKALQLMNERLSTARVKRLDLSQPWSLCILKTEYTPTACLWQDGVVEWIHLPHISPKVITPYDIFCTQLIIKGRHRSKELFSKDPDYIVVPYTKVQFDLLLQEKEDWPISLLGFLGEVHFHLPKDPLLTFTLQTAIIFPHMTSTTPLEKGIVIFTDGSANGRSVTYIQGREPIIKENTQNTAQQAEIVAVITAFEEVSQPFNLYTDSKYVTGLFPEIETATLSPRTKIYTELKHLQRLIHKRQEKFYIGHIRGHTGLPGPLAQGNAYADSLTRILTAGKRTADGSEFEKRTADGSEFESPKKKAKVE

SEQ ID NO: 3299 - protein, 2028 aa, synthetic construct
MPAAKRVKLDGGDKKYSIGLDIGTNSVGWAVITDEYKVPSKKFKVLGNTDRHSIKKNLIGALLFDSGETAEATRLKRTARRRYTRRKNRICYLQEIFSNEMAKVDDSFFHRLEESFLVEEDKKHERHPIFGNIVDEVAYHEKYPTIYHLRKKLVDSTDKADLRLIYLALAHMIKFRGHFLIEGDLNPDNSDVDKLFIQLVQTYNQLFEENPINASGVDAKAILSARLSKSRRLENLIAQLPGEKKNGLFGNLIALSLGLTPNFKSNFDLAEDAKLQLSKDTYDDDLDNLLAQIGDQYADLFLAAKNLSDAILLSDILRVNTEITKAPLSASMIKRYDEHHQDLTLLKALVRQQLPEKYKEIFFDQSKNGYAGYIDGGASQEEFYKFIKPILEKMDGTEELLVKLNREDLLRKQRTFDNGSIPHQIHLGELHAILRRQEDFYPFLKDNREKIEKILTFRIPYYVGPLARGNSRFAWMTRKSEETITPWNFEEVVDKGASAQSFIERMTNFDKNLPNEKVLPKHSLLYEYFTVYNELTKVKYVTEGMRKPAFLSGEQKKAIVDLLFKTNRKVTVKQLKEDYFKKIECFDSVEISGVEDRFNASLGTYHDLLKIIKDKDFLDNEENEDILEDIVLTLTLFEDREMIEERLKTYAHLFDDKVMKQLKRRRYTGWGRLSRKLINGIRDKQSGKTILDFLKSDGFANRNFMQLIHDDSLTFKEDIQKAQVSGQGDSLHEHIANLAGSPAIKKGILQTVKVVDELVKVMGRHKPENIVIEMARENQTTQKGQKNSRERMKRIEEGIKELGSQILKEHPVENTQLQNEKLYLYYLQNGRDMYVDQELDINRLSDYDVDHIVPQSFLKDDSIDNKVLTRSDKARGKSDNVPSEEVVKKMKNYWRQLLNAKLITQRKFDNLTKAERGGLSELDKAGFIKRQLVETRQITKHVAQILDSRMNTKYDENDKLIREVKVITLKSKLVSDFRKDFQFYKVREINNYHHAHDAYLNAVVGTALIKKYPKLESEFVYGDYKVYDVRKMIAKSEQEIGKATAKYFFYSNIMNFFKTEITLANGEIRKRPLIETNGETGEIVWDKGRDFATVRKVLSMPQVNIVKKTEVQTGGFSKESILPKRNSDKLIARKKDWDPKKYGGFDSPTVAYSVLVVAKVEKGKSKKLKSVKELLGITIMERSSFEKNPIDFLEAKGYKEVKKDLIIKLPKYSLFELENGRKRMLASAGELQKGNELALPSKYVNFLYLASHYEKLKGSPEDNEQKQLFVEQHKHYLDEIIEQISEFSKRVILADANLDKVLSAYNKHRDKPIREQAENIIHLFTLTNLGAPAAFKYFDTTIDRKRYTSTKEVLDATLIHQSITGLYETRIDLSQLGGDGGEAAAKEAAAKEAAAKGGGRDIMKDIKVRLMTDSPDDSQDLMIGAIESNLFADQISWKSDQPVWLNQWPLKQEKLQALQQLVTEQLQLGHLEESNSPWNTPVFVIKKKSGKWRLLQDLRAVNATMHDMGALQPGLPSPVAVPKGWEIIIIDLQDCFFNIKLHPEDCKRFAFSVPSPNFKRPYQRFQWKVLPQGMKNSPTLCQKFVDKAILTVRDKYQDSYIVHYMDDILLAHPSRSIVDEILTSMIQALNKHGLVVSTEKIQKYDNLKYLGTHIQGDSVSYQKLQIRTDKLRTLNDFQKLLGNINWIRPFLKLTTGELKPLFEILNGDSNPISTRKLTPEACKALQLMNERLSTARVKRLDLSQPWSLCILKTEYTPTACLWQDGVVEWIHLPHISPKVITPYDIFCTQLIIKGRHRSKELFSKDPDYIVVPYTKVQFDLLLQEKEDWPISLLGFLGEVHFHLPKDPLLTFTLQTAIIFPHMTSTTPLEKGIVIFTDGSANGRSVTYIQGREPIIKENTQNTAQQAEIVAVITAFEEVSQPFNLYTDSKYVTGLFPEIETATLSPRTKIYTELKHLQRLIHKRQEKFYIGHIRGHTGLPGPLAQGNAYADSLTRILTAGKRTADGSEFEKRTADGSEFESPKKKAKVE

SEQ ID NO: 3300 - protein, 2024 aa, synthetic construct; identical to SEQ ID NO: 3213

SEQ ID NO: 3301 - protein, 2024 aa, synthetic construct
MPAAKRVKLDGGDKKYSIGLDIGTNSVGWAVITDEYKVPSKKFKVLGNTDRHSIKKNLIGALLFDSGETAEATRLKRTARRRYTRRKNRICYLQEIFSNEMAKVDDSFFHRLEESFLVEEDKKHERHPIFGNIVDEVAYHEKYPTIYHLRKKLVDSTDKADLRLIYLALAHMIKFRGHFLIEGDLNPDNSDVDKLFIQLVQTYNQLFEENPINASGVDAKAILSARLSKSRRLENLIAQLPGEKKNGLFGNLIALSLGLTPNFKSNFDLAEDAKLQLSKDTYDDDLDNLLAQIGDQYADLFLAAKNLSDAILLSDILRVNTEITKAPLSASMIKRYDEHHQDLTLLKALVRQQLPEKYKEIFFDQSKNGYAGYIDGGASQEEFYKFIKPILEKMDGTEELLVKLNREDLLRKQRTFDNGSIPHQIHLGELHAILRRQEDFYPFLKDNREKIEKILTFRIPYYVGPLARGNSRFAWMTRKSEETITPWNFEEVVDKGASAQSFIERMTNFDKNLPNEKVLPKHSLLYEYFTVYNELTKVKYVTEGMRKPAFLSGEQKKAIVDLLFKTNRKVTVKQLKEDYFKKIECFDSVEISGVEDRFNASLGTYHDLLKIIKDKDFLDNEENEDILEDIVLTLTLFEDREMIEERLKTYAHLFDDKVMKQLKRRRYTGWGRLSRKLINGIRDKQSGKTILDFLKSDGFANRNFMQLIHDDSLTFKEDIQKAQVSGQGDSLHEHIANLAGSPAIKKGILQTVKVVDELVKVMGRHKPENIVIEMARENQTTQKGQKNSRERMKRIEEGIKELGSQILKEHPVENTQLQNEKLYLYYLQNGRDMYVDQELDINRLSDYDVDHIVPQSFLKDDSIDNKVLTRSDKARGKSDNVPSEEVVKKMKNYWRQLLNAKLITQRKFDNLTKAERGGLSELDKAGFIKRQLVETRQITKHVAQILDSRMNTKYDENDKLIREVKVITLKSKLVSDFRKDFQFYKVREINNYHHAHDAYLNAVVGTALIKKYPKLESEFVYGDYKVYDVRKMIAKSEQEIGKATAKYFFYSNIMNFFKTEITLANGEIRKRPLIETNGETGEIVWDKGRDFATVRKVLSMPQVNIVKKTEVQTGGFSKESILPKRNSDKLIARKKDWDPKKYGGFDSPTVAYSVLVVAKVEKGKSKKLKSVKELLGITIMERSSFEKNPIDFLEAKGYKEVKKDLIIKLPKYSLFELENGRKRMLASAGELQKGNELALPSKYVNFLYLASHYEKLKGSPEDNEQKQLFVEQHKHYLDEIIEQISEFSKRVILADANLDKVLSAYNKHRDKPIREQAENIIHLFTLTNLGAPAAFKYFDTTIDRKRYTSTKEVLDATLIHQSITGLYETRIDLSQLGGDGGEAAAKGSSGGSGGGRDIMKDIKVRLMTDSPDDSQDLMIGAIESNLFADQISWKSDQPVWLNQWPLKQEKLQALQQLVTEQLQLGHLEESNSPWNTPVFVIKKKSGKWRLLQDLRAVNATMHDMGALQPGLPSPVAVPKGWEIIIIDLQDCFFNIKLHPEDCKRFAFSVPSPNFKRPYQRFQWKVLPQGMKNSPTLCQKFVDKAILTVRDKYQDSYIVHYMDDILLAHPSRSIVDEILTSMIQALNKHGLVVSTEKIQKYDNLKYLGTHIQGDSVSYQKLQIRTDKLRTLNDFQKLLGNINWIRPFLKLTTGELKPLFEILNGDSNPISTRKLTPEACKALQLMNERLSTARVKRLDLSQPWSLCILKTEYTPTACLWQDGVVEWIHLPHISPKVITPYDIFCTQLIIKGRHRSKELFSKDPDYIVVPYTKVQFDLLLQEKEDWPISLLGFLGEVHFHLPKDPLLTFTLQTAIIFPHMTSTTPLEKGIVIFTDGSANGRSVTYIQGREPIIKENTQNTAQQAEIVAVITAFEEVSQPFNLYTDSKYVTGLFPEIETATLSPRTKIYTELKHLQRLIHKRQEKFYIGHIRGHTGLPGPLAQGNAYADSLTRILTAGKRTADGSEFEKRTADGSEFESPKKKAKVE

SEQ ID NO: 3302 - protein, 2028 aa, synthetic construct
MPAAKRVKLDGGDKKYSIGLDIGTNSVGWAVITDEYKVPSKKFKVLGNTDRHSIKKNLIGALLFDSGETAEATRLKRTARRRYTRRKNRICYLQEIFSNEMAKVDDSFFHRLEESFLVEEDKKHERHPIFGNIVDEVAYHEKYPTIYHLRKKLVDSTDKADLRLIYLALAHMIKFRGHFLIEGDLNPDNSDVDKLFIQLVQTYNQLFEENPINASGVDAKAILSARLSKSRRLENLIAQLPGEKKNGLFGNLIALSLGLTPNFKSNFDLAEDAKLQLSKDTYDDDLDNLLAQIGDQYADLFLAAKNLSDAILLSDILRVNTEITKAPLSASMIKRYDEHHQDLTLLKALVRQQLPEKYKEIFFDQSKNGYAGYIDGGASQEEFYKFIKPILEKMDGTEELLVKLNREDLLRKQRTFDNGSIPHQIHLGELHAILRRQEDFYPFLKDNREKIEKILTFRIPYYVGPLARGNSRFAWMTRKSEETITPWNFEEVVDKGASAQSFIERMTNFDKNLPNEKVLPKHSLLYEYFTVYNELTKVKYVTEGMRKPAFLSGEQKKAIVDLLFKTNRKVTVKQLKEDYFKKIECFDSVEISGVEDRFNASLGTYHDLLKIIKDKDFLDNEENEDILEDIVLTLTLFEDREMIEERLKTYAHLFDDKVMKQLKRRRYTGWGRLSRKLINGIRDKQSGKTILDFLKSDGFANRNFMQLIHDDSLTFKEDIQKAQVSGQGDSLHEHIANLAGSPAIKKGILQTVKVVDELVKVMGRHKPENIVIEMARENQTTQKGQKNSRERMKRIEEGIKELGSQILKEHPVENTQLQNEKLYLYYLQNGRDMYVDQELDINRLSDYDVDHIVPQSFLKDDSIDNKVLTRSDKARGKSDNVPSEEVVKKMKNYWRQLLNAKLITQRKFDNLTKAERGGLSELDKAGFIKRQLVETRQITKHVAQILDSRMNTKYDENDKLIREVKVITLKSKLVSDFRKDFQFYKVREINNYHHAHDAYLNAVVGTALIKKYPKLESEFVYGDYKVYDVRKMIAKSEQEIGKATAKYFFYSNIMNFFKTEITLANGEIRKRPLIETNGETGEIVWDKGRDFATVRKVLSMPQVNIVKKTEVQTGGFSKESILPKRNSDKLIARKKDWDPKKYGGFDSPTVAYSVLVVAKVEKGKSKKLKSVKELLGITIMERSSFEKNPIDFLEAKGYKEVKKDLIIKLPKYSLFELENGRKRMLASAGELQKGNELALPSKYVNFLYLASHYEKLKGSPEDNEQKQLFVEQHKHYLDEIIEQISEFSKRVILADANLDKVLSAYNKHRDKPIREQAENIIHLFTLTNLGAPAAFKYFDTTIDRKRYTSTKEVLDATLIHQSITGLYETRIDLSQLGGDGGGGSGGSGGSGGSGGSGGGRDIMKDIKVRLMTDSPDDSQDLMIGAIESNLFADQISWKSDQPVWLNQWPLKQEKLQALQQLVTEQLQLGHLEESNSPWNTPVFVIKKKSGKWRLLQDLRAVNATMHDMGALQPGLPSPVAVPKGWEIIIIDLQDCFFNIKLHPEDCKRFAFSVPSPNFKRPYQRFQWKVLPQGMKNSPTLCQKFVDKAILTVRDKYQDSYIVHYMDDILLAHPSRSIVDEILTSMIQALNKHGLVVSTEKIQKYDNLKYLGTHIQGDSVSYQKLQIRTDKLRTLNDFQKLLGNINWIRPFLKLTTGELKPLFEILNGDSNPISTRKLTPEACKALQLMNERLSTARVKRLDLSQPWSLCILKTEYTPTACLWQDGVVEWIHLPHISPKVITPYDIFCTQLIIKGRHRSKELFSKDPDYIVVPYTKVQFDLLLQEKEDWPISLLGFLGEVHFHLPKDPLLTFTLQTAIIFPHMTSTTPLEKGIVIFTDGSANGRSVTYIQGREPIIKENTQNTAQQAEIVAVITAFEEVSQPFNLYTDSKYVTGLFPEIETATLSPRTKIYTELKHLQRLIHKRQEKFYIGHIRGHTGLPGPLAQGNAYADSLTRILTAGKRTADGSEFEKRTADGSEFESPKKKAKVE

SEQ ID NO: 3303 - protein, 2028 aa, synthetic construct
MPAAKRVKLDGGDKKYSIGLDIGTNSVGWAVITDEYKVPSKKFKVLGNTDRHSIKKNLIGALLFDSGETAEATRLKRTARRRYTRRKNRICYLQEIFSNEMAKVDDSFFHRLEESFLVEEDKKHERHPIFGNIVDEVAYHEKYPTIYHLRKKLVDSTDKADLRLIYLALAHMIKFRGHFLIEGDLNPDNSDVDKLFIQLVQTYNQLFEENPINASGVDAKAILSARLSKSRRLENLIAQLPGEKKNGLFGNLIALSLGLTPNFKSNFDLAEDAKLQLSKDTYDDDLDNLLAQIGDQYADLFLAAKNLSDAILLSDILRVNTEITKAPLSASMIKRYDEHHQDLTLLKALVRQQLPEKYKEIFFDQSKNGYAGYIDGGASQEEFYKFIKPILEKMDGTEELLVKLNREDLLRKQRTFDNGSIPHQIHLGELHAILRRQEDFYPFLKDNREKIEKILTFRIPYYVGPLARGNSRFAWMTRKSEETITPWNFEEVVDKGASAQSFIERMTNFDKNLPNEKVLPKHSLLYEYFTVYNELTKVKYVTEGMRKPAFLSGEQKKAIVDLLFKTNRKVTVKQLKEDYFKKIECFDSVEISGVEDRFNASLGTYHDLLKIIKDKDFLDNEENEDILEDIVLTLTLFEDREMIEERLKTYAHLFDDKVMKQLKRRRYTGWGRLSRKLINGIRDKQSGKTILDFLKSDGFANRNFMQLIHDDSLTFKEDIQKAQVSGQGDSLHEHIANLAGSPAIKKGILQTVKVVDELVKVMGRHKPENIVIEMARENQTTQKGQKNSRERMKRIEEGIKELGSQILKEHPVENTQLQNEKLYLYYLQNGRDMYVDQELDINRLSDYDVDHIVPQSFLKDDSIDNKVLTRSDKARGKSDNVPSEEVVKKMKNYWRQLLNAKLITQRKFDNLTKAERGGLSELDKAGFIKRQLVETRQITKHVAQILDSRMNTKYDENDKLIREVKVITLKSKLVSDFRKDFQFYKVREINNYHHAHDAYLNAVVGTALIKKYPKLESEFVYGDYKVYDVRKMIAKSEQEIGKATAKYFFYSNIMNFFKTEITLANGEIRKRPLIETNGETGEIVWDKGRDFATVRKVLSMPQVNIVKKTEVQTGGFSKESILPKRNSDKLIARKKDWDPKKYGGFDSPTVAYSVLVVAKVEKGKSKKLKSVKELLGITIMERSSFEKNPIDFLEAKGYKEVKKDLIIKLPKYSLFELENGRKRMLASAGELQKGNELALPSKYVNFLYLASHYEKLKGSPEDNEQKQLFVEQHKHYLDEIIEQISEFSKRVILADANLDKVLSAYNKHRDKPIREQAENIIHLFTLTNLGAPAAFKYFDTTIDRKRYTSTKEVLDATLIHQSITGLYETRIDLSQLGGDGGGSSGSSGSSGSSGSSGGGRDIMKDIKVRLMTDSPDDSQDLMIGAIESNLFADQISWKSDQPVWLNQWPLKQEKLQALQQLVTEQLQLGHLEESNSPWNTPVFVIKKKSGKWRLLQDLRAVNATMHDMGALQPGLPSPVAVPKGWEIIIIDLQDCFFNIKLHPEDCKRFAFSVPSPNFKRPYQRFQWKVLPQGMKNSPTLCQKFVDKAILTVRDKYQDSYIVHYMDDILLAHPSRSIVDEILTSMIQALNKHGLVVSTEKIQKYDNLKYLGTHIQGDSVSYQKLQIRTDKLRTLNDFQKLLGNINWIRPFLKLTTGELKPLFEILNGDSNPISTRKLTPEACKALQLMNERLSTARVKRLDLSQPWSLCILKTEYTPTACLWQDGVVEWIHLPHISPKVITPYDIFCTQLIIKGRHRSKELFSKDPDYIVVPYTKVQFDLLLQEKEDWPISLLGFLGEVHFHLPKDPLLTFTLQTAIIFPHMTSTTPLEKGIVIFTDGSANGRSVTYIQGREPIIKENTQNTAQQAEIVAVITAFEEVSQPFNLYTDSKYVTGLFPEIETATLSPRTKIYTELKHLQRLIHKRQEKFYIGHIRGHTGLPGPLAQGNAYADSLTRILTAGKRTADGSEFEKRTADGSEFESPKKKAKVE

SEQ ID NO: 3304 - protein, 2022 aa, synthetic construct; identical to SEQ ID NO: 3221

SEQ ID NO: 3305 - protein, 2022 aa, synthetic construct
MPAAKRVKLDGGDKKYSIGLDIGTNSVGWAVITDEYKVPSKKFKVLGNTDRHSIKKNLIGALLFDSGETAEATRLKRTARRRYTRRKNRICYLQEIFSNEMAKVDDSFFHRLEESFLVEEDKKHERHPIFGNIVDEVAYHEKYPTIYHLRKKLVDSTDKADLRLIYLALAHMIKFRGHFLIEGDLNPDNSDVDKLFIQLVQTYNQLFEENPINASGVDAKAILSARLSKSRRLENLIAQLPGEKKNGLFGNLIALSLGLTPNFKSNFDLAEDAKLQLSKDTYDDDLDNLLAQIGDQYADLFLAAKNLSDAILLSDILRVNTEITKAPLSASMIKRYDEHHQDLTLLKALVRQQLPEKYKEIFFDQSKNGYAGYIDGGASQEEFYKFIKPILEKMDGTEELLVKLNREDLLRKQRTFDNGSIPHQIHLGELHAILRRQEDFYPFLKDNREKIEKILTFRIPYYVGPLARGNSRFAWMTRKSEETITPWNFEEVVDKGASAQSFIERMTNFDKNLPNEKVLPKHSLLYEYFTVYNELTKVKYVTEGMRKPAFLSGEQKKAIVDLLFKTNRKVTVKQLKEDYFKKIECFDSVEISGVEDRFNASLGTYHDLLKIIKDKDFLDNEENEDILEDIVLTLTLFEDREMIEERLKTYAHLFDDKVMKQLKRRRYTGWGRLSRKLINGIRDKQSGKTILDFLKSDGFANRNFMQLIHDDSLTFKEDIQKAQVSGQGDSLHEHIANLAGSPAIKKGILQTVKVVDELVKVMGRHKPENIVIEMARENQTTQKGQKNSRERMKRIEEGIKELGSQILKEHPVENTQLQNEKLYLYYLQNGRDMYVDQELDINRLSDYDVDHIVPQSFLKDDSIDNKVLTRSDKARGKSDNVPSEEVVKKMKNYWRQLLNAKLITQRKFDNLTKAERGGLSELDKAGFIKRQLVETRQITKHVAQILDSRMNTKYDENDKLIREVKVITLKSKLVSDFRKDFQFYKVREINNYHHAHDAYLNAVVGTALIKKYPKLESEFVYGDYKVYDVRKMIAKSEQEIGKATAKYFFYSNIMNFFKTEITLANGEIRKRPLIETNGETGEIVWDKGRDFATVRKVLSMPQVNIVKKTEVQTGGFSKESILPKRNSDKLIARKKDWDPKKYGGFDSPTVAYSVLVVAKVEKGKSKKLKSVKELLGITIMERSSFEKNPIDFLEAKGYKEVKKDLIIKLPKYSLFELENGRKRMLASAGELQKGNELALPSKYVNFLYLASHYEKLKGSPEDNEQKQLFVEQHKHYLDEIIEQISEFSKRVILADANLDKVLSAYNKHRDKPIREQAENIIHLFTLTNLGAPAAFKYFDTTIDRKRYTSTKEVLDATLIHQSITGLYETRIDLSQLGGDGGGSSGGSPAPGGGRDIMKDIKVRLMTDSPDDSQDLMIGAIESNLFADQISWKSDQPVWLNQWPLKQEKLQALQQLVTEQLQLGHLEESNSPWNTPVFVIKKKSGKWRLLQDLRAVNATMHDMGALQPGLPSPVAVPKGWEIIIIDLQDCFFNIKLHPEDCKRFAFSVPSPNFKRPYQRFQWKVLPQGMKNSPTLCQKFVDKAILTVRDKYQDSYIVHYMDDILLAHPSRSIVDEILTSMIQALNKHGLVVSTEKIQKYDNLKYLGTHIQGDSVSYQKLQIRTDKLRTLNDFQKLLGNINWIRPFLKLTTGELKPLFEILNGDSNPISTRKLTPEACKALQLMNERLSTARVKRLDLSQPWSLCILKTEYTPTACLWQDGVVEWIHLPHISPKVITPYDIFCTQLIIKGRHRSKELFSKDPDYIVVPYTKVQFDLLLQEKEDWPISLLGFLGEVHFHLPKDPLLTFTLQTAIIFPHMTSTTPLEKGIVIFTDGSANGRSVTYIQGREPIIKENTQNTAQQAEIVAVITAFEEVSQPFNLYTDSKYVTGLFPEIETATLSPRTKIYTELKHLQRLIHKRQEKFYIGHIRGHTGLPGPLAQGNAYADSLTRILTAGKRTADGSEFEKRTADGSEFESPKKKAKVE

SEQ ID NO: 3306 - protein, 2024 aa, synthetic construct
MPAAKRVKLDGGDKKYSIGLDIGTNSVGWAVITDEYKVPSKKFKVLGNTDRHSIKKNLIGALLFDSGETAEATRLKRTARRRYTRRKNRICYLQEIFSNEMAKVDDSFFHRLEESFLVEEDKKHERHPIFGNIVDEVAYHEKYPTIYHLRKKLVDSTDKADLRLIYLALAHMIKFRGHFLIEGDLNPDNSDVDKLFIQLVQTYNQLFEENPINASGVDAKAILSARLSKSRRLENLIAQLPGEKKNGLFGNLIALSLGLTPNFKSNFDLAEDAKLQLSKDTYDDDLDNLLAQIGDQYADLFLAAKNLSDAILLSDILRVNTEITKAPLSASMIKRYDEHHQDLTLLKALVRQQLPEKYKEIFFDQSKNGYAGYIDGGASQEEFYKFIKPILEKMDGTEELLVKLNREDLLRKQRTFDNGSIPHQIHLGELHAILRRQEDFYPFLKDNREKIEKILTFRIPYYVGPLARGNSRFAWMTRKSEETITPWNFEEVVDKGASAQSFIERMTNFDKNLPNEKVLPKHSLLYEYFTVYNELTKVKYVTEGMRKPAFLSGEQKKAIVDLLFKTNRKVTVKQLKEDYFKKIECFDSVEISGVEDRFNASLGTYHDLLKIIKDKDFLDNEENEDILEDIVLTLTLFEDREMIEERLKTYAHLFDDKVMKQLKRRRYTGWGRLSRKLINGIRDKQSGKTILDFLKSDGFANRNFMQLIHDDSLTFKEDIQKAQVSGQGDSLHEHIANLAGSPAIKKGILQTVKVVDELVKVMGRHKPENIVIEMARENQTTQKGQKNSRERMKRIEEGIKELGSQILKEHPVENTQLQNEKLYLYYLQNGRDMYVDQELDINRLSDYDVDHIVPQSFLKDDSIDNKVLTRSDKARGKSDNVPSEEVVKKMKNYWRQLLNAKLITQRKFDNLTKAERGGLSELDKAGFIKRQLVETRQITKHVAQILDSRMNTKYDENDKLIREVKVITLKSKLVSDFRKDFQFYKVREINNYHHAHDAYLNAVVGTALIKKYPKLESEFVYGDYKVYDVRKMIAKSEQEIGKATAKYFFYSNIMNFFKTEITLANGEIRKRPLIETNGETGEIVWDKGRDFATVRKVLSMPQVNIVKKTEVQTGGFSKESILPKRNSDKLIARKKDWDPKKYGGFDSPTVAYSVLVVAKVEKGKSKKLKSVKELLGITIMERSSFEKNPIDFLEAKGYKEVKKDLIIKLPKYSLFELENGRKRMLASAGELQKGNELALPSKYVNFLYLASHYEKLKGSPEDNEQKQLFVEQHKHYLDEIIEQISEFSKRVILADANLDKVLSAYNKHRDKPIREQAENIIHLFTLTNLGAPAAFKYFDTTIDRKRYTSTKEVLDATLIHQSITGLYETRIDLSQLGGDGGEAAAKGGGGSSGGGRDIMKDIKVRLMTDSPDDSQDLMIGAIESNLFADQISWKSDQPVWLNQWPLKQEKLQALQQLVTEQLQLGHLEESNSPWNTPVFVIKKKSGKWRLLQDLRAVNATMHDMGALQPGLPSPVAVPKGWEIIIIDLQDCFFNIKLHPEDCKRFAFSVPSPNFKRPYQRFQWKVLPQGMKNSPTLCQKFVDKAILTVRDKYQDSYIVHYMDDILLAHPSRSIVDEILTSMIQALNKHGLVVSTEKIQKYDNLKYLGTHIQGDSVSYQKLQIRTDKLRTLNDFQKLLGNINWIRPFLKLTTGELKPLFEILNGDSNPISTRKLTPEACKALQLMNERLSTARVKRLDLSQPWSLCILKTEYTPTACLWQDGVVEWIHLPHISPKVITPYDIFCTQLIIKGRHRSKELFSKDPDYIVVPYTKVQFDLLLQEKEDWPISLLGFLGEVHFHLPKDPLLTFTLQTAIIFPHMTSTTPLEKGIVIFTDGSANGRSVTYIQGREPIIKENTQNTAQQAEIVAVITAFEEVSQPFNLYTDSKYVTGLFPEIETATLSPRTKIYTELKHLQRLIHKRQEKFYIGHIRGHTGLPGPLAQGNAYADSLTRILTAGKRTADGSEFEKRTADGSEFESPKKKAKVE

SEQ ID NO: 3307 - protein, 2021 aa, synthetic construct
MPAAKRVKLDGGDKKYSIGLDIGTNSVGWAVITDEYKVPSKKFKVLGNTDRHSIKKNLIGALLFDSGETAEATRLKRTARRRYTRRKNRICYLQEIFSNEMAKVDDSFFHRLEESFLVEEDKKHERHPIFGNIVDEVAYHEKYPTIYHLRKKLVDSTDKADLRLIYLALAHMIKFRGHFLIEGDLNPDNSDVDKLFIQLVQTYNQLFEENPINASGVDAKAILSARLSKSRRLENLIAQLPGEKKNGLFGNLIALSLGLTPNFKSNFDLAEDAKLQLSKDTYDDDLDNLLAQIGDQYADLFLAAKNLSDAILLSDILRVNTEITKAPLSASMIKRYDEHHQDLTLLKALVRQQLPEKYKEIFFDQSKNGYAGYIDGGASQEEFYKFIKPILEKMDGTEELLVKLNREDLLRKQRTFDNGSIPHQIHLGELHAILRRQEDFYPFLKDNREKIEKILTFRIPYYVGPLARGNSRFAWMTRKSEETITPWNFEEVVDKGASAQSFIERMTNFDKNLPNEKVLPKHSLLYEYFTVYNELTKVKYVTEGMRKPAFLSGEQKKAIVDLLFKTNRKVTVKQLKEDYFKKIECFDSVEISGVEDRFNASLGTYHDLLKIIKDKDFLDNEENEDILEDIVLTLTLFEDREMIEERLKTYAHLFDDKVMKQLKRRRYTGWGRLSRKLINGIRDKQSGKTILDFLKSDGFANRNFMQLIHDDSLTFKEDIQKAQVSGQGDSLHEHIANLAGSPAIKKGILQTVKVVDELVKVMGRHKPENIVIEMARENQTTQKGQKNSRERMKRIEEGIKELGSQILKEHPVENTQLQNEKLYLYYLQNGRDMYVDQELDINRLSDYDVDHIVPQSFLKDDSIDNKVLTRSDKARGKSDNVPSEEVVKKMKNYWRQLLNAKLITQRKFDNLTKAERGGLSELDKAGFIKRQLVETRQITKHVAQILDSRMNTKYDENDKLIREVKVITLKSKLVSDFRKDFQFYKVREINNYHHAHDAYLNAVVGTALIKKYPKLESEFVYGDYKVYDVRKMIAKSEQEIGKATAKYFFYSNIMNFFKTEITLANGEIRKRPLIETNGETGEIVWDKGRDFATVRKVLSMPQVNIVKKTEVQTGGFSKESILPKRNSDKLIARKKDWDPKKYGGFDSPTVAYSVLVVAKVEKGKSKKLKSVKELLGITIMERSSFEKNPIDFLEAKGYKEVKKDLIIKLPKYSLFELENGRKRMLASAGELQKGNELALPSKYVNFLYLASHYEKLKGSPEDNEQKQLFVEQHKHYLDEIIEQISEFSKRVILADANLDKVLSAYNKHRDKPIREQAENIIHLFTLTNLGAPAAFKYFDTTIDRKRYTSTKEVLDATLIHQSITGLYETRIDLSQLGGDGGGSSEAAAKGGGRDIMKDIKVRLMTDSPDDSQDLMIGAIESNLFADQISWKSDQPVWLNQWPLKQEKLQALQQLVTEQLQLGHLEESNSPWNTPVFVIKKKSGKWRLLQDLRAVNATMHDMGALQPGLPSPVAVPKGWEIIIIDLQDCFFNIKLHPEDCKRFAFSVPSPNFKRPYQRFQWKVLPQGMKNSPTLCQKFVDKAILTVRDKYQDSYIVHYMDDILLAHPSRSIVDEILTSMIQALNKHGLVVSTEKIQKYDNLKYLGTHIQGDSVSYQKLQIRTDKLRTLNDFQKLLGNINWIRPFLKLTTGELKPLFEILNGDSNPISTRKLTPEACKALQLMNERLSTARVKRLDLSQPWSLCILKTEYTPTACLWQDGVVEWIHLPHISPKVITPYDIFCTQLIIKGRHRSKELFSKDPDYIVVPYTKVQFDLLLQEKEDWPISLLGFLGEVHFHLPKDPLLTFTLQTAIIFPHMTSTTPLEKGIVIFTDGSANGRSVTYIQGREPIIKENTQNTAQQAEIVAVITAFEEVSQPFNLYTDSKYVTGLFPEIETATLSPRTKIYTELKHLQRLIHKRQEKFYIGHIRGHTGLPGPLAQGNAYADSLTRILTAGKRTADGSEFEKRTADGSEFESPKKKAKVE

SEQ ID NO: 3308 - protein, 2022 aa, synthetic construct; identical to SEQ ID NO: 3224

SEQ ID NO: 3309 - protein, 2024 aa, synthetic construct
MPAAKRVKLDGGDKKYSIGLDIGTNSVGWAVITDEYKVPSKKFKVLGNTDRHSIKKNLIGALLFDSGETAEATRLKRTARRRYTRRKNRICYLQEIFSNEMAKVDDSFFHRLEESFLVEEDKKHERHPIFGNIVDEVAYHEKYPTIYHLRKKLVDSTDKADLRLIYLALAHMIKFRGHFLIEGDLNPDNSDVDKLFIQLVQTYNQLFEENPINASGVDAKAILSARLSKSRRLENLIAQLPGEKKNGLFGNLIALSLGLTPNFKSNFDLAEDAKLQLSKDTYDDDLDNLLAQIGDQYADLFLAAKNLSDAILLSDILRVNTEITKAPLSASMIKRYDEHHQDLTLLKALVRQQLPEKYKEIFFDQSKNGYAGYIDGGASQEEFYKFIKPILEKMDGTEELLVKLNREDLLRKQRTFDNGSIPHQIHLGELHAILRRQEDFYPFLKDNREKIEKILTFRIPYYVGPLARGNSRFAWMTRKSEETITPWNFEEVVDKGASAQSFIERMTNFDKNLPNEKVLPKHSLLYEYFTVYNELTKVKYVTEGMRKPAFLSGEQKKAIVDLLFKTNRKVTVKQLKEDYFKKIECFDSVEISGVEDRFNASLGTYHDLLKIIKDKDFLDNEENEDILEDIVLTLTLFEDREMIEERLKTYAHLFDDKVMKQLKRRRYTGWGRLSRKLINGIRDKQSGKTILDFLKSDGFANRNFMQLIHDDSLTFKEDIQKAQVSGQGDSLHEHIANLAGSPAIKKGILQTVKVVDELVKVMGRHKPENIVIEMARENQTTQKGQKNSRERMKRIEEGIKELGSQILKEHPVENTQLQNEKLYLYYLQNGRDMYVDQELDINRLSDYDVDHIVPQSFLKDDSIDNKVLTRSDKARGKSDNVPSEEVVKKMKNYWRQLLNAKLITQRKFDNLTKAERGGLSELDKAGFIKRQLVETRQITKHVAQILDSRMNTKYDENDKLIREVKVITLKSKLVSDFRKDFQFYKVREINNYHHAHDAYLNAVVGTALIKKYPKLESEFVYGDYKVYDVRKMIAKSEQEIGKATAKYFFYSNIMNFFKTEITLANGEIRKRPLIETNGETGEIVWDKGRDFATVRKVLSMPQVNIVKKTEVQTGGFSKESILPKRNSDKLIARKKDWDPKKYGGFDSPTVAYSVLVVAKVEKGKSKKLKSVKELLGITIMERSSFEKNPIDFLEAKGYKEVKKDLIIKLPKYSLFELENGRKRMLASAGELQKGNELALPSKYVNFLYLASHYEKLKGSPEDNEQKQLFVEQHKHYLDEIIEQISEFSKRVILADANLDKVLSAYNKHRDKPIREQAENIIHLFTLTNLGAPAAFKYFDTTIDRKRYTSTKEVLDATLIHQSITGLYETRIDLSQLGGDGGPAPAPAPAPAPGGGRDIMKDIKVRLMTDSPDDSQDLMIGAIESNLFADQISWKSDQPVWLNQWPLKQEKLQALQQLVTEQLQLGHLEESNSPWNTPVFVIKKKSGKWRLLQDLRAVNATMHDMGALQPGLPSPVAVPKGWEIIIIDLQDCFFNIKLHPEDCKRFAFSVPSPNFKRPYQRFQWKVLPQGMKNSPTLCQKFVDKAILTVRDKYQDSYIVHYMDDILLAHPSRSIVDEILTSMIQALNKHGLVVSTEKIQKYDNLKYLGTHIQGDSVSYQKLQIRTDKLRTLNDFQKLLGNINWIRPFLKLTTGELKPLFEILNGDSNPISTRKLTPEACKALQLMNERLSTARVKRLDLSQPWSLCILKTEYTPTACLWQDGVVEWIHLPHISPKVITPYDIFCTQLIIKGRHRSKELFSKDPDYIVVPYTKVQFDLLLQEKEDWPISLLGFLGEVHFHLPKDPLLTFTLQTAIIFPHMTSTTPLEKGIVIFTDGSANGRSVTYIQGREPIIKENTQNTAQQAEIVAVITAFEEVSQPFNLYTDSKYVTGLFPEIETATLSPRTKIYTELKHLQRLIHKRQEKFYIGHIRGHTGLPGPLAQGNAYADSLTRILTAGKRTADGSEFEKRTADGSEFESPKKKAKVE

SEQ ID NO: 3310 - protein, 2024 aa, synthetic construct
MPAAKRVKLDGGDKKYSIGLDIGTNSVGWAVITDEYKVPSKKFKVLGNTDRHSIKKNLIGALLFDSGETAEATRLKRTARRRYTRRKNRICYLQEIFSNEMAKVDDSFFHRLEESFLVEEDKKHERHPIFGNIVDEVAYHEKYPTIYHLRKKLVDSTDKADLRLIYLALAHMIKFRGHFLIEGDLNPDNSDVDKLFIQLVQTYNQLFEENPINASGVDAKAILSARLSKSRRLENLIAQLPGEKKNGLFGNLIALSLGLTPNFKSNFDLAEDAKLQLSKDTYDDDLDNLLAQIGDQYADLFLAAKNLSDAILLSDILRVNTEITKAPLSASMIKRYDEHHQDLTLLKALVRQQLPEKYKEIFFDQSKNGYAGYIDGGASQEEFYKFIKPILEKMDGTEELLVKLNREDLLRKQRTFDNGSIPHQIHLGELHAILRRQEDFYPFLKDNREKIEKILTFRIPYYVGPLARGNSRFAWMTRKSEETITPWNFEEVVDKGASAQSFIERMTNFDKNLPNEKVLPKHSLLYEYFTVYNELTKVKYVTEGMRKPAFLSGEQKKAIVDLLFKTNRKVTVKQLKEDYFKKIECFDSVEISGVEDRFNASLGTYHDLLKIIKDKDFLDNEENEDILEDIVLTLTLFEDREMIEERLKTYAHLFDDKVMKQLKRRRYTGWGRLSRKLINGIRDKQSGKTILDFLKSDGFANRNFMQLIHDDSLTFKEDIQKAQVSGQGDSLHEHIANLAGSPAIKKGILQTVKVVDELVKVMGRHKPENIVIEMARENQTTQKGQKNSRERMKRIEEGIKELGSQILKEHPVENTQLQNEKLYLYYLQNGRDMYVDQELDINRLSDYDVDHIVPQSFLKDDSIDNKVLTRSDKARGKSDNVPSEEVVKKMKNYWRQLLNAKLITQRKFDNLTKAERGGLSELDKAGFIKRQLVETRQITKHVAQILDSRMNTKYDENDKLIREVKVITLKSKLVSDFRKDFQFYKVREINNYHHAHDAYLNAVVGTALIKKYPKLESEFVYGDYKVYDVRKMIAKSEQEIGKATAKYFFYSNIMNFFKTEITLANGEIRKRPLIETNGETGEIVWDKGRDFATVRKVLSMPQVNIVKKTEVQTGGFSKESILPKRNSDKLIARKKDWDPKKYGGFDSPTVAYSVLVVAKVEKGKSKKLKSVKELLGITIMERSSFEKNPIDFLEAKGYKEVKKDLIIKLPKYSLFELENGRKRMLASAGELQKGNELALPSKYVNFLYLASHYEKLKGSPEDNEQKQLFVEQHKHYLDEIIEQISEFSKRVILADANLDKVLSAYNKHRDKPIREQAENIIHLFTLTNLGAPAAFKYFDTTIDRKRYTSTKEVLDATLIHQSITGLYETRIDLSQLGGDGGGSSEAAAKGGSGGGRDIMKDIKVRLMTDSPDDSQDLMIGAIESNLFADQISWKSDQPVWLNQWPLKQEKLQALQQLVTEQLQLGHLEESNSPWNTPVFVIKKKSGKWRLLQDLRAVNATMHDMGALQPGLPSPVAVPKGWEIIIIDLQDCFFNIKLHPEDCKRFAFSVPSPNFKRPYQRFQWKVLPQGMKNSPTLCQKFVDKAILTVRDKYQDSYIVHYMDDILLAHPSRSIVDEILTSMIQALNKHGLVVSTEKIQKYDNLKYLGTHIQGDSVSYQKLQIRTDKLRTLNDFQKLLGNINWIRPFLKLTTGELKPLFEILNGDSNPISTRKLTPEACKALQLMNERLSTARVKRLDLSQPWSLCILKTEYTPTACLWQDGVVEWIHLPHISPKVITPYDIFCTQLIIKGRHRSKELFSKDPDYIVVPYTKVQFDLLLQEKEDWPISLLGFLGEVHFHLPKDPLLTFTLQTAIIFPHMTSTTPLEKGIVIFTDGSANGRSVTYIQGREPIIKENTQNTAQQAEIVAVITAFEEVSQPFNLYTDSKYVTGLFPEIETATLSPRTKIYTELKHLQRLIHKRQEKFYIGHIRGHTGLPGPLAQGNAYADSLTRILTAGKRTADGSEFEKRTADGSEFESPKKKAKVE

SEQ ID NO: 3311 - protein, 2024 aa, synthetic construct
MPAAKRVKLDGGDKKYSIGLDIGTNSVGWAVITDEYKVPSKKFKVLGNTDRHSIKKNLIGALLFDSGETAEATRLKRTARRRYTRRKNRICYLQEIFSNEMAKVDDSFFHRLEESFLVEEDKKHERHPIFGNIVDEVAYHEKYPTIYHLRKKLVDSTDKADLRLIYLALAHMIKFRGHFLIEGDLNPDNSDVDKLFIQLVQTYNQLFEENPINASGVDAKAILSARLSKSRRLENLIAQLPGEKKNGLFGNLIALSLGLTPNFKSNFDLAEDAKLQLSKDTYDDDLDNLLAQIGDQYADLFLAAKNLSDAILLSDILRVNTEITKAPLSASMIKRYDEHHQDLTLLKALVRQQLPEKYKEIFFDQSKNGYAGYIDGGASQEEFYKFIKPILEKMDGTEELLVKLNREDLLRKQRTFDNGSIPHQIHLGELHAILRRQEDFYPFLKDNREKIEKILTFRIPYYVGPLARGNSRFAWMTRKSEETITPWNFEEVVDKGASAQSFIERMTNFDKNLPNEKVLPKHSLLYEYFTVYNELTKVKYVTEGMRKPAFLSGEQKKAIVDLLFKTNRKVTVKQLKEDYFKKIECFDSVEISGVEDRFNASLGTYHDLLKIIKDKDFLDNEENEDILEDIVLTLTLFEDREMIEERLKTYAHLFDDKVMKQLKRRRYTGWGRLSRKLINGIRDKQSGKTILDFLKSDGFANRNFMQLIHDDSLTFKEDIQKAQVSGQGDSLHEHIANLAGSPAIKKGILQTVKVVDELVKVMGRHKPENIVIEMARENQTTQKGQKNSRERMKRIEEGIKELGSQILKEHPVENTQLQNEKLYLYYLQNGRDMYVDQELDINRLSDYDVDHIVPQSFLKDDSIDNKVLTRSDKARGKSDNVPSEEVVKKMKNYWRQLLNAKLITQRKFDNLTKAERGGLSELDKAGFIKRQLVETRQITKHVAQILDSRMNTKYDENDKLIREVKVITLKSKLVSDFRKDFQFYKVREINNYHHAHDAYLNAVVGTALIKKYPKLESEFVYGDYKVYDVRKMIAKSEQEIGKATAKYFFYSNIMNFFKTEITLANGEIRKRPLIETNGETGEIVWDKGRDFATVRKVLSMPQVNIVKKTEVQTGGFSKESILPKRNSDKLIARKKDWDPKKYGGFDSPTVAYSVLVVAKVEKGKSKKLKSVKELLGITIMERSSFEKNPIDFLEAKGYKEVKKDLIIKLPKYSLFELENGRKRMLASAGELQKGNELALPSKYVNFLYLASHYEKLKGSPEDNEQKQLFVEQHKHYLDEIIEQISEFSKRVILADANLDKVLSAYNKHRDKPIREQAENIIHLFTLTNLGAPAAFKYFDTTIDRKRYTSTKEVLDATLIHQSITGLYETRIDLSQLGGDGGGGGGSSEAAAKGGGRDIMKDIKVRLMTDSPDDSQDLMIGAIESNLFADQISWKSDQPVWLNQWPLKQEKLQALQQLVTEQLQLGHLEESNSPWNTPVFVIKKKSGKWRLLQDLRAVNATMHDMGALQPGLPSPVAVPKGWEIIIIDLQDCFFNIKLHPEDCKRFAFSVPSPNFKRPYQRFQWKVLPQGMKNSPTLCQKFVDKAILTVRDKYQDSYIVHYMDDILLAHPSRSIVDEILTSMIQALNKHGLVVSTEKIQKYDNLKYLGTHIQGDSVSYQKLQIRTDKLRTLNDFQKLLGNINWIRPFLKLTTGELKPLFEILNGDSNPISTRKLTPEACKALQLMNERLSTARVKRLDLSQPWSLCILKTEYTPTACLWQDGVVEWIHLPHISPKVITPYDIFCTQLIIKGRHRSKELFSKDPDYIVVPYTKVQFDLLLQEKEDWPISLLGFLGEVHFHLPKDPLLTFTLQTAIIFPHMTSTTPLEKGIVIFTDGSANGRSVTYIQGREPIIKENTQNTAQQAEIVAVITAFEEVSQPFNLYTDSKYVTGLFPEIETATLSPRTKIYTELKHLQRLIHKRQEKFYIGHIRGHTGLPGPLAQGNAYADSLTRILTAGKRTADGSEFEKRTADGSEFESPKKKAKVE

SEQ ID NO: 3312 - protein, 2022 aa, synthetic construct; identical to SEQ ID NO: 3229

SEQ ID NO: 3313 - protein, 2021 aa, synthetic construct; identical to SEQ ID NO: 3208

SEQ ID NO: 3314 - protein, 2024 aa, synthetic construct
MPAAKRVKLDGGDKKYSIGLDIGTNSVGWAVITDEYKVPSKKFKVLGNTDRHSIKKNLIGALLFDSGETAEATRLKRTARRRYTRRKNRICYLQEIFSNEMAKVDDSFFHRLEESFLVEEDKKHERHPIFGNIVDEVAYHEKYPTIYHLRKKLVDSTDKADLRLIYLALAHMIKFRGHFLIEGDLNPDNSDVDKLFIQLVQTYNQLFEENPINASGVDAKAILSARLSKSRRLENLIAQLPGEKKNGLFGNLIALSLGLTPNFKSNFDLAEDAKLQLSKDTYDDDLDNLLAQIGDQYADLFLAAKNLSDAILLSDILRVNTEITKAPLSASMIKRYDEHHQDLTLLKALVRQQLPEKYKEIFFDQSKNGYAGYIDGGASQEEFYKFIKPILEKMDGTEELLVKLNREDLLRKQRTFDNGSIPHQIHLGELHAILRRQEDFYPFLKDNREKIEKILTFRIPYYVGPLARGNSRFAWMTRKSEETITPWNFEEVVDKGASAQSFIERMTNFDKNLPNEKVLPKHSLLYEYFTVYNELTKVKYVTEGMRKPAFLSGEQKKAIVDLLFKTNRKVTVKQLKEDYFKKIECFDSVEISGVEDRFNASLGTYHDLLKIIKDKDFLDNEENEDILEDIVLTLTLFEDREMIEERLKTYAHLFDDKVMKQLKRRRYTGWGRLSRKLINGIRDKQSGKTILDFLKSDGFANRNFMQLIHDDSLTFKEDIQKAQVSGQGDSLHEHIANLAGSPAIKKGILQTVKVVDELVKVMGRHKPENIVIEMARENQTTQKGQKNSRERMKRIEEGIKELGSQILKEHPVENTQLQNEKLYLYYLQNGRDMYVDQELDINRLSDYDVDHIVPQSFLKDDSIDNKVLTRSDKARGKSDNVPSEEVVKKMKNYWRQLLNAKLITQRKFDNLTKAERGGLSELDKAGFIKRQLVETRQITKHVAQILDSRMNTKYDENDKLIREVKVITLKSKLVSDFRKDFQFYKVREINNYHHAHDAYLNAVVGTALIKKYPKLESEFVYGDYKVYDVRKMIAKSEQEIGKATAKYFFYSNIMNFFKTEITLANGEIRKRPLIETNGETGEIVWDKGRDFATVRKVLSMPQVNIVKKTEVQTGGFSKESILPKRNSDKLIARKKDWDPKKYGGFDSPTVAYSVLVVAKVEKGKSKKLKSVKELLGITIMERSSFEKNPIDFLEAKGYKEVKKDLIIKLPKYSLFELENGRKRMLASAGELQKGNELALPSKYVNFLYLASHYEKLKGSPEDNEQKQLFVEQHKHYLDEIIEQISEFSKRVILADANLDKVLSAYNKHRDKPIREQAENIIHLFTLTNLGAPAAFKYFDTTIDRKRYTSTKEVLDATLIHQSITGLYETRIDLSQLGGDGGGSSGGSEAAAKGGGRDIMKDIKVRLMTDSPDDSQDLMIGAIESNLFADQISWKSDQPVWLNQWPLKQEKLQALQQLVTEQLQLGHLEESNSPWNTPVFVIKKKSGKWRLLQDLRAVNATMHDMGALQPGLPSPVAVPKGWEIIIIDLQDCFFNIKLHPEDCKRFAFSVPSPNFKRPYQRFQWKVLPQGMKNSPTLCQKFVDKAILTVRDKYQDSYIVHYMDDILLAHPSRSIVDEILTSMIQALNKHGLVVSTEKIQKYDNLKYLGTHIQGDSVSYQKLQIRTDKLRTLNDFQKLLGNINWIRPFLKLTTGELKPLFEILNGDSNPISTRKLTPEACKALQLMNERLSTARVKRLDLSQPWSLCILKTEYTPTACLWQDGVVEWIHLPHISPKVITPYDIFCTQLIIKGRHRSKELFSKDPDYIVVPYTKVQFDLLLQEKEDWPISLLGFLGEVHFHLPKDPLLTFTLQTAIIFPHMTSTTPLEKGIVIFTDGSANGRSVTYIQGREPIIKENTQNTAQQAEIVAVITAFEEVSQPFNLYTDSKYVTGLFPEIETATLSPRTKIYTELKHLQRLIHKRQEKFYIGHIRGHTGLPGPLAQGNAYADSLTRILTAGKRTADGSEFEKRTADGSEFESPKKKAKVE

SEQ ID NO: 3315 - protein, 2022 aa, synthetic construct; identical to SEQ ID NO: 3199

SEQ ID NO: 3316 - protein, 2022 aa, synthetic construct
MPAAKRVKLDGGDKKYSIGLDIGTNSVGWAVITDEYKVPSKKFKVLGNTDRHSIKKNLIGALLFDSGETAEATRLKRTARRRYTRRKNRICYLQEIFSNEMAKVDDSFFHRLEESFLVEEDKKHERHPIFGNIVDEVAYHEKYPTIYHLRKKLVDSTDKADLRLIYLALAHMIKFRGHFLIEGDLNPDNSDVDKLFIQLVQTYNQLFEENPINASGVDAKAILSARLSKSRRLENLIAQLPGEKKNGLFGNLIALSLGLTPNFKSNFDLAEDAKLQLSKDTYDDDLDNLLAQIGDQYADLFLAAKNLSDAILLSDILRVNTEITKAPLSASMIKRYDEHHQDLTLLKALVRQQLPEKYKEIFFDQSKNGYAGYIDGGASQEEFYKFIKPILEKMDGTEELLVKLNREDLLRKQRTFDNGSIPHQIHLGELHAILRRQEDFYPFLKDNREKIEKILTFRIPYYVGPLARGNSRFAWMTRKSEETITPWNFEEVVDKGASAQSFIERMTNFDKNLPNEKVLPKHSLLYEYFTVYNELTKVKYVTEGMRKPAFLSGEQKKAIVDLLFKTNRKVTVKQLKEDYFKKIECFDSVEISGVEDRFNASLGTYHDLLKIIKDKDFLDNEENEDILEDIVLTLTLFEDREMIEERLKTYAHLFDDKVMKQLKRRRYTGWGRLSRKLINGIRDKQSGKTILDFLKSDGFANRNFMQLIHDDSLTFKEDIQKAQVSGQGDSLHEHIANLAGSPAIKKGILQTVKVVDELVKVMGRHKPENIVIEMARENQTTQKGQKNSRERMKRIEEGIKELGSQILKEHPVENTQLQNEKLYLYYLQNGRDMYVDQELDINRLSDYDVDHIVPQSFLKDDSIDNKVLTRSDKARGKSDNVPSEEVVKKMKNYWRQLLNAKLITQRKFDNLTKAERGGLSELDKAGFIKRQLVETRQITKHVAQILDSRMNTKYDENDKLIREVKVITLKSKLVSDFRKDFQFYKVREINNYHHAHDAYLNAVVGTALIKKYPKLESEFVYGDYKVYDVRKMIAKSEQEIGKATAKYFFYSNIMNFFKTEITLANGEIRKRPLIETNGETGEIVWDKGRDFATVRKVLSMPQVNIVKKTEVQTGGFSKESILPKRNSDKLIARKKDWDPKKYGGFDSPTVAYSVLVVAKVEKGKSKKLKSVKELLGITIMERSSFEKNPIDFLEAKGYKEVKKDLIIKLPKYSLFELENGRKRMLASAGELQKGNELALPSKYVNFLYLASHYEKLKGSPEDNEQKQLFVEQHKHYLDEIIEQISEFSKRVILADANLDKVLSAYNKHRDKPIREQAENIIHLFTLTNLGAPAAFKYFDTTIDRKRYTSTKEVLDATLIHQSITGLYETRIDLSQLGGDGGGGSGGSGGSGGGRDIMKDIKVRLMTDSPDDSQDLMIGAIESNLFADQISWKSDQPVWLNQWPLKQEKLQALQQLVTEQLQLGHLEESNSPWNTPVFVIKKKSGKWRLLQDLRAVNATMHDMGALQPGLPSPVAVPKGWEIIIIDLQDCFFNIKLHPEDCKRFAFSVPSPNFKRPYQRFQWKVLPQGMKNSPTLCQKFVDKAILTVRDKYQDSYIVHYMDDILLAHPSRSIVDEILTSMIQALNKHGLVVSTEKIQKYDNLKYLGTHIQGDSVSYQKLQIRTDKLRTLNDFQKLLGNINWIRPFLKLTTGELKPLFEILNGDSNPISTRKLTPEACKALQLMNERLSTARVKRLDLSQPWSLCILKTEYTPTACLWQDGVVEWIHLPHISPKVITPYDIFCTQLIIKGRHRSKELFSKDPDYIVVPYTKVQFDLLLQEKEDWPISLLGFLGEVHFHLPKDPLLTFTLQTAIIFPHMTSTTPLEKGIVIFTDGSANGRSVTYIQGREPIIKENTQNTAQQAEIVAVITAFEEVSQPFNLYTDSKYVTGLFPEIETATLSPRTKIYTELKHLQRLIHKRQEKFYIGHIRGHTGLPGPLAQGNAYADSLTRILTAGKRTADGSEFEKRTADGSEFESPKKKAKVE

SEQ ID NO: 3317 - protein, 2025 aa, synthetic construct
MPAAKRVKLDGGDKKYSIGLDIGTNSVGWAVITDEYKVPSKKFKVLGNTDRHSIKKNLIGALLFDSGETAEATRLKRTARRRYTRRKNRICYLQEIFSNEMAKVDDSFFHRLEESFLVEEDKKHERHPIFGNIVDEVAYHEKYPTIYHLRKKLVDSTDKADLRLIYLALAHMIKFRGHFLIEGDLNPDNSDVDKLFIQLVQTYNQLFEENPINASGVDAKAILSARLSKSRRLENLIAQLPGEKKNGLFGNLIALSLGLTPNFKSNFDLAEDAKLQLSKDTYDDDLDNLLAQIGDQYADLFLAAKNLSDAILLSDILRVNTEITKAPLSASMIKRYDEHHQDLTLLKALVRQQLPEKYKEIFFDQSKNGYAGYIDGGASQEEFYKFIKPILEKMDGTEELLVKLNREDLLRKQRTFDNGSIPHQIHLGELHAILRRQEDFYPFLKDNREKIEKILTFRIPYYVGPLARGNSRFAWMTRKSEETITPWNFEEVVDKGASAQSFIERMTNFDKNLPNEKVLPKHSLLYEYFTVYNELTKVKYVTEGMRKPAFLSGEQKKAIVDLLFKTNRKVTVKQLKEDYFKKIECFDSVEISGVEDRFNASLGTYHDLLKIIKDKDFLDNEENEDILEDIVLTLTLFEDREMIEERLKTYAHLFDDKVMKQLKRRRYTGWGRLSRKLINGIRDKQSGKTILDFLKSDGFANRNFMQLIHDDSLTFKEDIQKAQVSGQGDSLHEHIANLAGSPAIKKGILQTVKVVDELVKVMGRHKPENIVIEMARENQTTQKGQKNSRERMKRIEEGIKELGSQILKEHPVENTQLQNEKLYLYYLQNGRDMYVDQELDINRLSDYDVDHIVPQSFLKDDSIDNKVLTRSDKARGKSDNVPSEEVVKKMKNYWRQLLNAKLITQRKFDNLTKAERGGLSELDKAGFIKRQLVETRQITKHVAQILDSRMNTKYDENDKLIREVKVITLKSKLVSDFRKDFQFYKVREINNYHHAHDAYLNAVVGTALIKKYPKLESEFVYGDYKVYDVRKMIAKSEQEIGKATAKYFFYSNIMNFFKTEITLANGEIRKRPLIETNGETGEIVWDKGRDFATVRKVLSMPQVNIVKKTEVQTGGFSKESILPKRNSDKLIARKKDWDPKKYGGFDSPTVAYSVLVVAKVEKGKSKKLKSVKELLGITIMERSSFEKNPIDFLEAKGYKEVKKDLIIKLPKYSLFELENGRKRMLASAGELQKGNELALPSKYVNFLYLASHYEKLKGSPEDNEQKQLFVEQHKHYLDEIIEQISEFSKRVILADANLDKVLSAYNKHRDKPIREQAENIIHLFTLTNLGAPAAFKYFDTTIDRKRYTSTKEVLDATLIHQSITGLYETRIDLSQLGGDGGGGSGGSGGSGGSGGGRDIMKDIKVRLMTDSPDDSQDLMIGAIESNLFADQISWKSDQPVWLNQWPLKQEKLQALQQLVTEQLQLGHLEESNSPWNTPVFVIKKKSGKWRLLQDLRAVNATMHDMGALQPGLPSPVAVPKGWEIIIIDLQDCFFNIKLHPEDCKRFAFSVPSPNFKRPYQRFQWKVLPQGMKNSPTLCQKFVDKAILTVRDKYQDSYIVHYMDDILLAHPSRSIVDEILTSMIQALNKHGLVVSTEKIQKYDNLKYLGTHIQGDSVSYQKLQIRTDKLRTLNDFQKLLGNINWIRPFLKLTTGELKPLFEILNGDSNPISTRKLTPEACKALQLMNERLSTARVKRLDLSQPWSLCILKTEYTPTACLWQDGVVEWIHLPHISPKVITPYDIFCTQLIIKGRHRSKELFSKDPDYIVVPYTKVQFDLLLQEKEDWPISLLGFLGEVHFHLPKDPLLTFTLQTAIIFPHMTSTTPLEKGIVIFTDGSANGRSVTYIQGREPIIKENTQNTAQQAEIVAVITAFEEVSQPFNLYTDSKYVTGLFPEIETATLSPRTKIYTELKHLQRLIHKRQEKFYIGHIRGHTGLPGPLAQGNAYADSLTRILTAGKRTADGSEFEKRTADGSEFESPKKKAKVE

SEQ ID NO: 3318 - protein, 2024 aa, synthetic construct; identical to SEQ ID NO: 3207

SEQ ID NO: 3319 - protein, 2016 aa, synthetic construct; identical to SEQ ID NO: 3210

SEQ ID NO: 3320 - protein, 2024 aa, synthetic construct
MPAAKRVKLDGGDKKYSIGLDIGTNSVGWAVITDEYKVPSKKFKVLGNTDRHSIKKNLIGALLFDSGETAEATRLKRTARRRYTRRKNRICYLQEIFSNEMAKVDDSFFHRLEESFLVEEDKKHERHPIFGNIVDEVAYHEKYPTIYHLRKKLVDSTDKADLRLIYLALAHMIKFRGHFLIEGDLNPDNSDVDKLFIQLVQTYNQLFEENPINASGVDAKAILSARLSKSRRLENLIAQLPGEKKNGLFGNLIALSLGLTPNFKSNFDLAEDAKLQLSKDTYDDDLDNLLAQIGDQYADLFLAAKNLSDAILLSDILRVNTEITKAPLSASMIKRYDEHHQDLTLLKALVRQQLPEKYKEIFFDQSKNGYAGYIDGGASQEEFYKFIKPILEKMDGTEELLVKLNREDLLRKQRTFDNGSIPHQIHLGELHAILRRQEDFYPFLKDNREKIEKILTFRIPYYVGPLARGNSRFAWMTRKSEETITPWNFEEVVDKGASAQSFIERMTNFDKNLPNEKVLPKHSLLYEYFTVYNELTKVKYVTEGMRKPAFLSGEQKKAIVDLLFKTNRKVTVKQLKEDYFKKIECFDSVEISGVEDRFNASLGTYHDLLKIIKDKDFLDNEENEDILEDIVLTLTLFEDREMIEERLKTYAHLFDDKVMKQLKRRRYTGWGRLSRKLINGIRDKQSGKTILDFLKSDGFANRNFMQLIHDDSLTFKEDIQKAQVSGQGDSLHEHIANLAGSPAIKKGILQTVKVVDELVKVMGRHKPENIVIEMARENQTTQKGQKNSRERMKRIEEGIKELGSQILKEHPVENTQLQNEKLYLYYLQNGRDMYVDQELDINRLSDYDVDHIVPQSFLKDDSIDNKVLTRSDKARGKSDNVPSEEVVKKMKNYWRQLLNAKLITQRKFDNLTKAERGGLSELDKAGFIKRQLVETRQITKHVAQILDSRMNTKYDENDKLIREVKVITLKSKLVSDFRKDFQFYKVREINNYHHAHDAYLNAVVGTALIKKYPKLESEFVYGDYKVYDVRKMIAKSEQEIGKATAKYFFYSNIMNFFKTEITLANGEIRKRPLIETNGETGEIVWDKGRDFATVRKVLSMPQVNIVKKTEVQTGGFSKESILPKRNSDKLIARKKDWDPKKYGGFDSPTVAYSVLVVAKVEKGKSKKLKSVKELLGITIMERSSFEKNPIDFLEAKGYKEVKKDLIIKLPKYSLFELENGRKRMLASAGELQKGNELALPSKYVNFLYLASHYEKLKGSPEDNEQKQLFVEQHKHYLDEIIEQISEFSKRVILADANLDKVLSAYNKHRDKPIREQAENIIHLFTLTNLGAPAAFKYFDTTIDRKRYTSTKEVLDATLIHQSITGLYETRIDLSQLGGDGGGGSPAPEAAAKGGGRDIMKDIKVRLMTDSPDDSQDLMIGAIESNLFADQISWKSDQPVWLNQWPLKQEKLQALQQLVTEQLQLGHLEESNSPWNTPVFVIKKKSGKWRLLQDLRAVNATMHDMGALQPGLPSPVAVPKGWEIIIIDLQDCFFNIKLHPEDCKRFAFSVPSPNFKRPYQRFQWKVLPQGMKNSPTLCQKFVDKAILTVRDKYQDSYIVHYMDDILLAHPSRSIVDEILTSMIQALNKHGLVVSTEKIQKYDNLKYLGTHIQGDSVSYQKLQIRTDKLRTLNDFQKLLGNINWIRPFLKLTTGELKPLFEILNGDSNPISTRKLTPEACKALQLMNERLSTARVKRLDLSQPWSLCILKTEYTPTACLWQDGVVEWIHLPHISPKVITPYDIFCTQLIIKGRHRSKELFSKDPDYIVVPYTKVQFDLLLQEKEDWPISLLGFLGEVHFHLPKDPLLTFTLQTAIIFPHMTSTTPLEKGIVIFTDGSANGRSVTYIQGREPIIKENTQNTAQQAEIVAVITAFEEVSQPFNLYTDSKYVTGLFPEIETATLSPRTKIYTELKHLQRLIHKRQEKFYIGHIRGHTGLPGPLAQGNAYADSLTRILTAGKRTADGSEFEKRTADGSEFESPKKKAKVE

SEQ ID NO: 3321 - protein, 2022 aa, synthetic construct; identical to SEQ ID NO: 3215

SEQ ID NO: 3322 - protein, 2024 aa, synthetic construct; identical to SEQ ID NO: 3232

SEQ ID NO: 3323 - protein, 2024 aa, synthetic construct; identical to SEQ ID NO: 3235

SEQ ID NO: 3324 - protein, 2024 aa, synthetic construct; identical to SEQ ID NO: 3236

SEQ ID NO: 3325 - protein, 2024 aa, synthetic construct
MPAAKRVKLDGGDKKYSIGLDIGTNSVGWAVITDEYKVPSKKFKVLGNTDRHSIKKNLIGALLFDSGETAEATRLKRTARRRYTRRKNRICYLQEIFSNEMAKVDDSFFHRLEESFLVEEDKKHERHPIFGNIVDEVAYHEKYPTIYHLRKKLVDSTDKADLRLIYLALAHMIKFRGHFLIEGDLNPDNSDVDKLFIQLVQTYNQLFEENPINASGVDAKAILSARLSKSRRLENLIAQLPGEKKNGLFGNLIALSLGLTPNFKSNFDLAEDAKLQLSKDTYDDDLDNLLAQIGDQYADLFLAAKNLSDAILLSDILRVNTEITKAPLSASMIKRYDEHHQDLTLLKALVRQQLPEKYKEIFFDQSKNGYAGYIDGGASQEEFYKFIKPILEKMDGTEELLVKLNREDLLRKQRTFDNGSIPHQIHLGELHAILRRQEDFYPFLKDNREKIEKILTFRIPYYVGPLARGNSRFAWMTRKSEETITPWNFEEVVDKGASAQSFIERMTNFDKNLPNEKVLPKHSLLYEYFTVYNELTKVKYVTEGMRKPAFLSGEQKKAIVDLLFKTNRKVTVKQLKEDYFKKIECFDSVEISGVEDRFNASLGTYHDLLKIIKDKDFLDNEENEDILEDIVLTLTLFEDREMIEERLKTYAHLFDDKVMKQLKRRRYTGWGRLSRKLINGIRDKQSGKTILDFLKSDGFANRNFMQLIHDDSLTFKEDIQKAQVSGQGDSLHEHIANLAGSPAIKKGILQTVKVVDELVKVMGRHKPENIVIEMARENQTTQKGQKNSRERMKRIEEGIKELGSQILKEHPVENTQLQNEKLYLYYLQNGRDMYVDQELDINRLSDYDVDHIVPQSFLKDDSIDNKVLTRSDKARGKSDNVPSEEVVKKMKNYWRQLLNAKLITQRKFDNLTKAERGGLSELDKAGFIKRQLVETRQITKHVAQILDSRMNTKYDENDKLIREVKVITLKSKLVSDFRKDFQFYKVREINNYHHAHDAYLNAVVGTALIKKYPKLESEFVYGDYKVYDVRKMIAKSEQEIGKATAKYFFYSNIMNFFKTEITLANGEIRKRPLIETNGETGEIVWDKGRDFATVRKVLSMPQVNIVKKTEVQTGGFSKESILPKRNSDKLIARKKDWDPKKYGGFDSPTVAYSVLVVAKVEKGKSKKLKSVKELLGITIMERSSFEKNPIDFLEAKGYKEVKKDLIIKLPKYSLFELENGRKRMLASAGELQKGNELALPSKYVNFLYLASHYEKLKGSPEDNEQKQLFVEQHKHYLDEIIEQISEFSKRVILADANLDKVLSAYNKHRDKPIREQAENIIHLFTLTNLGAPAAFKYFDTTIDRKRYTSTKEVLDATLIHQSITGLYETRIDLSQLGGDGGGGGGGSEAAAKGGGRDIMKDIKVRLMTDSPDDSQDLMIGAIESNLFADQISWKSDQPVWLNQWPLKQEKLQALQQLVTEQLQLGHLEESNSPWNTPVFVIKKKSGKWRLLQDLRAVNATMHDMGALQPGLPSPVAVPKGWEIIIIDLQDCFFNIKLHPEDCKRFAFSVPSPNFKRPYQRFQWKVLPQGMKNSPTLCQKFVDKAILTVRDKYQDSYIVHYMDDILLAHPSRSIVDEILTSMIQALNKHGLVVSTEKIQKYDNLKYLGTHIQGDSVSYQKLQIRTDKLRTLNDFQKLLGNINWIRPFLKLTTGELKPLFEILNGDSNPISTRKLTPEACKALQLMNERLSTARVKRLDLSQPWSLCILKTEYTPTACLWQDGVVEWIHLPHISPKVITPYDIFCTQLIIKGRHRSKELFSKDPDYIVVPYTKVQFDLLLQEKEDWPISLLGFLGEVHFHLPKDPLLTFTLQTAIIFPHMTSTTPLEKGIVIFTDGSANGRSVTYIQGREPIIKENTQNTAQQAEIVAVITAFEEVSQPFNLYTDSKYVTGLFPEIETATLSPRTKIYTELKHLQRLIHKRQEKFYIGHIRGHTGLPGPLAQGNAYADSLTRILTAGKRTADGSEFEKRTADGSEFESPKKKAKVE

SEQ ID NO: 3326 - protein, 2024 aa, synthetic construct
MPAAKRVKLDGGDKKYSIGLDIGTNSVGWAVITDEYKVPSKKFKVLGNTDRHSIKKNLIGALLFDSGETAEATRLKRTARRRYTRRKNRICYLQEIFSNEMAKVDDSFFHRLEESFLVEEDKKHERHPIFGNIVDEVAYHEKYPTIYHLRKKLVDSTDKADLRLIYLALAHMIKFRGHFLIEGDLNPDNSDVDKLFIQLVQTYNQLFEENPINASGVDAKAILSARLSKSRRLENLIAQLPGEKKNGLFGNLIALSLGLTPNFKSNFDLAEDAKLQLSKDTYDDDLDNLLAQIGDQYADLFLAAKNLSDAILLSDILRVNTEITKAPLSASMIKRYDEHHQDLTLLKALVRQQLPEKYKEIFFDQSKNGYAGYIDGGASQEEFYKFIKPILEKMDGTEELLVKLNREDLLRKQRTFDNGSIPHQIHLGELHAILRRQEDFYPFLKDNREKIEKILTFRIPYYVGPLARGNSRFAWMTRKSEETITPWNFEEVVDKGASAQSFIERMTNFDKNLPNEKVLPKHSLLYEYFTVYNELTKVKYVTEGMRKPAFLSGEQKKAIVDLLFKTNRKVTVKQLKEDYFKKIECFDSVEISGVEDRFNASLGTYHDLLKIIKDKDFLDNEENEDILEDIVLTLTLFEDREMIEERLKTYAHLFDDKVMKQLKRRRYTGWGRLSRKLINGIRDKQSGKTILDFLKSDGFANRNFMQLIHDDSLTFKEDIQKAQVSGQGDSLHEHIANLAGSPAIKKGILQTVKVVDELVKVMGRHKPENIVIEMARENQTTQKGQKNSRERMKRIEEGIKELGSQILKEHPVENTQLQNEKLYLYYLQNGRDMYVDQELDINRLSDYDVDHIVPQSFLKDDSIDNKVLTRSDKARGKSDNVPSEEVVKKMKNYWRQLLNAKLITQRKFDNLTKAERGGLSELDKAGFIKRQLVETRQITKHVAQILDSRMNTKYDENDKLIREVKVITLKSKLVSDFRKDFQFYKVREINNYHHAHDAYLNAVVGTALIKKYPKLESEFVYGDYKVYDVRKMIAKSEQEIGKATAKYFFYSNIMNFFKTEITLANGEIRKRPLIETNGETGEIVWDKGRDFATVRKVLSMPQVNIVKKTEVQTGGFSKESILPKRNSDKLIARKKDWDPKKYGGFDSPTVAYSVLVVAKVEKGKSKKLKSVKELLGITIMERSSFEKNPIDFLEAKGYKEVKKDLIIKLPKYSLFELENGRKRMLASAGELQKGNELALPSKYVNFLYLASHYEKLKGSPEDNEQKQLFVEQHKHYLDEIIEQISEFSKRVILADANLDKVLSAYNKHRDKPIREQAENIIHLFTLTNLGAPAAFKYFDTTIDRKRYTSTKEVLDATLIHQSITGLYETRIDLSQLGGDGGGGSEAAAKGSSGGGRDIMKDIKVRLMTDSPDDSQDLMIGAIESNLFADQISWKSDQPVWLNQWPLKQEKLQALQQLVTEQLQLGHLEESNSPWNTPVFVIKKKSGKWRLLQDLRAVNATMHDMGALQPGLPSPVAVPKGWEIIIIDLQDCFFNIKLHPEDCKRFAFSVPSPNFKRPYQRFQWKVLPQGMKNSPTLCQKFVDKAILTVRDKYQDSYIVHYMDDILLAHPSRSIVDEILTSMIQALNKHGLVVSTEKIQKYDNLKYLGTHIQGDSVSYQKLQIRTDKLRTLNDFQKLLGNINWIRPFLKLTTGELKPLFEILNGDSNPISTRKLTPEACKALQLMNERLSTARVKRLDLSQPWSLCILKTEYTPTACLWQDGVVEWIHLPHISPKVITPYDIFCTQLIIKGRHRSKELFSKDPDYIVVPYTKVQFDLLLQEKEDWPISLLGFLGEVHFHLPKDPLLTFTLQTAIIFPHMTSTTPLEKGIVIFTDGSANGRSVTYIQGREPIIKENTQNTAQQAEIVAVITAFEEVSQPFNLYTDSKYVTGLFPEIETATLSPRTKIYTELKHLQRLIHKRQEKFYIGHIRGHTGLPGPLAQGNAYADSLTRILTAGKRTADGSEFEKRTADGSEFESPKKKAKVE

SEQ ID NO: 3327 - protein, 2018 aa, synthetic construct
MPAAKRVKLDGGDKKYSIGLDIGTNSVGWAVITDEYKVPSKKFKVLGNTDRHSIKKNLIGALLFDSGETAEATRLKRTARRRYTRRKNRICYLQEIFSNEMAKVDDSFFHRLEESFLVEEDKKHERHPIFGNIVDEVAYHEKYPTIYHLRKKLVDSTDKADLRLIYLALAHMIKFRGHFLIEGDLNPDNSDVDKLFIQLVQTYNQLFEENPINASGVDAKAILSARLSKSRRLENLIAQLPGEKKNGLFGNLIALSLGLTPNFKSNFDLAEDAKLQLSKDTYDDDLDNLLAQIGDQYADLFLAAKNLSDAILLSDILRVNTEITKAPLSASMIKRYDEHHQDLTLLKALVRQQLPEKYKEIFFDQSKNGYAGYIDGGASQEEFYKFIKPILEKMDGTEELLVKLNREDLLRKQRTFDNGSIPHQIHLGELHAILRRQEDFYPFLKDNREKIEKILTFRIPYYVGPLARGNSRFAWMTRKSEETITPWNFEEVVDKGASAQSFIERMTNFDKNLPNEKVLPKHSLLYEYFTVYNELTKVKYVTEGMRKPAFLSGEQKKAIVDLLFKTNRKVTVKQLKEDYFKKIECFDSVEISGVEDRFNASLGTYHDLLKIIKDKDFLDNEENEDILEDIVLTLTLFEDREMIEERLKTYAHLFDDKVMKQLKRRRYTGWGRLSRKLINGIRDKQSGKTILDFLKSDGFANRNFMQLIHDDSLTFKEDIQKAQVSGQGDSLHEHIANLAGSPAIKKGILQTVKVVDELVKVMGRHKPENIVIEMARENQTTQKGQKNSRERMKRIEEGIKELGSQILKEHPVENTQLQNEKLYLYYLQNGRDMYVDQELDINRLSDYDVDHIVPQSFLKDDSIDNKVLTRSDKARGKSDNVPSEEVVKKMKNYWRQLLNAKLITQRKFDNLTKAERGGLSELDKAGFIKRQLVETRQITKHVAQILDSRMNTKYDENDKLIREVKVITLKSKLVSDFRKDFQFYKVREINNYHHAHDAYLNAVVGTALIKKYPKLESEFVYGDYKVYDVRKMIAKSEQEIGKATAKYFFYSNIMNFFKTEITLANGEIRKRPLIETNGETGEIVWDKGRDFATVRKVLSMPQVNIVKKTEVQTGGFSKESILPKRNSDKLIARKKDWDPKKYGGFDSPTVAYSVLVVAKVEKGKSKKLKSVKELLGITIMERSSFEKNPIDFLEAKGYKEVKKDLIIKLPKYSLFELENGRKRMLASAGELQKGNELALPSKYVNFLYLASHYEKLKGSPEDNEQKQLFVEQHKHYLDEIIEQISEFSKRVILADANLDKVLSAYNKHRDKPIREQAENIIHLFTLTNLGAPAAFKYFDTTIDRKRYTSTKEVLDATLIHQSITGLYETRIDLSQLGGDGGPAPAPGGGRDIMKDIKVRLMTDSPDDSQDLMIGAIESNLFADQISWKSDQPVWLNQWPLKQEKLQALQQLVTEQLQLGHLEESNSPWNTPVFVIKKKSGKWRLLQDLRAVNATMHDMGALQPGLPSPVAVPKGWEIIIIDLQDCFFNIKLHPEDCKRFAFSVPSPNFKRPYQRFQWKVLPQGMKNSPTLCQKFVDKAILTVRDKYQDSYIVHYMDDILLAHPSRSIVDEILTSMIQALNKHGLVVSTEKIQKYDNLKYLGTHIQGDSVSYQKLQIRTDKLRTLNDFQKLLGNINWIRPFLKLTTGELKPLFEILNPDSNPISTRKLTPEACKALQLMNERLSTARVKRLDLSQPWSLCILKTEYTPTACLWQDGVVEWIHLPHISPKVITPYDIFCTQLIIKGRHRSKELFSKDPDYIVVPYTKVQFDLLLQEKEDWPISLLGFLGEVHFHLPKDPLLTFTLQTAIIFPHMTSTTPLEKGIVIFTDGSANGRSVTYIQGREPIIKENTQNTAQQAEIVAVITAFEEVSQPFNLYTDSKYVTGLFPEIETATLSPRTKIYTELKHLQRLIHKRQEKFYIGHIRGHTGLPGPLAQGNAYADSLTRILTAGKRTADGSEFEKRTADGSEFESPKKKAKVE

SEQ ID NO: 3328 - protein, 2028 aa, synthetic construct
MPAAKRVKLDGGDKKYSIGLDIGTNSVGWAVITDEYKVPSKKFKVLGNTDRHSIKKNLIGALLFDSGETAEATRLKRTARRRYTRRKNRICYLQEIFSNEMAKVDDSFFHRLEESFLVEEDKKHERHPIFGNIVDEVAYHEKYPTIYHLRKKLVDSTDKADLRLIYLALAHMIKFRGHFLIEGDLNPDNSDVDKLFIQLVQTYNQLFEENPINASGVDAKAILSARLSKSRRLENLIAQLPGEKKNGLFGNLIALSLGLTPNFKSNFDLAEDAKLQLSKDTYDDDLDNLLAQIGDQYADLFLAAKNLSDAILLSDILRVNTEITKAPLSASMIKRYDEHHQDLTLLKALVRQQLPEKYKEIFFDQSKNGYAGYIDGGASQEEFYKFIKPILEKMDGTEELLVKLNREDLLRKQRTFDNGSIPHQIHLGELHAILRRQEDFYPFLKDNREKIEKILTFRIPYYVGPLARGNSRFAWMTRKSEETITPWNFEEVVDKGASAQSFIERMTNFDKNLPNEKVLPKHSLLYEYFTVYNELTKVKYVTEGMRKPAFLSGEQKKAIVDLLFKTNRKVTVKQLKEDYFKKIECFDSVEISGVEDRFNASLGTYHDLLKIIKDKDFLDNEENEDILEDIVLTLTLFEDREMIEERLKTYAHLFDDKVMKQLKRRRYTGWGRLSRKLINGIRDKQSGKTILDFLKSDGFANRNFMQLIHDDSLTFKEDIQKAQVSGQGDSLHEHIANLAGSPAIKKGILQTVKVVDELVKVMGRHKPENIVIEMARENQTTQKGQKNSRERMKRIEEGIKELGSQILKEHPVENTQLQNEKLYLYYLQNGRDMYVDQELDINRLSDYDVDHIVPQSFLKDDSIDNKVLTRSDKARGKSDNVPSEEVVKKMKNYWRQLLNAKLITQRKFDNLTKAERGGLSELDKAGFIKRQLVETRQITKHVAQILDSRMNTKYDENDKLIREVKVITLKSKLVSDFRKDFQFYKVREINNYHHAHDAYLNAVVGTALIKKYPKLESEFVYGDYKVYDVRKMIAKSEQEIGKATAKYFFYSNIMNFFKTEITLANGEIRKRPLIETNGETGEIVWDKGRDFATVRKVLSMPQVNIVKKTEVQTGGFSKESILPKRNSDKLIARKKDWDPKKYGGFDSPTVAYSVLVVAKVEKGKSKKLKSVKELLGITIMERSSFEKNPIDFLEAKGYKEVKKDLIIKLPKYSLFELENGRKRMLASAGELQKGNELALPSKYVNFLYLASHYEKLKGSPEDNEQKQLFVEQHKHYLDEIIEQISEFSKRVILADANLDKVLSAYNKHRDKPIREQAENIIHLFTLTNLGAPAAFKYFDTTIDRKRYTSTKEVLDATLIHQSITGLYETRIDLSQLGGDGGGGGGSEAAAKGGGGSGGGRDIMKDIKVRLMTDSPDDSQDLMIGAIESNLFADQISWKSDQPVWLNQWPLKQEKLQALQQLVTEQLQLGHLEESNSPWNTPVFVIKKKSGKWRLLQDLRAVNATMHDMGALQPGLPSPVAVPKGWEIIIIDLQDCFFNIKLHPEDCKRFAFSVPSPNFKRPYQRFQWKVLPQGMKNSPTLCQKFVDKAILTVRDKYQDSYIVHYMDDILLAHPSRSIVDEILTSMIQALNKHGLVVSTEKIQKYDNLKYLGTHIQGDSVSYQKLQIRTDKLRTLNDFQKLLGNINWIRPFLKLTTGELKPLFEILNPDSNPISTRKLTPEACKALQLMNERLSTARVKRLDLSQPWSLCILKTEYTPTACLWQDGVVEWIHLPHISPKVITPYDIFCTQLIIKGRHRSKELFSKDPDYIVVPYTKVQFDLLLQEKEDWPISLLGFLGEVHFHLPKDPLLTFTLQTAIIFPHMTSTTPLEKGIVIFTDGSANGRSVTYIQGREPIIKENTQNTAQQAEIVAVITAFEEVSQPFNLYTDSKYVTGLFPEIETATLSPRTKIYTELKHLQRLIHKRQEKFYIGHIRGHTGLPGPLAQGNAYADSLTRILTAGKRTADGSEFEKRTADGSEFESPKKKAKVE

SEQ ID NO: 3329 - protein, 2022 aa, synthetic construct
MPAAKRVKLDGGDKKYSIGLDIGTNSVGWAVITDEYKVPSKKFKVLGNTDRHSIKKNLIGALLFDSGETAEATRLKRTARRRYTRRKNRICYLQEIFSNEMAKVDDSFFHRLEESFLVEEDKKHERHPIFGNIVDEVAYHEKYPTIYHLRKKLVDSTDKADLRLIYLALAHMIKFRGHFLIEGDLNPDNSDVDKLFIQLVQTYNQLFEENPINASGVDAKAILSARLSKSRRLENLIAQLPGEKKNGLFGNLIALSLGLTPNFKSNFDLAEDAKLQLSKDTYDDDLDNLLAQIGDQYADLFLAAKNLSDAILLSDILRVNTEITKAPLSASMIKRYDEHHQDLTLLKALVRQQLPEKYKEIFFDQSKNGYAGYIDGGASQEEFYKFIKPILEKMDGTEELLVKLNREDLLRKQRTFDNGSIPHQIHLGELHAILRRQEDFYPFLKDNREKIEKILTFRIPYYVGPLARGNSRFAWMTRKSEETITPWNFEEVVDKGASAQSFIERMTNFDKNLPNEKVLPKHSLLYEYFTVYNELTKVKYVTEGMRKPAFLSGEQKKAIVDLLFKTNRKVTVKQLKEDYFKKIECFDSVEISGVEDRFNASLGTYHDLLKIIKDKDFLDNEENEDILEDIVLTLTLFEDREMIEERLKTYAHLFDDKVMKQLKRRRYTGWGRLSRKLINGIRDKQSGKTILDFLKSDGFANRNFMQLIHDDSLTFKEDIQKAQVSGQGDSLHEHIANLAGSPAIKKGILQTVKVVDELVKVMGRHKPENIVIEMARENQTTQKGQKNSRERMKRIEEGIKELGSQILKEHPVENTQLQNEKLYLYYLQNGRDMYVDQELDINRLSDYDVDHIVPQSFLKDDSIDNKVLTRSDKARGKSDNVPSEEVVKKMKNYWRQLLNAKLITQRKFDNLTKAERGGLSELDKAGFIKRQLVETRQITKHVAQILDSRMNTKYDENDKLIREVKVITLKSKLVSDFRKDFQFYKVREINNYHHAHDAYLNAVVGTALIKKYPKLESEFVYGDYKVYDVRKMIAKSEQEIGKATAKYFFYSNIMNFFKTEITLANGEIRKRPLIETNGETGEIVWDKGRDFATVRKVLSMPQVNIVKKTEVQTGGFSKESILPKRNSDKLIARKKDWDPKKYGGFDSPTVAYSVLVVAKVEKGKSKKLKSVKELLGITIMERSSFEKNPIDFLEAKGYKEVKKDLIIKLPKYSLFELENGRKRMLASAGELQKGNELALPSKYVNFLYLASHYEKLKGSPEDNEQKQLFVEQHKHYLDEIIEQISEFSKRVILADANLDKVLSAYNKHRDKPIREQAENIIHLFTLTNLGAPAAFKYFDTTIDRKRYTSTKEVLDATLIHQSITGLYETRIDLSQLGGDGGGGSGGGGSSGGGRDIMKDIKVRLMTDSPDDSQDLMIGAIESNLFADQISWKSDQPVWLNQWPLKQEKLQALQQLVTEQLQLGHLEESNSPWNTPVFVIKKKSGKWRLLQDLRAVNATMHDMGALQPGLPSPVAVPKGWEIIIIDLQDCFFNIKLHPEDCKRFAFSVPSPNFKRPYQRFQWKVLPQGMKNSPTLCQKFVDKAILTVRDKYQDSYIVHYMDDILLAHPSRSIVDEILTSMIQALNKHGLVVSTEKIQKYDNLKYLGTHIQGDSVSYQKLQIRTDKLRTLNDFQKLLGNINWIRPFLKLTTGELKPLFEILNPDSNPISTRKLTPEACKALQLMNERLSTARVKRLDLSQPWSLCILKTEYTPTACLWQDGVVEWIHLPHISPKVITPYDIFCTQLIIKGRHRSKELFSKDPDYIVVPYTKVQFDLLLQEKEDWPISLLGFLGEVHFHLPKDPLLTFTLQTAIIFPHMTSTTPLEKGIVIFTDGSANGRSVTYIQGREPIIKENTQNTAQQAEIVAVITAFEEVSQPFNLYTDSKYVTGLFPEIETATLSPRTKIYTELKHLQRLIHKRQEKFYIGHIRGHTGLPGPLAQGNAYADSLTRILTAGKRTADGSEFEKRTADGSEFESPKKKAKVE

SEQ ID NO: 3330 - protein, 2033 aa, synthetic construct
MPAAKRVKLDGGDKKYSIGLDIGTNSVGWAVITDEYKVPSKKFKVLGNTDRHSIKKNLIGALLFDSGETAEATRLKRTARRRYTRRKNRICYLQEIFSNEMAKVDDSFFHRLEESFLVEEDKKHERHPIFGNIVDEVAYHEKYPTIYHLRKKLVDSTDKADLRLIYLALAHMIKFRGHFLIEGDLNPDNSDVDKLFIQLVQTYNQLFEENPINASGVDAKAILSARLSKSRRLENLIAQLPGEKKNGLFGNLIALSLGLTPNFKSNFDLAEDAKLQLSKDTYDDDLDNLLAQIGDQYADLFLAAKNLSDAILLSDILRVNTEITKAPLSASMIKRYDEHHQDLTLLKALVRQQLPEKYKEIFFDQSKNGYAGYIDGGASQEEFYKFIKPILEKMDGTEELLVKLNREDLLRKQRTFDNGSIPHQIHLGELHAILRRQEDFYPFLKDNREKIEKILTFRIPYYVGPLARGNSRFAWMTRKSEETITPWNFEEVVDKGASAQSFIERMTNFDKNLPNEKVLPKHSLLYEYFTVYNELTKVKYVTEGMRKPAFLSGEQKKAIVDLLFKTNRKVTVKQLKEDYFKKIECFDSVEISGVEDRFNASLGTYHDLLKIIKDKDFLDNEENEDILEDIVLTLTLFEDREMIEERLKTYAHLFDDKVMKQLKRRRYTGWGRLSRKLINGIRDKQSGKTILDFLKSDGFANRNFMQLIHDDSLTFKEDIQKAQVSGQGDSLHEHIANLAGSPAIKKGILQTVKVVDELVKVMGRHKPENIVIEMARENQTTQKGQKNSRERMKRIEEGIKELGSQILKEHPVENTQLQNEKLYLYYLQNGRDMYVDQELDINRLSDYDVDHIVPQSFLKDDSIDNKVLTRSDKARGKSDNVPSEEVVKKMKNYWRQLLNAKLITQRKFDNLTKAERGGLSELDKAGFIKRQLVETRQITKHVAQILDSRMNTKYDENDKLIREVKVITLKSKLVSDFRKDFQFYKVREINNYHHAHDAYLNAVVGTALIKKYPKLESEFVYGDYKVYDVRKMIAKSEQEIGKATAKYFFYSNIMNFFKTEITLANGEIRKRPLIETNGETGEIVWDKGRDFATVRKVLSMPQVNIVKKTEVQTGGFSKESILPKRNSDKLIARKKDWDPKKYGGFDSPTVAYSVLVVAKVEKGKSKKLKSVKELLGITIMERSSFEKNPIDFLEAKGYKEVKKDLIIKLPKYSLFELENGRKRMLASAGELQKGNELALPSKYVNFLYLASHYEKLKGSPEDNEQKQLFVEQHKHYLDEIIEQISEFSKRVILADANLDKVLSAYNKHRDKPIREQAENIIHLFTLTNLGAPAAFKYFDTTIDRKRYTSTKEVLDATLIHQSITGLYETRIDLSQLGGDGGEAAAKEAAAKEAAAKEAAAKGGGRDIMKDIKVRLMTDSPDDSQDLMIGAIESNLFADQISWKSDQPVWLNQWPLKQEKLQALQQLVTEQLQLGHLEESNSPWNTPVFVIKKKSGKWRLLQDLRAVNATMHDMGALQPGLPSPVAPPKGWEIIIIDLQDCFFNIKLHPEDCKRFAFSVPSPNFKRPYQRFQWKVLPQGMKNSPTLCQKFVDKAILTVRDKYQDSYIVHYMDDILLAHPSRSIVDEILTSMIQALNKHGLVVSTEKIQKYDNLKYLGTHIQGDSVSYQKLQIRTDKLRTLNDFQKLLGNINWIRPFLKLTTGELKPLFEILNPDSNPISTRKLTPEACKALQLMNERLSTARVKRLDLSQPWSLCILKTEYTPTACLWQDGVVEWIHLPHISPKVITPYDIFCTQLIIKGRHRSKELFSKDPDYIVVPYTKVQFDLLLQEKEDWPISLLGFLGEVHFHLPKDPLLTFTLQTAIIFPHMTSTTPLEKGIVIFTDGSANGRSVTYIQGREPIIKENTQNTAQQAEIVAVITAFEEVSQPFNLYTDSKYVTGLFPEIETATLSPRTKIYTELKHLQRLIHKRQEKFYIGHIRGHTGLPGPLAQGNAYADSLTRILTAGKRTADGSEFEKRTADGSEFESPKKKAKVE

SEQ ID NO: 3331 - protein, 2022 aa, synthetic construct
MPAAKRVKLDGGDKKYSIGLDIGTNSVGWAVITDEYKVPSKKFKVLGNTDRHSIKKNLIGALLFDSGETAEATRLKRTARRRYTRRKNRICYLQEIFSNEMAKVDDSFFHRLEESFLVEEDKKHERHPIFGNIVDEVAYHEKYPTIYHLRKKLVDSTDKADLRLIYLALAHMIKFRGHFLIEGDLNPDNSDVDKLFIQLVQTYNQLFEENPINASGVDAKAILSARLSKSRRLENLIAQLPGEKKNGLFGNLIALSLGLTPNFKSNFDLAEDAKLQLSKDTYDDDLDNLLAQIGDQYADLFLAAKNLSDAILLSDILRVNTEITKAPLSASMIKRYDEHHQDLTLLKALVRQQLPEKYKEIFFDQSKNGYAGYIDGGASQEEFYKFIKPILEKMDGTEELLVKLNREDLLRKQRTFDNGSIPHQIHLGELHAILRRQEDFYPFLKDNREKIEKILTFRIPYYVGPLARGNSRFAWMTRKSEETITPWNFEEVVDKGASAQSFIERMTNFDKNLPNEKVLPKHSLLYEYFTVYNELTKVKYVTEGMRKPAFLSGEQKKAIVDLLFKTNRKVTVKQLKEDYFKKIECFDSVEISGVEDRFNASLGTYHDLLKIIKDKDFLDNEENEDILEDIVLTLTLFEDREMIEERLKTYAHLFDDKVMKQLKRRRYTGWGRLSRKLINGIRDKQSGKTILDFLKSDGFANRNFMQLIHDDSLTFKEDIQKAQVSGQGDSLHEHIANLAGSPAIKKGILQTVKVVDELVKVMGRHKPENIVIEMARENQTTQKGQKNSRERMKRIEEGIKELGSQILKEHPVENTQLQNEKLYLYYLQNGRDMYVDQELDINRLSDYDVDHIVPQSFLKDDSIDNKVLTRSDKARGKSDNVPSEEVVKKMKNYWRQLLNAKLITQRKFDNLTKAERGGLSELDKAGFIKRQLVETRQITKHVAQILDSRMNTKYDENDKLIREVKVITLKSKLVSDFRKDFQFYKVREINNYHHAHDAYLNAVVGTALIKKYPKLESEFVYGDYKVYDVRKMIAKSEQEIGKATAKYFFYSNIMNFFKTEITLANGEIRKRPLIETNGETGEIVWDKGRDFATVRKVLSMPQVNIVKKTEVQTGGFSKESILPKRNSDKLIARKKDWDPKKYGGFDSPTVAYSVLVVAKVEKGKSKKLKSVKELLGITIMERSSFEKNPIDFLEAKGYKEVKKDLIIKLPKYSLFELENGRKRMLASAGELQKGNELALPSKYVNFLYLASHYEKLKGSPEDNEQKQLFVEQHKHYLDEIIEQISEFSKRVILADANLDKVLSAYNKHRDKPIREQAENIIHLFTLTNLGAPAAFKYFDTTIDRKRYTSTKEVLDATLIHQSITGLYETRIDLSQLGGDGGGGGGGSPAPGGGRDIMKDIKVRLMTDSPDDSQDLMIGAIESNLFADQISWKSDQPVWLNQWPLKQEKLQALQQLVTEQLQLGHLEESNSPWNTPVFVIKKKSGKWRLLQDLRAVNATMHDMGALQPGLPSPVAPPKGWEIIIIDLQDCFFNIKLHPEDCKRFAFSVPSPNFKRPYQRFQWKVLPQGMKNSPTLCQKFVDKAILTVRDKYQDSYIVHYMDDILLAHPSRSIVDEILTSMIQALNKHGLVVSTEKIQKYDNLKYLGTHIQGDSVSYQKLQIRTDKLRTLNDFQKLLGNINWIRPFLKLTTGELKPLFEILNPDSNPISTRKLTPEACKALQLMNERLSTARVKRLDLSQPWSLCILKTEYTPTACLWQDGVVEWIHLPHISPKVITPYDIFCTQLIIKGRHRSKELFSKDPDYIVVPYTKVQFDLLLQEKEDWPISLLGFLGEVHFHLPKDPLLTFTLQTAIIFPHMTSTTPLEKGIVIFTDGSANGRSVTYIQGREPIIKENTQNTAQQAEIVAVITAFEEVSQPFNLYTDSKYVTGLFPEIETATLSPRTKIYTELKHLQRLIHKRQEKFYIGHIRGHTGLPGPLAQGNAYADSLTRILTAGKRTADGSEFEKRTADGSEFESPKKKAKVE

SEQ ID NO: 3332 - protein, 2024 aa, synthetic construct
MPAAKRVKLDGGDKKYSIGLDIGTNSVGWAVITDEYKVPSKKFKVLGNTDRHSIKKNLIGALLFDSGETAEATRLKRTARRRYTRRKNRICYLQEIFSNEMAKVDDSFFHRLEESFLVEEDKKHERHPIFGNIVDEVAYHEKYPTIYHLRKKLVDSTDKADLRLIYLALAHMIKFRGHFLIEGDLNPDNSDVDKLFIQLVQTYNQLFEENPINASGVDAKAILSARLSKSRRLENLIAQLPGEKKNGLFGNLIALSLGLTPNFKSNFDLAEDAKLQLSKDTYDDDLDNLLAQIGDQYADLFLAAKNLSDAILLSDILRVNTEITKAPLSASMIKRYDEHHQDLTLLKALVRQQLPEKYKEIFFDQSKNGYAGYIDGGASQEEFYKFIKPILEKMDGTEELLVKLNREDLLRKQRTFDNGSIPHQIHLGELHAILRRQEDFYPFLKDNREKIEKILTFRIPYYVGPLARGNSRFAWMTRKSEETITPWNFEEVVDKGASAQSFIERMTNFDKNLPNEKVLPKHSLLYEYFTVYNELTKVKYVTEGMRKPAFLSGEQKKAIVDLLFKTNRKVTVKQLKEDYFKKIECFDSVEISGVEDRFNASLGTYHDLLKIIKDKDFLDNEENEDILEDIVLTLTLFEDREMIEERLKTYAHLFDDKVMKQLKRRRYTGWGRLSRKLINGIRDKQSGKTILDFLKSDGFANRNFMQLIHDDSLTFKEDIQKAQVSGQGDSLHEHIANLAGSPAIKKGILQTVKVVDELVKVMGRHKPENIVIEMARENQTTQKGQKNSRERMKRIEEGIKELGSQILKEHPVENTQLQNEKLYLYYLQNGRDMYVDQELDINRLSDYDVDHIVPQSFLKDDSIDNKVLTRSDKARGKSDNVPSEEVVKKMKNYWRQLLNAKLITQRKFDNLTKAERGGLSELDKAGFIKRQLVETRQITKHVAQILDSRMNTKYDENDKLIREVKVITLKSKLVSDFRKDFQFYKVREINNYHHAHDAYLNAVVGTALIKKYPKLESEFVYGDYKVYDVRKMIAKSEQEIGKATAKYFFYSNIMNFFKTEITLANGEIRKRPLIETNGETGEIVWDKGRDFATVRKVLSMPQVNIVKKTEVQTGGFSKESILPKRNSDKLIARKKDWDPKKYGGFDSPTVAYSVLVVAKVEKGKSKKLKSVKELLGITIMERSSFEKNPIDFLEAKGYKEVKKDLIIKLPKYSLFELENGRKRMLASAGELQKGNELALPSKYVNFLYLASHYEKLKGSPEDNEQKQLFVEQHKHYLDEIIEQISEFSKRVILADANLDKVLSAYNKHRDKPIREQAENIIHLFTLTNLGAPAAFKYFDTTIDRKRYTSTKEVLDATLIHQSITGLYETRIDLSQLGGDGGGSSEAAAKPAPGGGRDIMKDIKVRLMTDSPDDSQDLMIGAIESNLFADQISWKSDQPVWLNQWPLKQEKLQALQQLVTEQLQLGHLEESNSPWNTPVFVIKKKSGKWRLLQDLRAVNATMHDMGALQPGLPSPVAPPKGWEIIIIDLQDCFFNIKLHPEDCKRFAFSVPSPNFKRPYQRFQWKVLPQGMKNSPTLCQKFVDKAILTVRDKYQDSYIVHYMDDILLAHPSRSIVDEILTSMIQALNKHGLVVSTEKIQKYDNLKYLGTHIQGDSVSYQKLQIRTDKLRTLNDFQKLLGNINWIRPFLKLTTGELKPLFEILNPDSNPISTRKLTPEACKALQLMNERLSTARVKRLDLSQPWSLCILKTEYTPTACLWQDGVVEWIHLPHISPKVITPYDIFCTQLIIKGRHRSKELFSKDPDYIVVPYTKVQFDLLLQEKEDWPISLLGFLGEVHFHLPKDPLLTFTLQTAIIFPHMTSTTPLEKGIVIFTDGSANGRSVTYIQGREPIIKENTQNTAQQAEIVAVITAFEEVSQPFNLYTDSKYVTGLFPEIETATLSPRTKIYTELKHLQRLIHKRQEKFYIGHIRGHTGLPGPLAQGNAYADSLTRILTAGKRTADGSEFEKRTADGSEFESPKKKAKVE

SEQ ID NO: 3333-3999 - skipped (667 entries)

SEQ ID NO: 4000 - protein, 1381 aa, synthetic construct
MPAAKRVKLDGGDKKYSIGLDIGTNSVGWAVITDEYKVPSKKFKVLGNTDRHSIKKNLIGALLFDSGETAEATRLKRTARRRYTRRKNRICYLQEIFSNEMAKVDDSFFHRLEESFLVEEDKKHERHPIFGNIVDEVAYHEKYPTIYHLRKKLVDSTDKADLRLIYLALAHMIKFRGHFLIEGDLNPDNSDVDKLFIQLVQTYNQLFEENPINASGVDAKAILSARLSKSRRLENLIAQLPGEKKNGLFGNLIALSLGLTPNFKSNFDLAEDAKLQLSKDTYDDDLDNLLAQIGDQYADLFLAAKNLSDAILLSDILRVNTEITKAPLSASMIKRYDEHHQDLTLLKALVRQQLPEKYKEIFFDQSKNGYAGYIDGGASQEEFYKFIKPILEKMDGTEELLVKLNREDLLRKQRTFDNGSIPHQIHLGELHAILRRQEDFYPFLKDNREKIEKILTFRIPYYVGPLARGNSRFAWMTRKSEETITPWNFEEVVDKGASAQSFIERMTNFDKNLPNEKVLPKHSLLYEYFTVYNELTKVKYVTEGMRKPAFLSGEQKKAIVDLLFKTNRKVTVKQLKEDYFKKIECFDSVEISGVEDRFNASLGTYHDLLKIIKDKDFLDNEENEDILEDIVLTLTLFEDREMIEERLKTYAHLFDDKVMKQLKRRRYTGWGRLSRKLINGIRDKQSGKTILDFLKSDGFANRNFMQLIHDDSLTFKEDIQKAQVSGQGDSLHEHIANLAGSPAIKKGILQTVKVVDELVKVMGRHKPENIVIEMARENQTTQKGQKNSRERMKRIEEGIKELGSQILKEHPVENTQLQNEKLYLYYLQNGRDMYVDQELDINRLSDYDVDHIVPQSFLKDDSIDNKVLTRSDKARGKSDNVPSEEVVKKMKNYWRQLLNAKLITQRKFDNLTKAERGGLSELDKAGFIKRQLVETRQITKHVAQILDSRMNTKYDENDKLIREVKVITLKSKLVSDFRKDFQFYKVREINNYHHAHDAYLNAVVGTALIKKYPKLESEFVYGDYKVYDVRKMIAKSEQEIGKATAKYFFYSNIMNFFKTEITLANGEIRKRPLIETNGETGEIVWDKGRDFATVRKVLSMPQVNIVKKTEVQTGGFSKESILPKRNSDKLIARKKDWDPKKYGGFDSPTVAYSVLVVAKVEKGKSKKLKSVKELLGITIMERSSFEKNPIDFLEAKGYKEVKKDLIIKLPKYSLFELENGRKRMLASAGELQKGNELALPSKYVNFLYLASHYEKLKGSPEDNEQKQLFVEQHKHYLDEIIEQISEFSKRVILADANLDKVLSAYNKHRDKPIREQAENIIHLFTLTNLGAPAAFKYFDTTIDRKRYTSTKEVLDATLIHQSITGLYETRIDLSQLGGDGG

SEQ ID NO: 4001 - protein, 31 aa, synthetic construct
AGKRTADGSEFEKRTADGSEFESPKKKAKVE

SEQ ID NO: 4002 - protein, 2138 aa, synthetic construct; identical to SEQ ID NO: 2892

SEQ ID NO: 4003-4500 - skipped (498 entries)

SEQ ID NO: 4501 - protein, 2096 aa, synthetic construct
MPAAKRVKLDGGDKKYSIGLDIGTNSVGWAVITDEYKVPSKKFKVLGNTDRHSIKKNLIGALLFDSGETAEATRLKRTARRRYTRRKNRICYLQEIFSNEMAKVDDSFFHRLEESFLVEEDKKHERHPIFGNIVDEVAYHEKYPTIYHLRKKLVDSTDKADLRLIYLALAHMIKFRGHFLIEGDLNPDNSDVDKLFIQLVQTYNQLFEENPINASGVDAKAILSARLSKSRRLENLIAQLPGEKKNGLFGNLIALSLGLTPNFKSNFDLAEDAKLQLSKDTYDDDLDNLLAQIGDQYADLFLAAKNLSDAILLSDILRVNTEITKAPLSASMIKRYDEHHQDLTLLKALVRQQLPEKYKEIFFDQSKNGYAGYIDGGASQEEFYKFIKPILEKMDGTEELLVKLNREDLLRKQRTFDNGSIPHQIHLGELHAILRRQEDFYPFLKDNREKIEKILTFRIPYYVGPLARGNSRFAWMTRKSEETITPWNFEEVVDKGASAQSFIERMTNFDKNLPNEKVLPKHSLLYEYFTVYNELTKVKYVTEGMRKPAFLSGEQKKAIVDLLFKTNRKVTVKQLKEDYFKKIECFDSVEISGVEDRFNASLGTYHDLLKIIKDKDFLDNEENEDILEDIVLTLTLFEDREMIEERLKTYAHLFDDKVMKQLKRRRYTGWGRLSRKLINGIRDKQSGKTILDFLKSDGFANRNFMQLIHDDSLTFKEDIQKAQVSGQGDSLHEHIANLAGSPAIKKGILQTVKVVDELVKVMGRHKPENIVIEMARENQTTQKGQKNSRERMKRIEEGIKELGSQILKEHPVENTQLQNEKLYLYYLQNGRDMYVDQELDINRLSDYDVDHIVPQSFLKDDSIDNKVLTRSDKARGKSDNVPSEEVVKKMKNYWRQLLNAKLITQRKFDNLTKAERGGLSELDKAGFIKRQLVETRQITKHVAQILDSRMNTKYDENDKLIREVKVITLKSKLVSDFRKDFQFYKVREINNYHHAHDAYLNAVVGTALIKKYPKLESEFVYGDYKVYDVRKMIAKSEQEIGKATAKYFFYSNIMNFFKTEITLANGEIRKRPLIETNGETGEIVWDKGRDFATVRKVLSMPQVNIVKKTEVQTGGFSKESILPKRNSDKLIARKKDWDPKKYGGFDSPTVAYSVLVVAKVEKGKSKKLKSVKELLGITIMERSSFEKNPIDFLEAKGYKEVKKDLIIKLPKYSLFELENGRKRMLASAGELQKGNELALPSKYVNFLYLASHYEKLKGSPEDNEQKQLFVEQHKHYLDEIIEQISEFSKRVILADANLDKVLSAYNKHRDKPIREQAENIIHLFTLTNLGAPAAFKYFDTTIDRKRYTSTKEVLDATLIHQSITGLYETRIDLSQLGGDGGGGSGGSGGSGGTAPLEEEYRLFLEAPIQNVTLLEQWKREIPKVWAEINPPGLASTQAPIHVQLLSTALPVRVRQYPITLEAKRSLRETIRKFRAAGILRPVHSPWNTPLLPVRKSGTSEYRMVQDLREVNKRVETIHPTVPNPYTLLSLLPPDRIWYSVLDLKDAFFCIPLAPESQLIFAFEWADAEEGESGQLTWTRLPQGFKNSPTLFNEALNRDLQGFRLDHPSVSLLQYVDDLLIAADTQAACLSATRDLLMTLAELGYRVSGKKAQLCQEEVTYLGFKIHKGSRSLSNSRTQAILQIPVPKTKRQVREFLGKIGYCRLFIPGFAELAQPLYAATRPGNDPLVWGEKEEEAFQSLKLALTQPPALALPSLDKPFQLFVEETSGAAKGVLTQALGPWKRPVAYLSKRLDPVAAGWPRCLRAIAAAALLTREASKLTFGQDIEITSSHNLESLLRSPPDKWLTNARITQYQVLLLDPPRVRFKQTAALNPATLLPETDDTLPIHHCLDTLDSLTSTRPDLTDQPLAQAEATLFTDGSSYIRDGKRYAGAAVVTLDSVIWAEPLPIGTSAQKAELIALTKALEWSKDKSVNIYTDSRYAFATLHVHGMIYRERGWLTAGGKAIKNAPEILALLTAVWLPKRVAVMHCKGHQKDDAPTSTGNRRADEVAREVAIRPLSTQATISAGKRTADGSEFEKRTADGSEFESPKKKAKVE

SEQ ID NO: 4502 - protein, 2098 aa, synthetic construct
MPAAKRVKLDGGDKKYSIGLDIGTNSVGWAVITDEYKVPSKKFKVLGNTDRHSIKKNLIGALLFDSGETAEATRLKRTARRRYTRRKNRICYLQEIFSNEMAKVDDSFFHRLEESFLVEEDKKHERHPIFGNIVDEVAYHEKYPTIYHLRKKLVDSTDKADLRLIYLALAHMIKFRGHFLIEGDLNPDNSDVDKLFIQLVQTYNQLFEENPINASGVDAKAILSARLSKSRRLENLIAQLPGEKKNGLFGNLIALSLGLTPNFKSNFDLAEDAKLQLSKDTYDDDLDNLLAQIGDQYADLFLAAKNLSDAILLSDILRVNTEITKAPLSASMIKRYDEHHQDLTLLKALVRQQLPEKYKEIFFDQSKNGYAGYIDGGASQEEFYKFIKPILEKMDGTEELLVKLNREDLLRKQRTFDNGSIPHQIHLGELHAILRRQEDFYPFLKDNREKIEKILTFRIPYYVGPLARGNSRFAWMTRKSEETITPWNFEEVVDKGASAQSFIERMTNFDKNLPNEKVLPKHSLLYEYFTVYNELTKVKYVTEGMRKPAFLSGEQKKAIVDLLFKTNRKVTVKQLKEDYFKKIECFDSVEISGVEDRFNASLGTYHDLLKIIKDKDFLDNEENEDILEDIVLTLTLFEDREMIEERLKTYAHLFDDKVMKQLKRRRYTGWGRLSRKLINGIRDKQSGKTILDFLKSDGFANRNFMQLIHDDSLTFKEDIQKAQVSGQGDSLHEHIANLAGSPAIKKGILQTVKVVDELVKVMGRHKPENIVIEMARENQTTQKGQKNSRERMKRIEEGIKELGSQILKEHPVENTQLQNEKLYLYYLQNGRDMYVDQELDINRLSDYDVDHIVPQSFLKDDSIDNKVLTRSDKARGKSDNVPSEEVVKKMKNYWRQLLNAKLITQRKFDNLTKAERGGLSELDKAGFIKRQLVETRQITKHVAQILDSRMNTKYDENDKLIREVKVITLKSKLVSDFRKDFQFYKVREINNYHHAHDAYLNAVVGTALIKKYPKLESEFVYGDYKVYDVRKMIAKSEQEIGKATAKYFFYSNIMNFFKTEITLANGEIRKRPLIETNGETGEIVWDKGRDFATVRKVLSMPQVNIVKKTEVQTGGFSKESILPKRNSDKLIARKKDWDPKKYGGFDSPTVAYSVLVVAKVEKGKSKKLKSVKELLGITIMERSSFEKNPIDFLEAKGYKEVKKDLIIKLPKYSLFELENGRKRMLASAGELQKGNELALPSKYVNFLYLASHYEKLKGSPEDNEQKQLFVEQHKHYLDEIIEQISEFSKRVILADANLDKVLSAYNKHRDKPIREQAENIIHLFTLTNLGAPAAFKYFDTTIDRKRYTSTKEVLDATLIHQSITGLYETRIDLSQLGGDGGGGSGGSGGSGGSGGSGGVLNLEEEYRLHEKPVPSSIDPSWLQLFPTVWAERAGMGLANQVPPVVVELRSGASPVAVRQYPMSKEAREGIRPHIQRFLDLGVLVPCQSPWNTPLLPVKKPGTNDYRPVQDLREINKRVQDIHPTVPNPYNLLSSLPPSHTWYSVLDLKDAFFCLKLHPNSQPLFAFEWRDPEKGNTGQLTWTRLPQGFKNSPTLFNEALHRDLAPFRALNPQVVLLQYVDDLLVAAPTYRDCKEGTQKLLQELSKLGYRVSAKKAQLCQKEVTYLGYLLKEGKRWLTPARKATVMKIPPPTTPRQVREFLGTAGFCRLWIPGFASLAAPLYPLTKPSIPFIWTEEHQKAFDRIKEALLSAPALALPDLTKPFTLYVDERAGVARGVLTQTLGPWRRPVAYLSKKLDPVASGWPTCLKAVAAVALLLKDADKLTLGQNVTVIASHSLESIVRQPPDRWMTNARMTHYQSLLLNERVSFAPPAVLNPATLLPVESEATPVHRCSEILAEETGTRRDLKDQPLPGVPAWYTDGSSFIAEGKRRAGAAIVDGKRTVWASSLPEGTSAQKAELVALTQALRLAEGKDINIYTDSRYAFATAHIHGAIYKQRGWLTSAGKDIKNKEEILALLEAIHLPKRVAIIHCPGHQKGNDPVATGNRRADEAAKQAALSTRVLAETTKPAGKRTADGSEFEKRTADGSEFESPKKKAKVE

SEQ ID NO: 4503 - protein, 2103 aa, synthetic construct
MPAAKRVKLDGGDKKYSIGLDIGTNSVGWAVITDEYKVPSKKFKVLGNTDRHSIKKNLIGALLFDSGETAEATRLKRTARRRYTRRKNRICYLQEIFSNEMAKVDDSFFHRLEESFLVEEDKKHERHPIFGNIVDEVAYHEKYPTIYHLRKKLVDSTDKADLRLIYLALAHMIKFRGHFLIEGDLNPDNSDVDKLFIQLVQTYNQLFEENPINASGVDAKAILSARLSKSRRLENLIAQLPGEKKNGLFGNLIALSLGLTPNFKSNFDLAEDAKLQLSKDTYDDDLDNLLAQIGDQYADLFLAAKNLSDAILLSDILRVNTEITKAPLSASMIKRYDEHHQDLTLLKALVRQQLPEKYKEIFFDQSKNGYAGYIDGGASQEEFYKFIKPILEKMDGTEELLVKLNREDLLRKQRTFDNGSIPHQIHLGELHAILRRQEDFYPFLKDNREKIEKILTFRIPYYVGPLARGNSRFAWMTRKSEETITPWNFEEVVDKGASAQSFIERMTNFDKNLPNEKVLPKHSLLYEYFTVYNELTKVKYVTEGMRKPAFLSGEQKKAIVDLLFKTNRKVTVKQLKEDYFKKIECFDSVEISGVEDRFNASLGTYHDLLKIIKDKDFLDNEENEDILEDIVLTLTLFEDREMIEERLKTYAHLFDDKVMKQLKRRRYTGWGRLSRKLINGIRDKQSGKTILDFLKSDGFANRNFMQLIHDDSLTFKEDIQKAQVSGQGDSLHEHIANLAGSPAIKKGILQTVKVVDELVKVMGRHKPENIVIEMARENQTTQKGQKNSRERMKRIEEGIKELGSQILKEHPVENTQLQNEKLYLYYLQNGRDMYVDQELDINRLSDYDVDHIVPQSFLKDDSIDNKVLTRSDKARGKSDNVPSEEVVKKMKNYWRQLLNAKLITQRKFDNLTKAERGGLSELDKAGFIKRQLVETRQITKHVAQILDSRMNTKYDENDKLIREVKVITLKSKLVSDFRKDFQFYKVREINNYHHAHDAYLNAVVGTALIKKYPKLESEFVYGDYKVYDVRKMIAKSEQEIGKATAKYFFYSNIMNFFKTEITLANGEIRKRPLIETNGETGEIVWDKGRDFATVRKVLSMPQVNIVKKTEVQTGGFSKESILPKRNSDKLIARKKDWDPKKYGGFDSPTVAYSVLVVAKVEKGKSKKLKSVKELLGITIMERSSFEKNPIDFLEAKGYKEVKKDLIIKLPKYSLFELENGRKRMLASAGELQKGNELALPSKYVNFLYLASHYEKLKGSPEDNEQKQLFVEQHKHYLDEIIEQISEFSKRVILADANLDKVLSAYNKHRDKPIREQAENIIHLFTLTNLGAPAAFKYFDTTIDRKRYTSTKEVLDATLIHQSITGLYETRIDLSQLGGDGGGGSGGSGGSGGSGGSGGSGGLGIEDEYRLHETSTEPDVSLGSTWLSDFPQAWAETGGMGLAVRQAPLIIPLKATSTPVSIQQYPMSHEARLGIKPHIQRLLDQGILVPCQSPWNTPLLPVKKPGTNDYRPVQDLREVNKRVEDIHPTVPNPYNLLSGLPPSHQWYTVLDLKDAFFCLRLHPTSQPLFAFEWRDPGMGISGQLTWTRLPQGFKNSPTLFNEALHRDLADFRIQHPDLILLQYVDDILLAATSELDCQQGTRALLQTLGDLGYRASAKKAQICQKQVKYLGYLLREGQRWLTEARKETVMGQPVPKTPRQLREFLGKAGFCRLFIPGFAEMAAPLYPLTKPGTLFSWGPDQQKAYQEIKQALLTAPALGLPDLTKPFELFVDEKQGYAKGVLTQKLGPWRRPVAYLSKKLDPVAAGWPPCLRMVAAIAVLTKDAGKLTMGQPLVILAPHAVEALVKQPPDRWLSNARMTHYQAMLLDTDRVQFGPVVALNPATLLPLPEEGAPHDCLEILAETHGTRPDLTDQPIPDADHTWYTDGSSFLQEGQRKAGAAVTTETEVIWAGALPAGTSAQRAELIALTQALKMAEGKRLNVYTDSRYAFATAHIHGEIYRRRGWLTSEGREIKNKSEILALLKALFLPKRLSIIHCLGHQKGDSAEARGNRLADQAAREAAIKTPPDTSTLLIAGKRTADGSEFEKRTADGSEFESPKKKAKVE

SEQ ID NO: 4504 - protein, 2110 aa, synthetic construct
MPAAKRVKLDGGDKKYSIGLDIGTNSVGWAVITDEYKVPSKKFKVLGNTDRHSIKKNLIGALLFDSGETAEATRLKRTARRRYTRRKNRICYLQEIFSNEMAKVDDSFFHRLEESFLVEEDKKHERHPIFGNIVDEVAYHEKYPTIYHLRKKLVDSTDKADLRLIYLALAHMIKFRGHFLIEGDLNPDNSDVDKLFIQLVQTYNQLFEENPINASGVDAKAILSARLSKSRRLENLIAQLPGEKKNGLFGNLIALSLGLTPNFKSNFDLAEDAKLQLSKDTYDDDLDNLLAQIGDQYADLFLAAKNLSDAILLSDILRVNTEITKAPLSASMIKRYDEHHQDLTLLKALVRQQLPEKYKEIFFDQSKNGYAGYIDGGASQEEFYKFIKPILEKMDGTEELLVKLNREDLLRKQRTFDNGSIPHQIHLGELHAILRRQEDFYPFLKDNREKIEKILTFRIPYYVGPLARGNSRFAWMTRKSEETITPWNFEEVVDKGASAQSFIERMTNFDKNLPNEKVLPKHSLLYEYFTVYNELTKVKYVTEGMRKPAFLSGEQKKAIVDLLFKTNRKVTVKQLKEDYFKKIECFDSVEISGVEDRFNASLGTYHDLLKIIKDKDFLDNEENEDILEDIVLTLTLFEDREMIEERLKTYAHLFDDKVMKQLKRRRYTGWGRLSRKLINGIRDKQSGKTILDFLKSDGFANRNFMQLIHDDSLTFKEDIQKAQVSGQGDSLHEHIANLAGSPAIKKGILQTVKVVDELVKVMGRHKPENIVIEMARENQTTQKGQKNSRERMKRIEEGIKELGSQILKEHPVENTQLQNEKLYLYYLQNGRDMYVDQELDINRLSDYDVDHIVPQSFLKDDSIDNKVLTRSDKARGKSDNVPSEEVVKKMKNYWRQLLNAKLITQRKFDNLTKAERGGLSELDKAGFIKRQLVETRQITKHVAQILDSRMNTKYDENDKLIREVKVITLKSKLVSDFRKDFQFYKVREINNYHHAHDAYLNAVVGTALIKKYPKLESEFVYGDYKVYDVRKMIAKSEQEIGKATAKYFFYSNIMNFFKTEITLANGEIRKRPLIETNGETGEIVWDKGRDFATVRKVLSMPQVNIVKKTEVQTGGFSKESILPKRNSDKLIARKKDWDPKKYGGFDSPTVAYSVLVVAKVEKGKSKKLKSVKELLGITIMERSSFEKNPIDFLEAKGYKEVKKDLIIKLPKYSLFELENGRKRMLASAGELQKGNELALPSKYVNFLYLASHYEKLKGSPEDNEQKQLFVEQHKHYLDEIIEQISEFSKRVILADANLDKVLSAYNKHRDKPIREQAENIIHLFTLTNLGAPAAFKYFDTTIDRKRYTSTKEVLDATLIHQSITGLYETRIDLSQLGGDGGGGGGSGGGGSGGGGSGGGGSGGGGSGGTLNIEDEHRLHETSKEPDVSLGSTWLSDFPQAWAETGGMGLAVRQAPLIIPLKATSTPVSIKQYPMSQEARLGIKPHIQRLLDQGILVPCQSPWNTPLLPVKKPGTNDYRPVQDLREVNKRVEDIHPTVPNPYNLLSGLPPSHQWYTVLDLKDAFFCLRLHPTSQPLFAFEWRDPEMGISGQLTWTRLPQGFKNSPTLFNEALHRDLADFRIQHPDLILLQYVDDLLLAATSELDCQQGTRALLQTLGNLGYRASAKKAQICQKQVKYLGYLLKEGQRWLTEARKETVMGQPTPKTPRQLREFLGKAGFCRLFIPGFAEMAAPLYPLTKPGTLFNWGPDQQKAYQEIKQALLTAPALGLPDLTKPFELFVDEKQGYAKGVLTQKLGPWRRPVAYLSKKLDPVAAGWPPCLRMVAAIAVLTKDAGKLTMGQPLVILAPHAVEALVKQPPDRWLSNARMTHYQALLLDTDRVQFGPVVALNPATLLPLPEEGLQHNCLDILAEAHGTRPDLTDQPLPDADHTWYTDGSSLLQEGQRKAGAAVTTETEVIWAKALPAGTSAQRAELIALTQALKMAEGKKLNVYTDSRYAFATAHIHGEIYRRRGWLTSEGKEIKNKDEILALLKALFLPKRLSIIHCPGHQKGHSAEARGNRMADQAARKAAITETPDTSTLLAGKRTADGSEFEKRTADGSEFESPKKKAKVE

SEQ ID NO: 4505 - protein, 2094 aa, synthetic construct
MPAAKRVKLDGGDKKYSIGLDIGTNSVGWAVITDEYKVPSKKFKVLGNTDRHSIKKNLIGALLFDSGETAEATRLKRTARRRYTRRKNRICYLQEIFSNEMAKVDDSFFHRLEESFLVEEDKKHERHPIFGNIVDEVAYHEKYPTIYHLRKKLVDSTDKADLRLIYLALAHMIKFRGHFLIEGDLNPDNSDVDKLFIQLVQTYNQLFEENPINASGVDAKAILSARLSKSRRLENLIAQLPGEKKNGLFGNLIALSLGLTPNFKSNFDLAEDAKLQLSKDTYDDDLDNLLAQIGDQYADLFLAAKNLSDAILLSDILRVNTEITKAPLSASMIKRYDEHHQDLTLLKALVRQQLPEKYKEIFFDQSKNGYAGYIDGGASQEEFYKFIKPILEKMDGTEELLVKLNREDLLRKQRTFDNGSIPHQIHLGELHAILRRQEDFYPFLKDNREKIEKILTFRIPYYVGPLARGNSRFAWMTRKSEETITPWNFEEVVDKGASAQSFIERMTNFDKNLPNEKVLPKHSLLYEYFTVYNELTKVKYVTEGMRKPAFLSGEQKKAIVDLLFKTNRKVTVKQLKEDYFKKIECFDSVEISGVEDRFNASLGTYHDLLKIIKDKDFLDNEENEDILEDIVLTLTLFEDREMIEERLKTYAHLFDDKVMKQLKRRRYTGWGRLSRKLINGIRDKQSGKTILDFLKSDGFANRNFMQLIHDDSLTFKEDIQKAQVSGQGDSLHEHIANLAGSPAIKKGILQTVKVVDELVKVMGRHKPENIVIEMARENQTTQKGQKNSRERMKRIEEGIKELGSQILKEHPVENTQLQNEKLYLYYLQNGRDMYVDQELDINRLSDYDVDHIVPQSFLKDDSIDNKVLTRSDKARGKSDNVPSEEVVKKMKNYWRQLLNAKLITQRKFDNLTKAERGGLSELDKAGFIKRQLVETRQITKHVAQILDSRMNTKYDENDKLIREVKVITLKSKLVSDFRKDFQFYKVREINNYHHAHDAYLNAVVGTALIKKYPKLESEFVYGDYKVYDVRKMIAKSEQEIGKATAKYFFYSNIMNFFKTEITLANGEIRKRPLIETNGETGEIVWDKGRDFATVRKVLSMPQVNIVKKTEVQTGGFSKESILPKRNSDKLIARKKDWDPKKYGGFDSPTVAYSVLVVAKVEKGKSKKLKSVKELLGITIMERSSFEKNPIDFLEAKGYKEVKKDLIIKLPKYSLFELENGRKRMLASAGELQKGNELALPSKYVNFLYLASHYEKLKGSPEDNEQKQLFVEQHKHYLDEIIEQISEFSKRVILADANLDKVLSAYNKHRDKPIREQAENIIHLFTLTNLGAPAAFKYFDTTIDRKRYTSTKEVLDATLIHQSITGLYETRIDLSQLGGDGGGSSGSSGSSGGTLNIEDEHRLHETSKEPDVSLGSTWLSDFPQAWAETGGMGLAVRQAPLIIPLKATSTPVSIKQYPMSQEARLGIKPHIQRLLDQGILVPCQSPWNTPLLPVKKPGTNDYRPVQDLREVNKRVEDIHPTVPNPYNLLSGLPPSHQWYTVLDLKDAFFCLRLHPTSQPLFAFEWRDPEMGISGQLTWTRLPQGFKNSPTLFNEALHRDLADFRIQHPDLILLQYVDDLLLAATSELDCQQGTRALLQTLGNLGYRASAKKAQICQKQVKYLGYLLKEGQRWLTEARKETVMGQPTPKTPRQLREFLGTAGFCRLWIPGFAEMAAPLYPLTKPGTLFNWGPDQQKAYQEIKQALLTAPALGLPDLTKPFELFVDEKQGYAKGVLTQKLGPWRRPVAYLSKKLDPVAAGWPPCLRMVAAIAVLTKDAGKLTMGQPLVILAPHAVEALVKQPPDRWLSNARMTHYQALLLDTDRVQFGPVVALNPATLLPLPEEGLQHNCLDILAEAHGTRPDLTDQPLPDADHTWYTDGSSLLQEGQRKAGAAVTTETEVIWAKALPAGTSAQRAELIALTQALKMAEGKKLNVYTDSRYAFATAHIHGEIYRRRGWLTSEGKEIKNKDEILALLKALFLPKRLSIIHCPGHQKGHSAEARGNRMADQAARKAAITETPDTSTLLAGKRTADGSEFEKRTADGSEFESPKKKAKVE

SEQ ID NO: 4506 - protein, 2100 aa, synthetic construct
MPAAKRVKLDGGDKKYSIGLDIGTNSVGWAVITDEYKVPSKKFKVLGNTDRHSIKKNLIGALLFDSGETAEATRLKRTARRRYTRRKNRICYLQEIFSNEMAKVDDSFFHRLEESFLVEEDKKHERHPIFGNIVDEVAYHEKYPTIYHLRKKLVDSTDKADLRLIYLALAHMIKFRGHFLIEGDLNPDNSDVDKLFIQLVQTYNQLFEENPINASGVDAKAILSARLSKSRRLENLIAQLPGEKKNGLFGNLIALSLGLTPNFKSNFDLAEDAKLQLSKDTYDDDLDNLLAQIGDQYADLFLAAKNLSDAILLSDILRVNTEITKAPLSASMIKRYDEHHQDLTLLKALVRQQLPEKYKEIFFDQSKNGYAGYIDGGASQEEFYKFIKPILEKMDGTEELLVKLNREDLLRKQRTFDNGSIPHQIHLGELHAILRRQEDFYPFLKDNREKIEKILTFRIPYYVGPLARGNSRFAWMTRKSEETITPWNFEEVVDKGASAQSFIERMTNFDKNLPNEKVLPKHSLLYEYFTVYNELTKVKYVTEGMRKPAFLSGEQKKAIVDLLFKTNRKVTVKQLKEDYFKKIECFDSVEISGVEDRFNASLGTYHDLLKIIKDKDFLDNEENEDILEDIVLTLTLFEDREMIEERLKTYAHLFDDKVMKQLKRRRYTGWGRLSRKLINGIRDKQSGKTILDFLKSDGFANRNFMQLIHDDSLTFKEDIQKAQVSGQGDSLHEHIANLAGSPAIKKGILQTVKVVDELVKVMGRHKPENIVIEMARENQTTQKGQKNSRERMKRIEEGIKELGSQILKEHPVENTQLQNEKLYLYYLQNGRDMYVDQELDINRLSDYDVDHIVPQSFLKDDSIDNKVLTRSDKARGKSDNVPSEEVVKKMKNYWRQLLNAKLITQRKFDNLTKAERGGLSELDKAGFIKRQLVETRQITKHVAQILDSRMNTKYDENDKLIREVKVITLKSKLVSDFRKDFQFYKVREINNYHHAHDAYLNAVVGTALIKKYPKLESEFVYGDYKVYDVRKMIAKSEQEIGKATAKYFFYSNIMNFFKTEITLANGEIRKRPLIETNGETGEIVWDKGRDFATVRKVLSMPQVNIVKKTEVQTGGFSKESILPKRNSDKLIARKKDWDPKKYGGFDSPTVAYSVLVVAKVEKGKSKKLKSVKELLGITIMERSSFEKNPIDFLEAKGYKEVKKDLIIKLPKYSLFELENGRKRMLASAGELQKGNELALPSKYVNFLYLASHYEKLKGSPEDNEQKQLFVEQHKHYLDEIIEQISEFSKRVILADANLDKVLSAYNKHRDKPIREQAENIIHLFTLTNLGAPAAFKYFDTTIDRKRYTSTKEVLDATLIHQSITGLYETRIDLSQLGGDGGEAAAKEAAAKEAAAKGGTLNIEDEYRLHETSKEPDVPLGSTWLSDFPQAWAETGGMGLAVRQAPLIIPLKATSTPVSIKQYPMSQEARLGIKPHIQRLLDQGILVPCQSPWNTPLLPVKKPGTNDYRPVQDLREVNKRVEDIHPTVPNPYNLLSGLPPSHQWYTVLDLKDAFFCLRLHPTSQPLFAFEWRDPEMGISGQLTWTRLPQGFKNSPTLFNEALHRDLADFRIQHPDLILLQYVDDLLLAATSEQDCQRGTRALLQTLGNLGYRASAKKAQICQKQVKYLGYLLKEGQRWLTEARKETVMGQPTPKTPRQLREFLGKAGFCRLFIPGFAEMAAPLYPLTKPGTLFNWGPDQQKAYQEIKQALLTAPALGLPDLTKPFELFVDEKQGYAKGVLTQKLGPWRRPVAYLSKKLDPVAAGWPPCLRMVAAIAVLTKDAGKLTMGQPLVILAPHAVEALVKQPPDRWLSNARMTHYQAMLLDTDRVQFGPVVALNPATLLPLPEKEAPHDCLEILAETHGTRPDLTDQPIPDADYTWYTDGSSFLQEGQRRAGAAVTTETEVIWARALPAGTSAQRAELIALTQALKMAEGKKLNVYTDSRYAFATAHVHGEIYRRRGWLTSEGREIKNKNEILALLKALFLPKRLSIIHCPGHQKGNSAEARGNRMADQAAREAAMKAVLETSTLLAGKRTADGSEFEKRTADGSEFESPKKKAKVE

SEQ ID NO: 4507 - protein, 2110 aa, synthetic construct
MPAAKRVKLDGGDKKYSIGLDIGTNSVGWAVITDEYKVPSKKFKVLGNTDRHSIKKNLIGALLFDSGETAEATRLKRTARRRYTRRKNRICYLQEIFSNEMAKVDDSFFHRLEESFLVEEDKKHERHPIFGNIVDEVAYHEKYPTIYHLRKKLVDSTDKADLRLIYLALAHMIKFRGHFLIEGDLNPDNSDVDKLFIQLVQTYNQLFEENPINASGVDAKAILSARLSKSRRLENLIAQLPGEKKNGLFGNLIALSLGLTPNFKSNFDLAEDAKLQLSKDTYDDDLDNLLAQIGDQYADLFLAAKNLSDAILLSDILRVNTEITKAPLSASMIKRYDEHHQDLTLLKALVRQQLPEKYKEIFFDQSKNGYAGYIDGGASQEEFYKFIKPILEKMDGTEELLVKLNREDLLRKQRTFDNGSIPHQIHLGELHAILRRQEDFYPFLKDNREKIEKILTFRIPYYVGPLARGNSRFAWMTRKSEETITPWNFEEVVDKGASAQSFIERMTNFDKNLPNEKVLPKHSLLYEYFTVYNELTKVKYVTEGMRKPAFLSGEQKKAIVDLLFKTNRKVTVKQLKEDYFKKIECFDSVEISGVEDRFNASLGTYHDLLKIIKDKDFLDNEENEDILEDIVLTLTLFEDREMIEERLKTYAHLFDDKVMKQLKRRRYTGWGRLSRKLINGIRDKQSGKTILDFLKSDGFANRNFMQLIHDDSLTFKEDIQKAQVSGQGDSLHEHIANLAGSPAIKKGILQTVKVVDELVKVMGRHKPENIVIEMARENQTTQKGQKNSRERMKRIEEGIKELGSQILKEHPVENTQLQNEKLYLYYLQNGRDMYVDQELDINRLSDYDVDHIVPQSFLKDDSIDNKVLTRSDKARGKSDNVPSEEVVKKMKNYWRQLLNAKLITQRKFDNLTKAERGGLSELDKAGFIKRQLVETRQITKHVAQILDSRMNTKYDENDKLIREVKVITLKSKLVSDFRKDFQFYKVREINNYHHAHDAYLNAVVGTALIKKYPKLESEFVYGDYKVYDVRKMIAKSEQEIGKATAKYFFYSNIMNFFKTEITLANGEIRKRPLIETNGETGEIVWDKGRDFATVRKVLSMPQVNIVKKTEVQTGGFSKESILPKRNSDKLIARKKDWDPKKYGGFDSPTVAYSVLVVAKVEKGKSKKLKSVKELLGITIMERSSFEKNPIDFLEAKGYKEVKKDLIIKLPKYSLFELENGRKRMLASAGELQKGNELALPSKYVNFLYLASHYEKLKGSPEDNEQKQLFVEQHKHYLDEIIEQISEFSKRVILADANLDKVLSAYNKHRDKPIREQAENIIHLFTLTNLGAPAAFKYFDTTIDRKRYTSTKEVLDATLIHQSITGLYETRIDLSQLGGDGGEAAAKEAAAKEAAAKEAAAKEAAAKGGTLNIEDEYRLHETSKEPDVSLGSTWLSDFPQAWAETGGMGLAVRQAPLIIPLKATSTPVSIKQYPMSQEARLGIKPHIQRLLDQGILVPCQSPWNTPLLPVKKPGTNDYRPVQDLREVNKRVEDIHPTVPNPYNLLSGLPPSHQWYTVLDLKDAFFCLRLHPTSQPLFAFEWRDPEMGISGQLTWTRLPQGFKNSPTLFNEALHRDLAGFRIQHPDLILLQYVDDLLLAATSELDCQQGTRALLQTLGDLGYRASAKKAQICQKQVKYLGYLLKEGQRWLTEARKETVMGQPIPKTPRQLREFLGTAGFCRLWIPGFAEMAAPLYPLTKPGTLFNWGPDQQKAFQEIKQALLTAPALGLPDLTKPFELFVDEKQGYAKGVLTQKLGPWRRPVAYLSKKLDPVAAGWPPCLRMVAAIAVLTKDAGKLTMGQPLVILAPHAVEALVKQPPDRWLSNARMTHYQALLLDTDRVQFGPVVALNPATLLPLPEEGLQHDCLDILAEAHGTRSDLMDQPLPDADHTWYTDGSSFLQEGQRKAGAAVTTETEVIWARALPAGTSAQRAELIALTQALKMAEGKKLNVYTDSRYAFATAHIHGEIYRRRGWLTSEGKEIKNKDEILALLKALFLPKRLSIIHCPGHQKGNSAEARGNRMADQAAREVATRETPETSTLLAGKRTADGSEFEKRTADGSEFESPKKKAKVE

SEQ ID NO: 4508 - protein, 2112 aa, synthetic construct
MPAAKRVKLDGGDKKYSIGLDIGTNSVGWAVITDEYKVPSKKFKVLGNTDRHSIKKNLIGALLFDSGETAEATRLKRTARRRYTRRKNRICYLQEIFSNEMAKVDDSFFHRLEESFLVEEDKKHERHPIFGNIVDEVAYHEKYPTIYHLRKKLVDSTDKADLRLIYLALAHMIKFRGHFLIEGDLNPDNSDVDKLFIQLVQTYNQLFEENPINASGVDAKAILSARLSKSRRLENLIAQLPGEKKNGLFGNLIALSLGLTPNFKSNFDLAEDAKLQLSKDTYDDDLDNLLAQIGDQYADLFLAAKNLSDAILLSDILRVNTEITKAPLSASMIKRYDEHHQDLTLLKALVRQQLPEKYKEIFFDQSKNGYAGYIDGGASQEEFYKFIKPILEKMDGTEELLVKLNREDLLRKQRTFDNGSIPHQIHLGELHAILRRQEDFYPFLKDNREKIEKILTFRIPYYVGPLARGNSRFAWMTRKSEETITPWNFEEVVDKGASAQSFIERMTNFDKNLPNEKVLPKHSLLYEYFTVYNELTKVKYVTEGMRKPAFLSGEQKKAIVDLLFKTNRKVTVKQLKEDYFKKIECFDSVEISGVEDRFNASLGTYHDLLKIIKDKDFLDNEENEDILEDIVLTLTLFEDREMIEERLKTYAHLFDDKVMKQLKRRRYTGWGRLSRKLINGIRDKQSGKTILDFLKSDGFANRNFMQLIHDDSLTFKEDIQKAQVSGQGDSLHEHIANLAGSPAIKKGILQTVKVVDELVKVMGRHKPENIVIEMARENQTTQKGQKNSRERMKRIEEGIKELGSQILKEHPVENTQLQNEKLYLYYLQNGRDMYVDQELDINRLSDYDVDHIVPQSFLKDDSIDNKVLTRSDKARGKSDNVPSEEVVKKMKNYWRQLLNAKLITQRKFDNLTKAERGGLSELDKAGFIKRQLVETRQITKHVAQILDSRMNTKYDENDKLIREVKVITLKSKLVSDFRKDFQFYKVREINNYHHAHDAYLNAVVGTALIKKYPKLESEFVYGDYKVYDVRKMIAKSEQEIGKATAKYFFYSNIMNFFKTEITLANGEIRKRPLIETNGETGEIVWDKGRDFATVRKVLSMPQVNIVKKTEVQTGGFSKESILPKRNSDKLIARKKDWDPKKYGGFDSPTVAYSVLVVAKVEKGKSKKLKSVKELLGITIMERSSFEKNPIDFLEAKGYKEVKKDLIIKLPKYSLFELENGRKRMLASAGELQKGNELALPSKYVNFLYLASHYEKLKGSPEDNEQKQLFVEQHKHYLDEIIEQISEFSKRVILADANLDKVLSAYNKHRDKPIREQAENIIHLFTLTNLGAPAAFKYFDTTIDRKRYTSTKEVLDATLIHQSITGLYETRIDLSQLGGDGGPAPAPAPGGTLNIEDEYRLHETSKEPDVSLGSTWLSDFPQAWAETGGMGLAVRQAPLIIPLKATSTPVSIKQYPMSQEARLGIKPHIQRLLDQGILVPCQSPWNTPLLPVKKPGTNDYRPVQDLREVNKRVEDIHPTVPNPYNLLSGLPPSHQWYTVLDLKDAFFCLRLHPTSQPLFAFEWRDPEMGISGQLTWTRLPQGFKNSPTLFNEALHRDLADFRIQHPDLILLQYVDDLLLAATSELDCQQGTRALLQTLGNLGYRASAKKAQICQKQVKYLGYLLKEGQRWLTEARKETVMGQPTPKTPRQLREFLGKAGFCRLFIPGFAEMAAPLYPLTKPGTLFNWGPDQQKAYQEIKQALLTAPALGLPDLTKPFELFVDEKQGYAKGVLTQKLGPWRRPVAYLSKKLDPVAAGWPPCLRMVAAIAVLTKDAGKLTMGQPLVILAPHAVEALVKQPPDRWLSNARMTHYQALLLDTDRVQFGPVVALNPATLLPLPEEGLQHNCLDILAEAHGTRPDLTDQPLPDADHTWYTDGSSLLQEGQRKAGAAVTTETEVIWAKALPAGTSAQRAELIALTQALKMAEGKKLNVYTDSRYAFATAHIHGEIYRRRGWLTSEGKEIKNKDEILALLKALFLPKRLSIIHCPGHQKGHSAEARGNRMADQAARKAAITETPDTSTLLIENSSPSGGSKRTADGSEFEAGKRTADGSEFEKRTADGSEFESPKKKAKVE

SEQ ID NO: 4509 - protein, 2096 aa, synthetic construct
MPAAKRVKLDGGDKKYSIGLDIGTNSVGWAVITDEYKVPSKKFKVLGNTDRHSIKKNLIGALLFDSGETAEATRLKRTARRRYTRRKNRICYLQEIFSNEMAKVDDSFFHRLEESFLVEEDKKHERHPIFGNIVDEVAYHEKYPTIYHLRKKLVDSTDKADLRLIYLALAHMIKFRGHFLIEGDLNPDNSDVDKLFIQLVQTYNQLFEENPINASGVDAKAILSARLSKSRRLENLIAQLPGEKKNGLFGNLIALSLGLTPNFKSNFDLAEDAKLQLSKDTYDDDLDNLLAQIGDQYADLFLAAKNLSDAILLSDILRVNTEITKAPLSASMIKRYDEHHQDLTLLKALVRQQLPEKYKEIFFDQSKNGYAGYIDGGASQEEFYKFIKPILEKMDGTEELLVKLNREDLLRKQRTFDNGSIPHQIHLGELHAILRRQEDFYPFLKDNREKIEKILTFRIPYYVGPLARGNSRFAWMTRKSEETITPWNFEEVVDKGASAQSFIERMTNFDKNLPNEKVLPKHSLLYEYFTVYNELTKVKYVTEGMRKPAFLSGEQKKAIVDLLFKTNRKVTVKQLKEDYFKKIECFDSVEISGVEDRFNASLGTYHDLLKIIKDKDFLDNEENEDILEDIVLTLTLFEDREMIEERLKTYAHLFDDKVMKQLKRRRYTGWGRLSRKLINGIRDKQSGKTILDFLKSDGFANRNFMQLIHDDSLTFKEDIQKAQVSGQGDSLHEHIANLAGSPAIKKGILQTVKVVDELVKVMGRHKPENIVIEMARENQTTQKGQKNSRERMKRIEEGIKELGSQILKEHPVENTQLQNEKLYLYYLQNGRDMYVDQELDINRLSDYDVDHIVPQSFLKDDSIDNKVLTRSDKARGKSDNVPSEEVVKKMKNYWRQLLNAKLITQRKFDNLTKAERGGLSELDKAGFIKRQLVETRQITKHVAQILDSRMNTKYDENDKLIREVKVITLKSKLVSDFRKDFQFYKVREINNYHHAHDAYLNAVVGTALIKKYPKLESEFVYGDYKVYDVRKMIAKSEQEIGKATAKYFFYSNIMNFFKTEITLANGEIRKRPLIETNGETGEIVWDKGRDFATVRKVLSMPQVNIVKKTEVQTGGFSKESILPKRNSDKLIARKKDWDPKKYGGFDSPTVAYSVLVVAKVEKGKSKKLKSVKELLGITIMERSSFEKNPIDFLEAKGYKEVKKDLIIKLPKYSLFELENGRKRMLASAGELQKGNELALPSKYVNFLYLASHYEKLKGSPEDNEQKQLFVEQHKHYLDEIIEQISEFSKRVILADANLDKVLSAYNKHRDKPIREQAENIIHLFTLTNLGAPAAFKYFDTTIDRKRYTSTKEVLDATLIHQSITGLYETRIDLSQLGGDGGPAPAPAPAPAPAPGGVLNLEEEYRLHEKPVPSSIDPSWLQLFPTVWAERAGMGLANQVPPVVVELRSGASPVAVRQYPMSKEAREGIRPHIQRFLDLGVLVPCQSPWNTPLLPVKKPGTNDYRPVQDLREINKRVQDIHPTVPNPYNLLSSLPPSHTWYSVLDLKDAFFCLKLHPNSQPLFAFEWRDPEKGNTGQLTWTRLPQGFKNSPTLFNEALHRDLAPFRALNPQVVLLQYVDDLLVAAPTYRDCKEGTQKLLQELSKLGYRVSAKKAQLCQKEVTYLGYLLKEGKRWLTPARKATVMKIPPPTTPRQVREFLGTAGFCRLWIPGFASLAAPLYPLTKPSIPFIWTEEHQKAFDRIKEALLSAPALALPDLTKPFTLYVDERAGVARGVLTQTLGPWRRPVAYLSKKLDPVASGWPTCLKAVAAVALLLKDADKLTLGQNVTVIASHSLESIVRQPPDRWMTNARMTHYQSLLLNERVSFAPPAVLNPATLLPVESEATPVHRCSEILAEETGTRRDLKDQPLPGVPAWYTDGSSFIAEGKRRAGAAIVDGKRTVWASSLPEGTSAQKAELVALTQALRLAEGKDINIYTDSRYAFATAHIHGAIYKQRGWLTSAGKDIKNKEEILALLEAIHLPKRVAIIHCPGHQKGNDPVATGNRRADEAAKQAALSTRVLAETTKPAGKRTADGSEFEKRTADGSEFESPKKKAKVE

SEQ ID NO: 4510 - protein, 2098 aa, synthetic construct
MPAAKRVKLDGGDKKYSIGLDIGTNSVGWAVITDEYKVPSKKFKVLGNTDRHSIKKNLIGALLFDSGETAEATRLKRTARRRYTRRKNRICYLQEIFSNEMAKVDDSFFHRLEESFLVEEDKKHERHPIFGNIVDEVAYHEKYPTIYHLRKKLVDSTDKADLRLIYLALAHMIKFRGHFLIEGDLNPDNSDVDKLFIQLVQTYNQLFEENPINASGVDAKAILSARLSKSRRLENLIAQLPGEKKNGLFGNLIALSLGLTPNFKSNFDLAEDAKLQLSKDTYDDDLDNLLAQIGDQYADLFLAAKNLSDAILLSDILRVNTEITKAPLSASMIKRYDEHHQDLTLLKALVRQQLPEKYKEIFFDQSKNGYAGYIDGGASQEEFYKFIKPILEKMDGTEELLVKLNREDLLRKQRTFDNGSIPHQIHLGELHAILRRQEDFYPFLKDNREKIEKILTFRIPYYVGPLARGNSRFAWMTRKSEETITPWNFEEVVDKGASAQSFIERMTNFDKNLPNEKVLPKHSLLYEYFTVYNELTKVKYVTEGMRKPAFLSGEQKKAIVDLLFKTNRKVTVKQLKEDYFKKIECFDSVEISGVEDRFNASLGTYHDLLKIIKDKDFLDNEENEDILEDIVLTLTLFEDREMIEERLKTYAHLFDDKVMKQLKRRRYTGWGRLSRKLINGIRDKQSGKTILDFLKSDGFANRNFMQLIHDDSLTFKEDIQKAQVSGQGDSLHEHIANLAGSPAIKKGILQTVKVVDELVKVMGRHKPENIVIEMARENQTTQKGQKNSRERMKRIEEGIKELGSQILKEHPVENTQLQNEKLYLYYLQNGRDMYVDQELDINRLSDYDVDHIVPQSFLKDDSIDNKVLTRSDKARGKSDNVPSEEVVKKMKNYWRQLLNAKLITQRKFDNLTKAERGGLSELDKAGFIKRQLVETRQITKHVAQILDSRMNTKYDENDKLIREVKVITLKSKLVSDFRKDFQFYKVREINNYHHAHDAYLNAVVGTALIKKYPKLESEFVYGDYKVYDVRKMIAKSEQEIGKATAKYFFYSNIMNFFKTEITLANGEIRKRPLIETNGETGEIVWDKGRDFATVRKVLSMPQVNIVKKTEVQTGGFSKESILPKRNSDKLIARKKDWDPKKYGGFDSPTVAYSVLVVAKVEKGKSKKLKSVKELLGITIMERSSFEKNPIDFLEAKGYKEVKKDLIIKLPKYSLFELENGRKRMLASAGELQKGNELALPSKYVNFLYLASHYEKLKGSPEDNEQKQLFVEQHKHYLDEIIEQISEFSKRVILADANLDKVLSAYNKHRDKPIREQAENIIHLFTLTNLGAPAAFKYFDTTIDRKRYTSTKEVLDATLIHQSITGLYETRIDLSQLGGDGGPAPAPAPAPAPAPGGTLNIEDEYRLHETSKEPDVPLGSTWLSDFPQAWAETGGMGLAVRQAPLIIPLKATSTPVSIKQYPMSQEARLGIKPHIQRLLDQGILVPCQSPWNTPLLPVKKPGTNDYRPVQDLREVNKRVEDIHPTVPNPYNLLSGLPPSHQWYTVLDLKDAFFCLRLHPTSQPLFAFEWRDPEMGISGQLTWTRLPQGFKNSPTLFNEALHRDLADFRIQHPDLILLQYVDDLLLAATSEQDCQRGTRALLQTLGNLGYRASAKKAQICQKQVKYLGYLLKEGQRWLTEARKETVMGQPTPKTPRQLREFLGTAGFCRLWIPGFAEMAAPLYPLTKPGTLFNWGPDQQKAYQEIKQALLTAPALGLPDLTKPFELFVDEKQGYAKGVLTQKLGPWRRPVAYLSKKLDPVAAGWPPCLRMVAAIAVLTKDAGKLTMGQPLVILAPHAVEALVKQPPDRWLSNARMTHYQAMLLDTDRVQFGPVVALNPATLLPLPEKEAPHDCLEILAETHGTRPDLTDQPIPDADYTWYTDGSSFLQEGQRRAGAAVTTETEVIWARALPAGTSAQRAELIALTQALKMAEGKKLNVYTDSRYAFATAHVHGEIYRRRGWLTSEGREIKNKNEILALLKALFLPKRLSIIHCPGHQKGNSAEARGNRMADQAAREAAMKAVLETSTLLAGKRTADGSEFEKRTADGSEFESPKKKAKVE

SEQ ID NO: 4511 - protein, 2091 aa, synthetic construct
MPAAKRVKLDGGDKKYSIGLDIGTNSVGWAVITDEYKVPSKKFKVLGNTDRHSIKKNLIGALLFDSGETAEATRLKRTARRRYTRRKNRICYLQEIFSNEMAKVDDSFFHRLEESFLVEEDKKHERHPIFGNIVDEVAYHEKYPTIYHLRKKLVDSTDKADLRLIYLALAHMIKFRGHFLIEGDLNPDNSDVDKLFIQLVQTYNQLFEENPINASGVDAKAILSARLSKSRRLENLIAQLPGEKKNGLFGNLIALSLGLTPNFKSNFDLAEDAKLQLSKDTYDDDLDNLLAQIGDQYADLFLAAKNLSDAILLSDILRVNTEITKAPLSASMIKRYDEHHQDLTLLKALVRQQLPEKYKEIFFDQSKNGYAGYIDGGASQEEFYKFIKPILEKMDGTEELLVKLNREDLLRKQRTFDNGSIPHQIHLGELHAILRRQEDFYPFLKDNREKIEKILTFRIPYYVGPLARGNSRFAWMTRKSEETITPWNFEEVVDKGASAQSFIERMTNFDKNLPNEKVLPKHSLLYEYFTVYNELTKVKYVTEGMRKPAFLSGEQKKAIVDLLFKTNRKVTVKQLKEDYFKKIECFDSVEISGVEDRFNASLGTYHDLLKIIKDKDFLDNEENEDILEDIVLTLTLFEDREMIEERLKTYAHLFDDKVMKQLKRRRYTGWGRLSRKLINGIRDKQSGKTILDFLKSDGFANRNFMQLIHDDSLTFKEDIQKAQVSGQGDSLHEHIANLAGSPAIKKGILQTVKVVDELVKVMGRHKPENIVIEMARENQTTQKGQKNSRERMKRIEEGIKELGSQILKEHPVENTQLQNEKLYLYYLQNGRDMYVDQELDINRLSDYDVDHIVPQSFLKDDSIDNKVLTRSDKARGKSDNVPSEEVVKKMKNYWRQLLNAKLITQRKFDNLTKAERGGLSELDKAGFIKRQLVETRQITKHVAQILDSRMNTKYDENDKLIREVKVITLKSKLVSDFRKDFQFYKVREINNYHHAHDAYLNAVVGTALIKKYPKLESEFVYGDYKVYDVRKMIAKSEQEIGKATAKYFFYSNIMNFFKTEITLANGEIRKRPLIETNGETGEIVWDKGRDFATVRKVLSMPQVNIVKKTEVQTGGFSKESILPKRNSDKLIARKKDWDPKKYGGFDSPTVAYSVLVVAKVEKGKSKKLKSVKELLGITIMERSSFEKNPIDFLEAKGYKEVKKDLIIKLPKYSLFELENGRKRMLASAGELQKGNELALPSKYVNFLYLASHYEKLKGSPEDNEQKQLFVEQHKHYLDEIIEQISEFSKRVILADANLDKVLSAYNKHRDKPIREQAENIIHLFTLTNLGAPAAFKYFDTTIDRKRYTSTKEVLDATLIHQSITGLYETRIDLSQLGGDGGGGGGGSGGLGIEDEYRLHETSTEPDVSLGSTWLSDFPQAWAETGGMGLAVRQAPLIIPLKATSTPVSIQQYPMSHEARLGIKPHIQRLLDQGILVPCQSPWNTPLLPVKKPGTNDYRPVQDLREVNKRVEDIHPTVPNPYNLLSGLPPSHQWYTVLDLKDAFFCLRLHPTSQPLFAFEWRDPGMGISGQLTWTRLPQGFKNSPTLFNEALHRDLADFRIQHPDLILLQYVDDILLAATSELDCQQGTRALLQTLGDLGYRASAKKAQICQKQVKYLGYLLREGQRWLTEARKETVMGQPVPKTPRQLREFLGKAGFCRLFIPGFAEMAAPLYPLTKPGTLFSWGPDQQKAYQEIKQALLTAPALGLPDLTKPFELFVDEKQGYAKGVLTQKLGPWRRPVAYLSKKLDPVAAGWPPCLRMVAAIAVLTKDAGKLTMGQPLVILAPHAVEALVKQPPDRWLSNARMTHYQAMLLDTDRVQFGPVVALNPATLLPLPEEGAPHDCLEILAETHGTRPDLTDQPIPDADHTWYTDGSSFLQEGQRKAGAAVTTETEVIWAGALPAGTSAQRAELIALTQALKMAEGKRLNVYTDSRYAFATAHIHGEIYRRRGWLTSEGREIKNKSEILALLKALFLPKRLSIIHCLGHQKGDSAEARGNRLADQAAREAAIKTPPDTSTLLIAGKRTADGSEFEKRTADGSEFESPKKKAKVE

SEQ ID NO: 4512 - protein, 2093 aa, synthetic construct
MPAAKRVKLDGGDKKYSIGLDIGTNSVGWAVITDEYKVPSKKFKVLGNTDRHSIKKNLIGALLFDSGETAEATRLKRTARRRYTRRKNRICYLQEIFSNEMAKVDDSFFHRLEESFLVEEDKKHERHPIFGNIVDEVAYHEKYPTIYHLRKKLVDSTDKADLRLIYLALAHMIKFRGHFLIEGDLNPDNSDVDKLFIQLVQTYNQLFEENPINASGVDAKAILSARLSKSRRLENLIAQLPGEKKNGLFGNLIALSLGLTPNFKSNFDLAEDAKLQLSKDTYDDDLDNLLAQIGDQYADLFLAAKNLSDAILLSDILRVNTEITKAPLSASMIKRYDEHHQDLTLLKALVRQQLPEKYKEIFFDQSKNGYAGYIDGGASQEEFYKFIKPILEKMDGTEELLVKLNREDLLRKQRTFDNGSIPHQIHLGELHAILRRQEDFYPFLKDNREKIEKILTFRIPYYVGPLARGNSRFAWMTRKSEETITPWNFEEVVDKGASAQSFIERMTNFDKNLPNEKVLPKHSLLYEYFTVYNELTKVKYVTEGMRKPAFLSGEQKKAIVDLLFKTNRKVTVKQLKEDYFKKIECFDSVEISGVEDRFNASLGTYHDLLKIIKDKDFLDNEENEDILEDIVLTLTLFEDREMIEERLKTYAHLFDDKVMKQLKRRRYTGWGRLSRKLINGIRDKQSGKTILDFLKSDGFANRNFMQLIHDDSLTFKEDIQKAQVSGQGDSLHEHIANLAGSPAIKKGILQTVKVVDELVKVMGRHKPENIVIEMARENQTTQKGQKNSRERMKRIEEGIKELGSQILKEHPVENTQLQNEKLYLYYLQNGRDMYVDQELDINRLSDYDVDHIVPQSFLKDDSIDNKVLTRSDKARGKSDNVPSEEVVKKMKNYWRQLLNAKLITQRKFDNLTKAERGGLSELDKAGFIKRQLVETRQITKHVAQILDSRMNTKYDENDKLIREVKVITLKSKLVSDFRKDFQFYKVREINNYHHAHDAYLNAVVGTALIKKYPKLESEFVYGDYKVYDVRKMIAKSEQEIGKATAKYFFYSNIMNFFKTEITLANGEIRKRPLIETNGETGEIVWDKGRDFATVRKVLSMPQVNIVKKTEVQTGGFSKESILPKRNSDKLIARKKDWDPKKYGGFDSPTVAYSVLVVAKVEKGKSKKLKSVKELLGITIMERSSFEKNPIDFLEAKGYKEVKKDLIIKLPKYSLFELENGRKRMLASAGELQKGNELALPSKYVNFLYLASHYEKLKGSPEDNEQKQLFVEQHKHYLDEIIEQISEFSKRVILADANLDKVLSAYNKHRDKPIREQAENIIHLFTLTNLGAPAAFKYFDTTIDRKRYTSTKEVLDATLIHQSITGLYETRIDLSQLGGDGGEAAAKGSSGGLGIEDEYRLHETSTEPDVSLGSTWLSDFPQAWAETGGMGLAVRQAPLIIPLKATSTPVSIQQYPMSHEARLGIKPHIQRLLDQGILVPCQSPWNTPLLPVKKPGTNDYRPVQDLREVNKRVEDIHPTVPNPYNLLSGLPPSHQWYTVLDLKDAFFCLRLHPTSQPLFAFEWRDPGMGISGQLTWTRLPQGFKNSPTLFNEALHRDLADFRIQHPDLILLQYVDDILLAATSELDCQQGTRALLQTLGDLGYRASAKKAQICQKQVKYLGYLLREGQRWLTEARKETVMGQPVPKTPRQLREFLGKAGFCRLFIPGFAEMAAPLYPLTKPGTLFSWGPDQQKAYQEIKQALLTAPALGLPDLTKPFELFVDEKQGYAKGVLTQKLGPWRRPVAYLSKKLDPVAAGWPPCLRMVAAIAVLTKDAGKLTMGQPLVILAPHAVEALVKQPPDRWLSNARMTHYQAMLLDTDRVQFGPVVALNPATLLPLPEEGAPHDCLEILAETHGTRPDLTDQPIPDADHTWYTDGSSFLQEGQRKAGAAVTTETEVIWAGALPAGTSAQRAELIALTQALKMAEGKRLNVYTDSRYAFATAHIHGEIYRRRGWLTSEGREIKNKSEILALLKALFLPKRLSIIHCLGHQKGDSAEARGNRLADQAAREAAIKTPPDTSTLLIAGKRTADGSEFEKRTADGSEFESPKKKAKVE

SEQ ID NO: 4513 - protein, 2091 aa, synthetic construct
MPAAKRVKLDGGDKKYSIGLDIGTNSVGWAVITDEYKVPSKKFKVLGNTDRHSIKKNLIGALLFDSGETAEATRLKRTARRRYTRRKNRICYLQEIFSNEMAKVDDSFFHRLEESFLVEEDKKHERHPIFGNIVDEVAYHEKYPTIYHLRKKLVDSTDKADLRLIYLALAHMIKFRGHFLIEGDLNPDNSDVDKLFIQLVQTYNQLFEENPINASGVDAKAILSARLSKSRRLENLIAQLPGEKKNGLFGNLIALSLGLTPNFKSNFDLAEDAKLQLSKDTYDDDLDNLLAQIGDQYADLFLAAKNLSDAILLSDILRVNTEITKAPLSASMIKRYDEHHQDLTLLKALVRQQLPEKYKEIFFDQSKNGYAGYIDGGASQEEFYKFIKPILEKMDGTEELLVKLNREDLLRKQRTFDNGSIPHQIHLGELHAILRRQEDFYPFLKDNREKIEKILTFRIPYYVGPLARGNSRFAWMTRKSEETITPWNFEEVVDKGASAQSFIERMTNFDKNLPNEKVLPKHSLLYEYFTVYNELTKVKYVTEGMRKPAFLSGEQKKAIVDLLFKTNRKVTVKQLKEDYFKKIECFDSVEISGVEDRFNASLGTYHDLLKIIKDKDFLDNEENEDILEDIVLTLTLFEDREMIEERLKTYAHLFDDKVMKQLKRRRYTGWGRLSRKLINGIRDKQSGKTILDFLKSDGFANRNFMQLIHDDSLTFKEDIQKAQVSGQGDSLHEHIANLAGSPAIKKGILQTVKVVDELVKVMGRHKPENIVIEMARENQTTQKGQKNSRERMKRIEEGIKELGSQILKEHPVENTQLQNEKLYLYYLQNGRDMYVDQELDINRLSDYDVDHIVPQSFLKDDSIDNKVLTRSDKARGKSDNVPSEEVVKKMKNYWRQLLNAKLITQRKFDNLTKAERGGLSELDKAGFIKRQLVETRQITKHVAQILDSRMNTKYDENDKLIREVKVITLKSKLVSDFRKDFQFYKVREINNYHHAHDAYLNAVVGTALIKKYPKLESEFVYGDYKVYDVRKMIAKSEQEIGKATAKYFFYSNIMNFFKTEITLANGEIRKRPLIETNGETGEIVWDKGRDFATVRKVLSMPQVNIVKKTEVQTGGFSKESILPKRNSDKLIARKKDWDPKKYGGFDSPTVAYSVLVVAKVEKGKSKKLKSVKELLGITIMERSSFEKNPIDFLEAKGYKEVKKDLIIKLPKYSLFELENGRKRMLASAGELQKGNELALPSKYVNFLYLASHYEKLKGSPEDNEQKQLFVEQHKHYLDEIIEQISEFSKRVILADANLDKVLSAYNKHRDKPIREQAENIIHLFTLTNLGAPAAFKYFDTTIDRKRYTSTKEVLDATLIHQSITGLYETRIDLSQLGGDGGPAPGSSGGTLNIEDEHRLHETSKEPDVSLGSTWLSDFPQAWAETGGMGLAVRQAPLIIPLKATSTPVSIKQYPMSQEARLGIKPHIQRLLDQGILVPCQSPWNTPLLPVKKPGTNDYRPVQDLREVNKRVEDIHPTVPNPYNLLSGLPPSHQWYTVLDLKDAFFCLRLHPTSQPLFAFEWRDPEMGISGQLTWTRLPQGFKNSPTLFNEALHRDLADFRIQHPDLILLQYVDDLLLAATSELDCQQGTRALLQTLGNLGYRASAKKAQICQKQVKYLGYLLKEGQRWLTEARKETVMGQPTPKTPRQLREFLGKAGFCRLFIPGFAEMAAPLYPLTKPGTLFNWGPDQQKAYQEIKQALLTAPALGLPDLTKPFELFVDEKQGYAKGVLTQKLGPWRRPVAYLSKKLDPVAAGWPPCLRMVAAIAVLTKDAGKLTMGQPLVILAPHAVEALVKQPPDRWLSNARMTHYQALLLDTDRVQFGPVVALNPATLLPLPEEGLQHNCLDILAEAHGTRPDLTDQPLPDADHTWYTDGSSLLQEGQRKAGAAVTTETEVIWAKALPAGTSAQRAELIALTQALKMAEGKKLNVYTDSRYAFATAHIHGEIYRRRGWLTSEGKEIKNKDEILALLKALFLPKRLSIIHCPGHQKGHSAEARGNRMADQAARKAAITETPDTSTLLAGKRTADGSEFEKRTADGSEFESPKKKAKVE

SEQ ID NO: 4514 - protein, 2091 aa, synthetic construct; identical to SEQ ID NO: 4513

SEQ ID NO: 4515 - protein, 2091 aa, synthetic construct
MPAAKRVKLDGGDKKYSIGLDIGTNSVGWAVITDEYKVPSKKFKVLGNTDRHSIKKNLIGALLFDSGETAEATRLKRTARRRYTRRKNRICYLQEIFSNEMAKVDDSFFHRLEESFLVEEDKKHERHPIFGNIVDEVAYHEKYPTIYHLRKKLVDSTDKADLRLIYLALAHMIKFRGHFLIEGDLNPDNSDVDKLFIQLVQTYNQLFEENPINASGVDAKAILSARLSKSRRLENLIAQLPGEKKNGLFGNLIALSLGLTPNFKSNFDLAEDAKLQLSKDTYDDDLDNLLAQIGDQYADLFLAAKNLSDAILLSDILRVNTEITKAPLSASMIKRYDEHHQDLTLLKALVRQQLPEKYKEIFFDQSKNGYAGYIDGGASQEEFYKFIKPILEKMDGTEELLVKLNREDLLRKQRTFDNGSIPHQIHLGELHAILRRQEDFYPFLKDNREKIEKILTFRIPYYVGPLARGNSRFAWMTRKSEETITPWNFEEVVDKGASAQSFIERMTNFDKNLPNEKVLPKHSLLYEYFTVYNELTKVKYVTEGMRKPAFLSGEQKKAIVDLLFKTNRKVTVKQLKEDYFKKIECFDSVEISGVEDRFNASLGTYHDLLKIIKDKDFLDNEENEDILEDIVLTLTLFEDREMIEERLKTYAHLFDDKVMKQLKRRRYTGWGRLSRKLINGIRDKQSGKTILDFLKSDGFANRNFMQLIHDDSLTFKEDIQKAQVSGQGDSLHEHIANLAGSPAIKKGILQTVKVVDELVKVMGRHKPENIVIEMARENQTTQKGQKNSRERMKRIEEGIKELGSQILKEHPVENTQLQNEKLYLYYLQNGRDMYVDQELDINRLSDYDVDHIVPQSFLKDDSIDNKVLTRSDKARGKSDNVPSEEVVKKMKNYWRQLLNAKLITQRKFDNLTKAERGGLSELDKAGFIKRQLVETRQITKHVAQILDSRMNTKYDENDKLIREVKVITLKSKLVSDFRKDFQFYKVREINNYHHAHDAYLNAVVGTALIKKYPKLESEFVYGDYKVYDVRKMIAKSEQEIGKATAKYFFYSNIMNFFKTEITLANGEIRKRPLIETNGETGEIVWDKGRDFATVRKVLSMPQVNIVKKTEVQTGGFSKESILPKRNSDKLIARKKDWDPKKYGGFDSPTVAYSVLVVAKVEKGKSKKLKSVKELLGITIMERSSFEKNPIDFLEAKGYKEVKKDLIIKLPKYSLFELENGRKRMLASAGELQKGNELALPSKYVNFLYLASHYEKLKGSPEDNEQKQLFVEQHKHYLDEIIEQISEFSKRVILADANLDKVLSAYNKHRDKPIREQAENIIHLFTLTNLGAPAAFKYFDTTIDRKRYTSTKEVLDATLIHQSITGLYETRIDLSQLGGDGGEAAAKPAPGGVLNLEEEYRLHEKPVPSSIDPSWLQLFPTVWAERAGMGLANQVPPVVVELRSGASPVAVRQYPMSKEAREGIRPHIQRFLDLGVLVPCQSPWNTPLLPVKKPGTNDYRPVQDLREINKRVQDIHPTVPNPYNLLSSLPPSHTWYSVLDLKDAFFCLKLHPNSQPLFAFEWRDPEKGNTGQLTWTRLPQGFKNSPTLFNEALHRDLAPFRALNPQVVLLQYVDDLLVAAPTYRDCKEGTQKLLQELSKLGYRVSAKKAQLCQKEVTYLGYLLKEGKRWLTPARKATVMKIPPPTTPRQVREFLGKAGFCRLFIPGFASLAAPLYPLTKPSIPFIWTEEHQKAFDRIKEALLSAPALALPDLTKPFTLYVDERAGVARGVLTQTLGPWRRPVAYLSKKLDPVASGWPTCLKAVAAVALLLKDADKLTLGQNVTVIASHSLESIVRQPPDRWMTNARMTHYQSLLLNERVSFAPPAVLNPATLLPVESEATPVHRCSEILAEETGTRRDLKDQPLPGVPAWYTDGSSFIAEGKRRAGAAIVDGKRTVWASSLPEGTSAQKAELVALTQALRLAEGKDINIYTDSRYAFATAHIHGAIYKQRGWLTSAGKDIKNKEEILALLEAIHLPKRVAIIHCPGHQKGNDPVATGNRRADEAAKQAALSTRVLAETTKPAGKRTADGSEFEKRTADGSEFESPKKKAKVE

SEQ ID NO: 4516 - protein, 2093 aa, synthetic construct
MPAAKRVKLDGGDKKYSIGLDIGTNSVGWAVITDEYKVPSKKFKVLGNTDRHSIKKNLIGALLFDSGETAEATRLKRTARRRYTRRKNRICYLQEIFSNEMAKVDDSFFHRLEESFLVEEDKKHERHPIFGNIVDEVAYHEKYPTIYHLRKKLVDSTDKADLRLIYLALAHMIKFRGHFLIEGDLNPDNSDVDKLFIQLVQTYNQLFEENPINASGVDAKAILSARLSKSRRLENLIAQLPGEKKNGLFGNLIALSLGLTPNFKSNFDLAEDAKLQLSKDTYDDDLDNLLAQIGDQYADLFLAAKNLSDAILLSDILRVNTEITKAPLSASMIKRYDEHHQDLTLLKALVRQQLPEKYKEIFFDQSKNGYAGYIDGGASQEEFYKFIKPILEKMDGTEELLVKLNREDLLRKQRTFDNGSIPHQIHLGELHAILRRQEDFYPFLKDNREKIEKILTFRIPYYVGPLARGNSRFAWMTRKSEETITPWNFEEVVDKGASAQSFIERMTNFDKNLPNEKVLPKHSLLYEYFTVYNELTKVKYVTEGMRKPAFLSGEQKKAIVDLLFKTNRKVTVKQLKEDYFKKIECFDSVEISGVEDRFNASLGTYHDLLKIIKDKDFLDNEENEDILEDIVLTLTLFEDREMIEERLKTYAHLFDDKVMKQLKRRRYTGWGRLSRKLINGIRDKQSGKTILDFLKSDGFANRNFMQLIHDDSLTFKEDIQKAQVSGQGDSLHEHIANLAGSPAIKKGILQTVKVVDELVKVMGRHKPENIVIEMARENQTTQKGQKNSRERMKRIEEGIKELGSQILKEHPVENTQLQNEKLYLYYLQNGRDMYVDQELDINRLSDYDVDHIVPQSFLKDDSIDNKVLTRSDKARGKSDNVPSEEVVKKMKNYWRQLLNAKLITQRKFDNLTKAERGGLSELDKAGFIKRQLVETRQITKHVAQILDSRMNTKYDENDKLIREVKVITLKSKLVSDFRKDFQFYKVREINNYHHAHDAYLNAVVGTALIKKYPKLESEFVYGDYKVYDVRKMIAKSEQEIGKATAKYFFYSNIMNFFKTEITLANGEIRKRPLIETNGETGEIVWDKGRDFATVRKVLSMPQVNIVKKTEVQTGGFSKESILPKRNSDKLIARKKDWDPKKYGGFDSPTVAYSVLVVAKVEKGKSKKLKSVKELLGITIMERSSFEKNPIDFLEAKGYKEVKKDLIIKLPKYSLFELENGRKRMLASAGELQKGNELALPSKYVNFLYLASHYEKLKGSPEDNEQKQLFVEQHKHYLDEIIEQISEFSKRVILADANLDKVLSAYNKHRDKPIREQAENIIHLFTLTNLGAPAAFKYFDTTIDRKRYTSTKEVLDATLIHQSITGLYETRIDLSQLGGDGGPAPEAAAKGGLGIEDEYRLHETSTEPDVSLGSTWLSDFPQAWAETGGMGLAVRQAPLIIPLKATSTPVSIQQYPMSHEARLGIKPHIQRLLDQGILVPCQSPWNTPLLPVKKPGTNDYRPVQDLREVNKRVEDIHPTVPNPYNLLSGLPPSHQWYTVLDLKDAFFCLRLHPTSQPLFAFEWRDPGMGISGQLTWTRLPQGFKNSPTLFNEALHRDLADFRIQHPDLILLQYVDDILLAATSELDCQQGTRALLQTLGDLGYRASAKKAQICQKQVKYLGYLLREGQRWLTEARKETVMGQPVPKTPRQLREFLGKAGFCRLFIPGFAEMAAPLYPLTKPGTLFSWGPDQQKAYQEIKQALLTAPALGLPDLTKPFELFVDEKQGYAKGVLTQKLGPWRRPVAYLSKKLDPVAAGWPPCLRMVAAIAVLTKDAGKLTMGQPLVILAPHAVEALVKQPPDRWLSNARMTHYQAMLLDTDRVQFGPVVALNPATLLPLPEEGAPHDCLEILAETHGTRPDLTDQPIPDADHTWYTDGSSFLQEGQRKAGAAVTTETEVIWAGALPAGTSAQRAELIALTQALKMAEGKRLNVYTDSRYAFATAHIHGEIYRRRGWLTSEGREIKNKSEILALLKALFLPKRLSIIHCLGHQKGDSAEARGNRLADQAAREAAIKTPPDTSTLLIAGKRTADGSEFEKRTADGSEFESPKKKAKVE

SEQ ID NO: 4517 - protein, 2094 aa, synthetic construct
MPAAKRVKLDGGDKKYSIGLDIGTNSVGWAVITDEYKVPSKKFKVLGNTDRHSIKKNLIGALLFDSGETAEATRLKRTARRRYTRRKNRICYLQEIFSNEMAKVDDSFFHRLEESFLVEEDKKHERHPIFGNIVDEVAYHEKYPTIYHLRKKLVDSTDKADLRLIYLALAHMIKFRGHFLIEGDLNPDNSDVDKLFIQLVQTYNQLFEENPINASGVDAKAILSARLSKSRRLENLIAQLPGEKKNGLFGNLIALSLGLTPNFKSNFDLAEDAKLQLSKDTYDDDLDNLLAQIGDQYADLFLAAKNLSDAILLSDILRVNTEITKAPLSASMIKRYDEHHQDLTLLKALVRQQLPEKYKEIFFDQSKNGYAGYIDGGASQEEFYKFIKPILEKMDGTEELLVKLNREDLLRKQRTFDNGSIPHQIHLGELHAILRRQEDFYPFLKDNREKIEKILTFRIPYYVGPLARGNSRFAWMTRKSEETITPWNFEEVVDKGASAQSFIERMTNFDKNLPNEKVLPKHSLLYEYFTVYNELTKVKYVTEGMRKPAFLSGEQKKAIVDLLFKTNRKVTVKQLKEDYFKKIECFDSVEISGVEDRFNASLGTYHDLLKIIKDKDFLDNEENEDILEDIVLTLTLFEDREMIEERLKTYAHLFDDKVMKQLKRRRYTGWGRLSRKLINGIRDKQSGKTILDFLKSDGFANRNFMQLIHDDSLTFKEDIQKAQVSGQGDSLHEHIANLAGSPAIKKGILQTVKVVDELVKVMGRHKPENIVIEMARENQTTQKGQKNSRERMKRIEEGIKELGSQILKEHPVENTQLQNEKLYLYYLQNGRDMYVDQELDINRLSDYDVDHIVPQSFLKDDSIDNKVLTRSDKARGKSDNVPSEEVVKKMKNYWRQLLNAKLITQRKFDNLTKAERGGLSELDKAGFIKRQLVETRQITKHVAQILDSRMNTKYDENDKLIREVKVITLKSKLVSDFRKDFQFYKVREINNYHHAHDAYLNAVVGTALIKKYPKLESEFVYGDYKVYDVRKMIAKSEQEIGKATAKYFFYSNIMNFFKTEITLANGEIRKRPLIETNGETGEIVWDKGRDFATVRKVLSMPQVNIVKKTEVQTGGFSKESILPKRNSDKLIARKKDWDPKKYGGFDSPTVAYSVLVVAKVEKGKSKKLKSVKELLGITIMERSSFEKNPIDFLEAKGYKEVKKDLIIKLPKYSLFELENGRKRMLASAGELQKGNELALPSKYVNFLYLASHYEKLKGSPEDNEQKQLFVEQHKHYLDEIIEQISEFSKRVILADANLDKVLSAYNKHRDKPIREQAENIIHLFTLTNLGAPAAFKYFDTTIDRKRYTSTKEVLDATLIHQSITGLYETRIDLSQLGGDGGGSSGGGGGSGGLGIEDEYRLHETSTEPDVSLGSTWLSDFPQAWAETGGMGLAVRQAPLIIPLKATSTPVSIQQYPMSHEARLGIKPHIQRLLDQGILVPCQSPWNTPLLPVKKPGTNDYRPVQDLREVNKRVEDIHPTVPNPYNLLSGLPPSHQWYTVLDLKDAFFCLRLHPTSQPLFAFEWRDPGMGISGQLTWTRLPQGFKNSPTLFNEALHRDLADFRIQHPDLILLQYVDDILLAATSELDCQQGTRALLQTLGDLGYRASAKKAQICQKQVKYLGYLLREGQRWLTEARKETVMGQPVPKTPRQLREFLGKAGFCRLFIPGFAEMAAPLYPLTKPGTLFSWGPDQQKAYQEIKQALLTAPALGLPDLTKPFELFVDEKQGYAKGVLTQKLGPWRRPVAYLSKKLDPVAAGWPPCLRMVAAIAVLTKDAGKLTMGQPLVILAPHAVEALVKQPPDRWLSNARMTHYQAMLLDTDRVQFGPVVALNPATLLPLPEEGAPHDCLEILAETHGTRPDLTDQPIPDADHTWYTDGSSFLQEGQRKAGAAVTTETEVIWAGALPAGTSAQRAELIALTQALKMAEGKRLNVYTDSRYAFATAHIHGEIYRRRGWLTSEGREIKNKSEILALLKALFLPKRLSIIHCLGHQKGDSAEARGNRLADQAAREAAIKTPPDTSTLLIAGKRTADGSEFEKRTADGSEFESPKKKAKVE

SEQ ID NO: 4518 - protein, 2094 aa, synthetic construct
MPAAKRVKLDGGDKKYSIGLDIGTNSVGWAVITDEYKVPSKKFKVLGNTDRHSIKKNLIGALLFDSGETAEATRLKRTARRRYTRRKNRICYLQEIFSNEMAKVDDSFFHRLEESFLVEEDKKHERHPIFGNIVDEVAYHEKYPTIYHLRKKLVDSTDKADLRLIYLALAHMIKFRGHFLIEGDLNPDNSDVDKLFIQLVQTYNQLFEENPINASGVDAKAILSARLSKSRRLENLIAQLPGEKKNGLFGNLIALSLGLTPNFKSNFDLAEDAKLQLSKDTYDDDLDNLLAQIGDQYADLFLAAKNLSDAILLSDILRVNTEITKAPLSASMIKRYDEHHQDLTLLKALVRQQLPEKYKEIFFDQSKNGYAGYIDGGASQEEFYKFIKPILEKMDGTEELLVKLNREDLLRKQRTFDNGSIPHQIHLGELHAILRRQEDFYPFLKDNREKIEKILTFRIPYYVGPLARGNSRFAWMTRKSEETITPWNFEEVVDKGASAQSFIERMTNFDKNLPNEKVLPKHSLLYEYFTVYNELTKVKYVTEGMRKPAFLSGEQKKAIVDLLFKTNRKVTVKQLKEDYFKKIECFDSVEISGVEDRFNASLGTYHDLLKIIKDKDFLDNEENEDILEDIVLTLTLFEDREMIEERLKTYAHLFDDKVMKQLKRRRYTGWGRLSRKLINGIRDKQSGKTILDFLKSDGFANRNFMQLIHDDSLTFKEDIQKAQVSGQGDSLHEHIANLAGSPAIKKGILQTVKVVDELVKVMGRHKPENIVIEMARENQTTQKGQKNSRERMKRIEEGIKELGSQILKEHPVENTQLQNEKLYLYYLQNGRDMYVDQELDINRLSDYDVDHIVPQSFLKDDSIDNKVLTRSDKARGKSDNVPSEEVVKKMKNYWRQLLNAKLITQRKFDNLTKAERGGLSELDKAGFIKRQLVETRQITKHVAQILDSRMNTKYDENDKLIREVKVITLKSKLVSDFRKDFQFYKVREINNYHHAHDAYLNAVVGTALIKKYPKLESEFVYGDYKVYDVRKMIAKSEQEIGKATAKYFFYSNIMNFFKTEITLANGEIRKRPLIETNGETGEIVWDKGRDFATVRKVLSMPQVNIVKKTEVQTGGFSKESILPKRNSDKLIARKKDWDPKKYGGFDSPTVAYSVLVVAKVEKGKSKKLKSVKELLGITIMERSSFEKNPIDFLEAKGYKEVKKDLIIKLPKYSLFELENGRKRMLASAGELQKGNELALPSKYVNFLYLASHYEKLKGSPEDNEQKQLFVEQHKHYLDEIIEQISEFSKRVILADANLDKVLSAYNKHRDKPIREQAENIIHLFTLTNLGAPAAFKYFDTTIDRKRYTSTKEVLDATLIHQSITGLYETRIDLSQLGGDGGGSSGGGGGSGGTLNIEDEYRLHETSKEPDVPLGSTWLSDFPQAWAETGGMGLAVRQAPLIIPLKATSTPVSIKQYPMSQEARLGIKPHIQRLLDQGILVPCQSPWNTPLLPVKKPGTNDYRPVQDLREVNKRVEDIHPTVPNPYNLLSGLPPSHQWYTVLDLKDAFFCLRLHPTSQPLFAFEWRDPEMGISGQLTWTRLPQGFKNSPTLFNEALHRDLADFRIQHPDLILLQYVDDLLLAATSEQDCQRGTRALLQTLGNLGYRASAKKAQICQKQVKYLGYLLKEGQRWLTEARKETVMGQPTPKTPRQLREFLGKAGFCRLFIPGFAEMAAPLYPLTKPGTLFNWGPDQQKAYQEIKQALLTAPALGLPDLTKPFELFVDEKQGYAKGVLTQKLGPWRRPVAYLSKKLDPVAAGWPPCLRMVAAIAVLTKDAGKLTMGQPLVILAPHAVEALVKQPPDRWLSNARMTHYQAMLLDTDRVQFGPVVALNPATLLPLPEKEAPHDCLEILAETHGTRPDLTDQPIPDADYTWYTDGSSFLQEGQRRAGAAVTTETEVIWARALPAGTSAQRAELIALTQALKMAEGKKLNVYTDSRYAFATAHVHGEIYRRRGWLTSEGREIKNKNEILALLKALFLPKRLSIIHCPGHQKGNSAEARGNRMADQAAREAAMKAVLETSTLLAGKRTADGSEFEKRTADGSEFESPKKKAKVE

SEQ ID NO: 4519 - protein, 2096 aa, synthetic construct
MPAAKRVKLDGGDKKYSIGLDIGTNSVGWAVITDEYKVPSKKFKVLGNTDRHSIKKNLIGALLFDSGETAEATRLKRTARRRYTRRKNRICYLQEIFSNEMAKVDDSFFHRLEESFLVEEDKKHERHPIFGNIVDEVAYHEKYPTIYHLRKKLVDSTDKADLRLIYLALAHMIKFRGHFLIEGDLNPDNSDVDKLFIQLVQTYNQLFEENPINASGVDAKAILSARLSKSRRLENLIAQLPGEKKNGLFGNLIALSLGLTPNFKSNFDLAEDAKLQLSKDTYDDDLDNLLAQIGDQYADLFLAAKNLSDAILLSDILRVNTEITKAPLSASMIKRYDEHHQDLTLLKALVRQQLPEKYKEIFFDQSKNGYAGYIDGGASQEEFYKFIKPILEKMDGTEELLVKLNREDLLRKQRTFDNGSIPHQIHLGELHAILRRQEDFYPFLKDNREKIEKILTFRIPYYVGPLARGNSRFAWMTRKSEETITPWNFEEVVDKGASAQSFIERMTNFDKNLPNEKVLPKHSLLYEYFTVYNELTKVKYVTEGMRKPAFLSGEQKKAIVDLLFKTNRKVTVKQLKEDYFKKIECFDSVEISGVEDRFNASLGTYHDLLKIIKDKDFLDNEENEDILEDIVLTLTLFEDREMIEERLKTYAHLFDDKVMKQLKRRRYTGWGRLSRKLINGIRDKQSGKTILDFLKSDGFANRNFMQLIHDDSLTFKEDIQKAQVSGQGDSLHEHIANLAGSPAIKKGILQTVKVVDELVKVMGRHKPENIVIEMARENQTTQKGQKNSRERMKRIEEGIKELGSQILKEHPVENTQLQNEKLYLYYLQNGRDMYVDQELDINRLSDYDVDHIVPQSFLKDDSIDNKVLTRSDKARGKSDNVPSEEVVKKMKNYWRQLLNAKLITQRKFDNLTKAERGGLSELDKAGFIKRQLVETRQITKHVAQILDSRMNTKYDENDKLIREVKVITLKSKLVSDFRKDFQFYKVREINNYHHAHDAYLNAVVGTALIKKYPKLESEFVYGDYKVYDVRKMIAKSEQEIGKATAKYFFYSNIMNFFKTEITLANGEIRKRPLIETNGETGEIVWDKGRDFATVRKVLSMPQVNIVKKTEVQTGGFSKESILPKRNSDKLIARKKDWDPKKYGGFDSPTVAYSVLVVAKVEKGKSKKLKSVKELLGITIMERSSFEKNPIDFLEAKGYKEVKKDLIIKLPKYSLFELENGRKRMLASAGELQKGNELALPSKYVNFLYLASHYEKLKGSPEDNEQKQLFVEQHKHYLDEIIEQISEFSKRVILADANLDKVLSAYNKHRDKPIREQAENIIHLFTLTNLGAPAAFKYFDTTIDRKRYTSTKEVLDATLIHQSITGLYETRIDLSQLGGDGGGGGGGSEAAAKGGTLNIEDEYRLHETSKEPDVPLGSTWLSDFPQAWAETGGMGLAVRQAPLIIPLKATSTPVSIKQYPMSQEARLGIKPHIQRLLDQGILVPCQSPWNTPLLPVKKPGTNDYRPVQDLREVNKRVEDIHPTVPNPYNLLSGLPPSHQWYTVLDLKDAFFCLRLHPTSQPLFAFEWRDPEMGISGQLTWTRLPQGFKNSPTLFNEALHRDLADFRIQHPDLILLQYVDDLLLAATSEQDCQRGTRALLQTLGNLGYRASAKKAQICQKQVKYLGYLLKEGQRWLTEARKETVMGQPTPKTPRQLREFLGKAGFCRLFIPGFAEMAAPLYPLTKPGTLFNWGPDQQKAYQEIKQALLTAPALGLPDLTKPFELFVDEKQGYAKGVLTQKLGPWRRPVAYLSKKLDPVAAGWPPCLRMVAAIAVLTKDAGKLTMGQPLVILAPHAVEALVKQPPDRWLSNARMTHYQAMLLDTDRVQFGPVVALNPATLLPLPEKEAPHDCLEILAETHGTRPDLTDQPIPDADYTWYTDGSSFLQEGQRRAGAAVTTETEVIWARALPAGTSAQRAELIALTQALKMAEGKKLNVYTDSRYAFATAHVHGEIYRRRGWLTSEGREIKNKNEILALLKALFLPKRLSIIHCPGHQKGNSAEARGNRMADQAAREAAMKAVLETSTLLAGKRTADGSEFEKRTADGSEFESPKKKAKVE

SEQ ID NO: 4520 - protein, 2094 aa, synthetic construct
MPAAKRVKLDGGDKKYSIGLDIGTNSVGWAVITDEYKVPSKKFKVLGNTDRHSIKKNLIGALLFDSGETAEATRLKRTARRRYTRRKNRICYLQEIFSNEMAKVDDSFFHRLEESFLVEEDKKHERHPIFGNIVDEVAYHEKYPTIYHLRKKLVDSTDKADLRLIYLALAHMIKFRGHFLIEGDLNPDNSDVDKLFIQLVQTYNQLFEENPINASGVDAKAILSARLSKSRRLENLIAQLPGEKKNGLFGNLIALSLGLTPNFKSNFDLAEDAKLQLSKDTYDDDLDNLLAQIGDQYADLFLAAKNLSDAILLSDILRVNTEITKAPLSASMIKRYDEHHQDLTLLKALVRQQLPEKYKEIFFDQSKNGYAGYIDGGASQEEFYKFIKPILEKMDGTEELLVKLNREDLLRKQRTFDNGSIPHQIHLGELHAILRRQEDFYPFLKDNREKIEKILTFRIPYYVGPLARGNSRFAWMTRKSEETITPWNFEEVVDKGASAQSFIERMTNFDKNLPNEKVLPKHSLLYEYFTVYNELTKVKYVTEGMRKPAFLSGEQKKAIVDLLFKTNRKVTVKQLKEDYFKKIECFDSVEISGVEDRFNASLGTYHDLLKIIKDKDFLDNEENEDILEDIVLTLTLFEDREMIEERLKTYAHLFDDKVMKQLKRRRYTGWGRLSRKLINGIRDKQSGKTILDFLKSDGFANRNFMQLIHDDSLTFKEDIQKAQVSGQGDSLHEHIANLAGSPAIKKGILQTVKVVDELVKVMGRHKPENIVIEMARENQTTQKGQKNSRERMKRIEEGIKELGSQILKEHPVENTQLQNEKLYLYYLQNGRDMYVDQELDINRLSDYDVDHIVPQSFLKDDSIDNKVLTRSDKARGKSDNVPSEEVVKKMKNYWRQLLNAKLITQRKFDNLTKAERGGLSELDKAGFIKRQLVETRQITKHVAQILDSRMNTKYDENDKLIREVKVITLKSKLVSDFRKDFQFYKVREINNYHHAHDAYLNAVVGTALIKKYPKLESEFVYGDYKVYDVRKMIAKSEQEIGKATAKYFFYSNIMNFFKTEITLANGEIRKRPLIETNGETGEIVWDKGRDFATVRKVLSMPQVNIVKKTEVQTGGFSKESILPKRNSDKLIARKKDWDPKKYGGFDSPTVAYSVLVVAKVEKGKSKKLKSVKELLGITIMERSSFEKNPIDFLEAKGYKEVKKDLIIKLPKYSLFELENGRKRMLASAGELQKGNELALPSKYVNFLYLASHYEKLKGSPEDNEQKQLFVEQHKHYLDEIIEQISEFSKRVILADANLDKVLSAYNKHRDKPIREQAENIIHLFTLTNLGAPAAFKYFDTTIDRKRYTSTKEVLDATLIHQSITGLYETRIDLSQLGGDGGGGGGGSPAPGGTLNLEDEYRLYETSAEPEVSPGSTWLSDFPQAWAETGGMGLAVRQAPLIIPLKATSTPVSIKQYPMSQEAKLGIKPHIQRLLDQGILVPCQSPWNTPLLPVKKPGTNDYRPVQDLREVNKRVEDIHPTVPNPYNLLSGLPPSHRWYTVLDLKDAFFCLRLHPTSQPLFAFEWRDPGMGISGQLTWTRLPQGFKNSPTLFNEALHRDLADFRIQHPDLILLQYVDDILLAATSELDCQQGTRALLLTLGNLGYRASAKKAQLCQKQVKYLGYLLKEGQRWLTEARKETVMGQPTPKTPRQLREFLGKAGFCRLFIPGFAEMAAPLYPLTKPGTLFNWGPDQQKAYQEIKQALLTAPALGLPDLTKPFELFVDEKQGYAKGVLTQKLGPWRRPVAYLSKKLDPVAAGWPPCLRMVAAIAVLRKDAGKLTMGQPLVILAPHAVEALVKQPPDRWLSNARMTHYQAMLLDTDRVQFGPVVALNPATLLPLPEEGAPHDCLEILAETHGTRPDLTDQPIPDADHTWYTDGSSFLQEGQRKAGAAVTTETEVIWARALPAGTSAQRAELIALTQALKMAEGKRLNVYTDSRYAFATAHIHGEIYRRRGWLTSEGREIKNKSEILALLKALFLPKRLSIIHCLGHQKGDSAEARGNRLADQAAREAAIKTPPDTSTLLAGKRTADGSEFEKRTADGSEFESPKKKAKVE

SEQ ID NO: 4521 - protein, 2094 aa, synthetic construct
MPAAKRVKLDGGDKKYSIGLDIGTNSVGWAVITDEYKVPSKKFKVLGNTDRHSIKKNLIGALLFDSGETAEATRLKRTARRRYTRRKNRICYLQEIFSNEMAKVDDSFFHRLEESFLVEEDKKHERHPIFGNIVDEVAYHEKYPTIYHLRKKLVDSTDKADLRLIYLALAHMIKFRGHFLIEGDLNPDNSDVDKLFIQLVQTYNQLFEENPINASGVDAKAILSARLSKSRRLENLIAQLPGEKKNGLFGNLIALSLGLTPNFKSNFDLAEDAKLQLSKDTYDDDLDNLLAQIGDQYADLFLAAKNLSDAILLSDILRVNTEITKAPLSASMIKRYDEHHQDLTLLKALVRQQLPEKYKEIFFDQSKNGYAGYIDGGASQEEFYKFIKPILEKMDGTEELLVKLNREDLLRKQRTFDNGSIPHQIHLGELHAILRRQEDFYPFLKDNREKIEKILTFRIPYYVGPLARGNSRFAWMTRKSEETITPWNFEEVVDKGASAQSFIERMTNFDKNLPNEKVLPKHSLLYEYFTVYNELTKVKYVTEGMRKPAFLSGEQKKAIVDLLFKTNRKVTVKQLKEDYFKKIECFDSVEISGVEDRFNASLGTYHDLLKIIKDKDFLDNEENEDILEDIVLTLTLFEDREMIEERLKTYAHLFDDKVMKQLKRRRYTGWGRLSRKLINGIRDKQSGKTILDFLKSDGFANRNFMQLIHDDSLTFKEDIQKAQVSGQGDSLHEHIANLAGSPAIKKGILQTVKVVDELVKVMGRHKPENIVIEMARENQTTQKGQKNSRERMKRIEEGIKELGSQILKEHPVENTQLQNEKLYLYYLQNGRDMYVDQELDINRLSDYDVDHIVPQSFLKDDSIDNKVLTRSDKARGKSDNVPSEEVVKKMKNYWRQLLNAKLITQRKFDNLTKAERGGLSELDKAGFIKRQLVETRQITKHVAQILDSRMNTKYDENDKLIREVKVITLKSKLVSDFRKDFQFYKVREINNYHHAHDAYLNAVVGTALIKKYPKLESEFVYGDYKVYDVRKMIAKSEQEIGKATAKYFFYSNIMNFFKTEITLANGEIRKRPLIETNGETGEIVWDKGRDFATVRKVLSMPQVNIVKKTEVQTGGFSKESILPKRNSDKLIARKKDWDPKKYGGFDSPTVAYSVLVVAKVEKGKSKKLKSVKELLGITIMERSSFEKNPIDFLEAKGYKEVKKDLIIKLPKYSLFELENGRKRMLASAGELQKGNELALPSKYVNFLYLASHYEKLKGSPEDNEQKQLFVEQHKHYLDEIIEQISEFSKRVILADANLDKVLSAYNKHRDKPIREQAENIIHLFTLTNLGAPAAFKYFDTTIDRKRYTSTKEVLDATLIHQSITGLYETRIDLSQLGGDGGPAPGGGGGSGGTLNIEDEHRLHETSKEPDVSLGSTWLSDFPQAWAETGGMGLAVRQAPLIIPLKATSTPVSIKQYPMSQEARLGIKPHIQRLLDQGILVPCQSPWNTPLLPVKKPGTNDYRPVQDLREVNKRVEDIHPTVPNPYNLLSGLPPSHQWYTVLDLKDAFFCLRLHPTSQPLFAFEWRDPEMGISGQLTWTRLPQGFKNSPTLFNEALHRDLADFRIQHPDLILLQYVDDLLLAATSELDCQQGTRALLQTLGNLGYRASAKKAQICQKQVKYLGYLLKEGQRWLTEARKETVMGQPTPKTPRQLREFLGKAGFCRLFIPGFAEMAAPLYPLTKPGTLFNWGPDQQKAYQEIKQALLTAPALGLPDLTKPFELFVDEKQGYAKGVLTQKLGPWRRPVAYLSKKLDPVAAGWPPCLRMVAAIAVLTKDAGKLTMGQPLVILAPHAVEALVKQPPDRWLSNARMTHYQALLLDTDRVQFGPVVALNPATLLPLPEEGLQHNCLDILAEAHGTRPDLTDQPLPDADHTWYTDGSSLLQEGQRKAGAAVTTETEVIWAKALPAGTSAQRAELIALTQALKMAEGKKLNVYTDSRYAFATAHIHGEIYRRRGWLTSEGKEIKNKDEILALLKALFLPKRLSIIHCPGHQKGHSAEARGNRMADQAARKAAITETPDTSTLLAGKRTADGSEFEKRTADGSEFESPKKKAKVE

SEQ ID NO: 4522 - protein, 2096 aa, synthetic construct
MPAAKRVKLDGGDKKYSIGLDIGTNSVGWAVITDEYKVPSKKFKVLGNTDRHSIKKNLIGALLFDSGETAEATRLKRTARRRYTRRKNRICYLQEIFSNEMAKVDDSFFHRLEESFLVEEDKKHERHPIFGNIVDEVAYHEKYPTIYHLRKKLVDSTDKADLRLIYLALAHMIKFRGHFLIEGDLNPDNSDVDKLFIQLVQTYNQLFEENPINASGVDAKAILSARLSKSRRLENLIAQLPGEKKNGLFGNLIALSLGLTPNFKSNFDLAEDAKLQLSKDTYDDDLDNLLAQIGDQYADLFLAAKNLSDAILLSDILRVNTEITKAPLSASMIKRYDEHHQDLTLLKALVRQQLPEKYKEIFFDQSKNGYAGYIDGGASQEEFYKFIKPILEKMDGTEELLVKLNREDLLRKQRTFDNGSIPHQIHLGELHAILRRQEDFYPFLKDNREKIEKILTFRIPYYVGPLARGNSRFAWMTRKSEETITPWNFEEVVDKGASAQSFIERMTNFDKNLPNEKVLPKHSLLYEYFTVYNELTKVKYVTEGMRKPAFLSGEQKKAIVDLLFKTNRKVTVKQLKEDYFKKIECFDSVEISGVEDRFNASLGTYHDLLKIIKDKDFLDNEENEDILEDIVLTLTLFEDREMIEERLKTYAHLFDDKVMKQLKRRRYTGWGRLSRKLINGIRDKQSGKTILDFLKSDGFANRNFMQLIHDDSLTFKEDIQKAQVSGQGDSLHEHIANLAGSPAIKKGILQTVKVVDELVKVMGRHKPENIVIEMARENQTTQKGQKNSRERMKRIEEGIKELGSQILKEHPVENTQLQNEKLYLYYLQNGRDMYVDQELDINRLSDYDVDHIVPQSFLKDDSIDNKVLTRSDKARGKSDNVPSEEVVKKMKNYWRQLLNAKLITQRKFDNLTKAERGGLSELDKAGFIKRQLVETRQITKHVAQILDSRMNTKYDENDKLIREVKVITLKSKLVSDFRKDFQFYKVREINNYHHAHDAYLNAVVGTALIKKYPKLESEFVYGDYKVYDVRKMIAKSEQEIGKATAKYFFYSNIMNFFKTEITLANGEIRKRPLIETNGETGEIVWDKGRDFATVRKVLSMPQVNIVKKTEVQTGGFSKESILPKRNSDKLIARKKDWDPKKYGGFDSPTVAYSVLVVAKVEKGKSKKLKSVKELLGITIMERSSFEKNPIDFLEAKGYKEVKKDLIIKLPKYSLFELENGRKRMLASAGELQKGNELALPSKYVNFLYLASHYEKLKGSPEDNEQKQLFVEQHKHYLDEIIEQISEFSKRVILADANLDKVLSAYNKHRDKPIREQAENIIHLFTLTNLGAPAAFKYFDTTIDRKRYTSTKEVLDATLIHQSITGLYETRIDLSQLGGDGGGGSEAAAKGSSGGTLNIEDEYRLHETSKEPDVPLGSTWLSDFPQAWAETGGMGLAVRQAPLIIPLKATSTPVSIKQYPMSQEARLGIKPHIQRLLDQGILVPCQSPWNTPLLPVKKPGTNDYRPVQDLREVNKRVEDIHPTVPNPYNLLSGLPPSHQWYTVLDLKDAFFCLRLHPTSQPLFAFEWRDPEMGISGQLTWTRLPQGFKNSPTLFNEALHRDLADFRIQHPDLILLQYVDDLLLAATSEQDCQRGTRALLQTLGNLGYRASAKKAQICQKQVKYLGYLLKEGQRWLTEARKETVMGQPTPKTPRQLREFLGKAGFCRLFIPGFAEMAAPLYPLTKPGTLFNWGPDQQKAYQEIKQALLTAPALGLPDLTKPFELFVDEKQGYAKGVLTQKLGPWRRPVAYLSKKLDPVAAGWPPCLRMVAAIAVLTKDAGKLTMGQPLVILAPHAVEALVKQPPDRWLSNARMTHYQAMLLDTDRVQFGPVVALNPATLLPLPEKEAPHDCLEILAETHGTRPDLTDQPIPDADYTWYTDGSSFLQEGQRRAGAAVTTETEVIWARALPAGTSAQRAELIALTQALKMAEGKKLNVYTDSRYAFATAHVHGEIYRRRGWLTSEGREIKNKNEILALLKALFLPKRLSIIHCPGHQKGNSAEARGNRMADQAAREAAMKAVLETSTLLAGKRTADGSEFEKRTADGSEFESPKKKAKVE

SEQ ID NO: 4523 - protein, 2096 aa, synthetic construct
MPAAKRVKLDGGDKKYSIGLDIGTNSVGWAVITDEYKVPSKKFKVLGNTDRHSIKKNLIGALLFDSGETAEATRLKRTARRRYTRRKNRICYLQEIFSNEMAKVDDSFFHRLEESFLVEEDKKHERHPIFGNIVDEVAYHEKYPTIYHLRKKLVDSTDKADLRLIYLALAHMIKFRGHFLIEGDLNPDNSDVDKLFIQLVQTYNQLFEENPINASGVDAKAILSARLSKSRRLENLIAQLPGEKKNGLFGNLIALSLGLTPNFKSNFDLAEDAKLQLSKDTYDDDLDNLLAQIGDQYADLFLAAKNLSDAILLSDILRVNTEITKAPLSASMIKRYDEHHQDLTLLKALVRQQLPEKYKEIFFDQSKNGYAGYIDGGASQEEFYKFIKPILEKMDGTEELLVKLNREDLLRKQRTFDNGSIPHQIHLGELHAILRRQEDFYPFLKDNREKIEKILTFRIPYYVGPLARGNSRFAWMTRKSEETITPWNFEEVVDKGASAQSFIERMTNFDKNLPNEKVLPKHSLLYEYFTVYNELTKVKYVTEGMRKPAFLSGEQKKAIVDLLFKTNRKVTVKQLKEDYFKKIECFDSVEISGVEDRFNASLGTYHDLLKIIKDKDFLDNEENEDILEDIVLTLTLFEDREMIEERLKTYAHLFDDKVMKQLKRRRYTGWGRLSRKLINGIRDKQSGKTILDFLKSDGFANRNFMQLIHDDSLTFKEDIQKAQVSGQGDSLHEHIANLAGSPAIKKGILQTVKVVDELVKVMGRHKPENIVIEMARENQTTQKGQKNSRERMKRIEEGIKELGSQILKEHPVENTQLQNEKLYLYYLQNGRDMYVDQELDINRLSDYDVDHIVPQSFLKDDSIDNKVLTRSDKARGKSDNVPSEEVVKKMKNYWRQLLNAKLITQRKFDNLTKAERGGLSELDKAGFIKRQLVETRQITKHVAQILDSRMNTKYDENDKLIREVKVITLKSKLVSDFRKDFQFYKVREINNYHHAHDAYLNAVVGTALIKKYPKLESEFVYGDYKVYDVRKMIAKSEQEIGKATAKYFFYSNIMNFFKTEITLANGEIRKRPLIETNGETGEIVWDKGRDFATVRKVLSMPQVNIVKKTEVQTGGFSKESILPKRNSDKLIARKKDWDPKKYGGFDSPTVAYSVLVVAKVEKGKSKKLKSVKELLGITIMERSSFEKNPIDFLEAKGYKEVKKDLIIKLPKYSLFELENGRKRMLASAGELQKGNELALPSKYVNFLYLASHYEKLKGSPEDNEQKQLFVEQHKHYLDEIIEQISEFSKRVILADANLDKVLSAYNKHRDKPIREQAENIIHLFTLTNLGAPAAFKYFDTTIDRKRYTSTKEVLDATLIHQSITGLYETRIDLSQLGGDGGEAAAKGGSGSSGGTLNIEDEYRLHETSKEPDVPLGSTWLSDFPQAWAETGGMGLAVRQAPLIIPLKATSTPVSIKQYPMSQEARLGIKPHIQRLLDQGILVPCQSPWNTPLLPVKKPGTNDYRPVQDLREVNKRVEDIHPTVPNPYNLLSGLPPSHQWYTVLDLKDAFFCLRLHPTSQPLFAFEWRDPEMGISGQLTWTRLPQGFKNSPTLFNEALHRDLADFRIQHPDLILLQYVDDLLLAATSEQDCQRGTRALLQTLGNLGYRASAKKAQICQKQVKYLGYLLKEGQRWLTEARKETVMGQPTPKTPRQLREFLGTAGFCRLWIPGFAEMAAPLYPLTKPGTLFNWGPDQQKAYQEIKQALLTAPALGLPDLTKPFELFVDEKQGYAKGVLTQKLGPWRRPVAYLSKKLDPVAAGWPPCLRMVAAIAVLTKDAGKLTMGQPLVILAPHAVEALVKQPPDRWLSNARMTHYQAMLLDTDRVQFGPVVALNPATLLPLPEKEAPHDCLEILAETHGTRPDLTDQPIPDADYTWYTDGSSFLQEGQRRAGAAVTTETEVIWARALPAGTSAQRAELIALTQALKMAEGKKLNVYTDSRYAFATAHVHGEIYRRRGWLTSEGREIKNKNEILALLKALFLPKRLSIIHCPGHQKGNSAEARGNRMADQAAREAAMKAVLETSTLLAGKRTADGSEFEKRTADGSEFESPKKKAKVE

SEQ ID NO: 4524 - protein, 2096 aa, synthetic construct
MPAAKRVKLDGGDKKYSIGLDIGTNSVGWAVITDEYKVPSKKFKVLGNTDRHSIKKNLIGALLFDSGETAEATRLKRTARRRYTRRKNRICYLQEIFSNEMAKVDDSFFHRLEESFLVEEDKKHERHPIFGNIVDEVAYHEKYPTIYHLRKKLVDSTDKADLRLIYLALAHMIKFRGHFLIEGDLNPDNSDVDKLFIQLVQTYNQLFEENPINASGVDAKAILSARLSKSRRLENLIAQLPGEKKNGLFGNLIALSLGLTPNFKSNFDLAEDAKLQLSKDTYDDDLDNLLAQIGDQYADLFLAAKNLSDAILLSDILRVNTEITKAPLSASMIKRYDEHHQDLTLLKALVRQQLPEKYKEIFFDQSKNGYAGYIDGGASQEEFYKFIKPILEKMDGTEELLVKLNREDLLRKQRTFDNGSIPHQIHLGELHAILRRQEDFYPFLKDNREKIEKILTFRIPYYVGPLARGNSRFAWMTRKSEETITPWNFEEVVDKGASAQSFIERMTNFDKNLPNEKVLPKHSLLYEYFTVYNELTKVKYVTEGMRKPAFLSGEQKKAIVDLLFKTNRKVTVKQLKEDYFKKIECFDSVEISGVEDRFNASLGTYHDLLKIIKDKDFLDNEENEDILEDIVLTLTLFEDREMIEERLKTYAHLFDDKVMKQLKRRRYTGWGRLSRKLINGIRDKQSGKTILDFLKSDGFANRNFMQLIHDDSLTFKEDIQKAQVSGQGDSLHEHIANLAGSPAIKKGILQTVKVVDELVKVMGRHKPENIVIEMARENQTTQKGQKNSRERMKRIEEGIKELGSQILKEHPVENTQLQNEKLYLYYLQNGRDMYVDQELDINRLSDYDVDHIVPQSFLKDDSIDNKVLTRSDKARGKSDNVPSEEVVKKMKNYWRQLLNAKLITQRKFDNLTKAERGGLSELDKAGFIKRQLVETRQITKHVAQILDSRMNTKYDENDKLIREVKVITLKSKLVSDFRKDFQFYKVREINNYHHAHDAYLNAVVGTALIKKYPKLESEFVYGDYKVYDVRKMIAKSEQEIGKATAKYFFYSNIMNFFKTEITLANGEIRKRPLIETNGETGEIVWDKGRDFATVRKVLSMPQVNIVKKTEVQTGGFSKESILPKRNSDKLIARKKDWDPKKYGGFDSPTVAYSVLVVAKVEKGKSKKLKSVKELLGITIMERSSFEKNPIDFLEAKGYKEVKKDLIIKLPKYSLFELENGRKRMLASAGELQKGNELALPSKYVNFLYLASHYEKLKGSPEDNEQKQLFVEQHKHYLDEIIEQISEFSKRVILADANLDKVLSAYNKHRDKPIREQAENIIHLFTLTNLGAPAAFKYFDTTIDRKRYTSTKEVLDATLIHQSITGLYETRIDLSQLGGDGGEAAAKGSSGGSGGTLNIEDEYRLHETSKEPDVPLGSTWLSDFPQAWAETGGMGLAVRQAPLIIPLKATSTPVSIKQYPMSQEARLGIKPHIQRLLDQGILVPCQSPWNTPLLPVKKPGTNDYRPVQDLREVNKRVEDIHPTVPNPYNLLSGLPPSHQWYTVLDLKDAFFCLRLHPTSQPLFAFEWRDPEMGISGQLTWTRLPQGFKNSPTLFNEALHRDLADFRIQHPDLILLQYVDDLLLAATSEQDCQRGTRALLQTLGNLGYRASAKKAQICQKQVKYLGYLLKEGQRWLTEARKETVMGQPTPKTPRQLREFLGTAGFCRLWIPGFAEMAAPLYPLTKPGTLFNWGPDQQKAYQEIKQALLTAPALGLPDLTKPFELFVDEKQGYAKGVLTQKLGPWRRPVAYLSKKLDPVAAGWPPCLRMVAAIAVLTKDAGKLTMGQPLVILAPHAVEALVKQPPDRWLSNARMTHYQAMLLDTDRVQFGPVVALNPATLLPLPEKEAPHDCLEILAETHGTRPDLTDQPIPDADYTWYTDGSSFLQEGQRRAGAAVTTETEVIWARALPAGTSAQRAELIALTQALKMAEGKKLNVYTDSRYAFATAHVHGEIYRRRGWLTSEGREIKNKNEILALLKALFLPKRLSIIHCPGHQKGNSAEARGNRMADQAAREAAMKAVLETSTLLAGKRTADGSEFEKRTADGSEFESPKKKAKVE

SEQ ID NO: 4525 - protein, 2094 aa, synthetic construct
MPAAKRVKLDGGDKKYSIGLDIGTNSVGWAVITDEYKVPSKKFKVLGNTDRHSIKKNLIGALLFDSGETAEATRLKRTARRRYTRRKNRICYLQEIFSNEMAKVDDSFFHRLEESFLVEEDKKHERHPIFGNIVDEVAYHEKYPTIYHLRKKLVDSTDKADLRLIYLALAHMIKFRGHFLIEGDLNPDNSDVDKLFIQLVQTYNQLFEENPINASGVDAKAILSARLSKSRRLENLIAQLPGEKKNGLFGNLIALSLGLTPNFKSNFDLAEDAKLQLSKDTYDDDLDNLLAQIGDQYADLFLAAKNLSDAILLSDILRVNTEITKAPLSASMIKRYDEHHQDLTLLKALVRQQLPEKYKEIFFDQSKNGYAGYIDGGASQEEFYKFIKPILEKMDGTEELLVKLNREDLLRKQRTFDNGSIPHQIHLGELHAILRRQEDFYPFLKDNREKIEKILTFRIPYYVGPLARGNSRFAWMTRKSEETITPWNFEEVVDKGASAQSFIERMTNFDKNLPNEKVLPKHSLLYEYFTVYNELTKVKYVTEGMRKPAFLSGEQKKAIVDLLFKTNRKVTVKQLKEDYFKKIECFDSVEISGVEDRFNASLGTYHDLLKIIKDKDFLDNEENEDILEDIVLTLTLFEDREMIEERLKTYAHLFDDKVMKQLKRRRYTGWGRLSRKLINGIRDKQSGKTILDFLKSDGFANRNFMQLIHDDSLTFKEDIQKAQVSGQGDSLHEHIANLAGSPAIKKGILQTVKVVDELVKVMGRHKPENIVIEMARENQTTQKGQKNSRERMKRIEEGIKELGSQILKEHPVENTQLQNEKLYLYYLQNGRDMYVDQELDINRLSDYDVDHIVPQSFLKDDSIDNKVLTRSDKARGKSDNVPSEEVVKKMKNYWRQLLNAKLITQRKFDNLTKAERGGLSELDKAGFIKRQLVETRQITKHVAQILDSRMNTKYDENDKLIREVKVITLKSKLVSDFRKDFQFYKVREINNYHHAHDAYLNAVVGTALIKKYPKLESEFVYGDYKVYDVRKMIAKSEQEIGKATAKYFFYSNIMNFFKTEITLANGEIRKRPLIETNGETGEIVWDKGRDFATVRKVLSMPQVNIVKKTEVQTGGFSKESILPKRNSDKLIARKKDWDPKKYGGFDSPTVAYSVLVVAKVEKGKSKKLKSVKELLGITIMERSSFEKNPIDFLEAKGYKEVKKDLIIKLPKYSLFELENGRKRMLASAGELQKGNELALPSKYVNFLYLASHYEKLKGSPEDNEQKQLFVEQHKHYLDEIIEQISEFSKRVILADANLDKVLSAYNKHRDKPIREQAENIIHLFTLTNLGAPAAFKYFDTTIDRKRYTSTKEVLDATLIHQSITGLYETRIDLSQLGGDGGGGSPAPGSSGGTLNIEDEYRLHETSKEPDVPLGSTWLSDFPQAWAETGGMGLAVRQAPLIIPLKATSTPVSIKQYPMSQEARLGIKPHIQRLLDQGILVPCQSPWNTPLLPVKKPGTNDYRPVQDLREVNKRVEDIHPTVPNPYNLLSGLPPSHQWYTVLDLKDAFFCLRLHPTSQPLFAFEWRDPEMGISGQLTWTRLPQGFKNSPTLFNEALHRDLADFRIQHPDLILLQYVDDLLLAATSEQDCQRGTRALLQTLGNLGYRASAKKAQICQKQVKYLGYLLKEGQRWLTEARKETVMGQPTPKTPRQLREFLGKAGFCRLFIPGFAEMAAPLYPLTKPGTLFNWGPDQQKAYQEIKQALLTAPALGLPDLTKPFELFVDEKQGYAKGVLTQKLGPWRRPVAYLSKKLDPVAAGWPPCLRMVAAIAVLTKDAGKLTMGQPLVILAPHAVEALVKQPPDRWLSNARMTHYQAMLLDTDRVQFGPVVALNPATLLPLPEKEAPHDCLEILAETHGTRPDLTDQPIPDADYTWYTDGSSFLQEGQRRAGAAVTTETEVIWARALPAGTSAQRAELIALTQALKMAEGKKLNVYTDSRYAFATAHVHGEIYRRRGWLTSEGREIKNKNEILALLKALFLPKRLSIIHCPGHQKGNSAEARGNRMADQAAREAAMKAVLETSTLLAGKRTADGSEFEKRTADGSEFESPKKKAKVE

SEQ ID NO: 4526 - protein, 2125 aa, synthetic construct
MPAAKRVKLDGGDKKYSIGLDIGTNSVGWAVITDEYKVPSKKFKVLGNTDRHSIKKNLIGALLFDSGETAEATRLKRTARRRYTRRKNRICYLQEIFSNEMAKVDDSFFHRLEESFLVEEDKKHERHPIFGNIVDEVAYHEKYPTIYHLRKKLVDSTDKADLRLIYLALAHMIKFRGHFLIEGDLNPDNSDVDKLFIQLVQTYNQLFEENPINASGVDAKAILSARLSKSRRLENLIAQLPGEKKNGLFGNLIALSLGLTPNFKSNFDLAEDAKLQLSKDTYDDDLDNLLAQIGDQYADLFLAAKNLSDAILLSDILRVNTEITKAPLSASMIKRYDEHHQDLTLLKALVRQQLPEKYKEIFFDQSKNGYAGYIDGGASQEEFYKFIKPILEKMDGTEELLVKLNREDLLRKQRTFDNGSIPHQIHLGELHAILRRQEDFYPFLKDNREKIEKILTFRIPYYVGPLARGNSRFAWMTRKSEETITPWNFEEVVDKGASAQSFIERMTNFDKNLPNEKVLPKHSLLYEYFTVYNELTKVKYVTEGMRKPAFLSGEQKKAIVDLLFKTNRKVTVKQLKEDYFKKIECFDSVEISGVEDRFNASLGTYHDLLKIIKDKDFLDNEENEDILEDIVLTLTLFEDREMIEERLKTYAHLFDDKVMKQLKRRRYTGWGRLSRKLINGIRDKQSGKTILDFLKSDGFANRNFMQLIHDDSLTFKEDIQKAQVSGQGDSLHEHIANLAGSPAIKKGILQTVKVVDELVKVMGRHKPENIVIEMARENQTTQKGQKNSRERMKRIEEGIKELGSQILKEHPVENTQLQNEKLYLYYLQNGRDMYVDQELDINRLSDYDVDHIVPQSFLKDDSIDNKVLTRSDKARGKSDNVPSEEVVKKMKNYWRQLLNAKLITQRKFDNLTKAERGGLSELDKAGFIKRQLVETRQITKHVAQILDSRMNTKYDENDKLIREVKVITLKSKLVSDFRKDFQFYKVREINNYHHAHDAYLNAVVGTALIKKYPKLESEFVYGDYKVYDVRKMIAKSEQEIGKATAKYFFYSNIMNFFKTEITLANGEIRKRPLIETNGETGEIVWDKGRDFATVRKVLSMPQVNIVKKTEVQTGGFSKESILPKRNSDKLIARKKDWDPKKYGGFDSPTVAYSVLVVAKVEKGKSKKLKSVKELLGITIMERSSFEKNPIDFLEAKGYKEVKKDLIIKLPKYSLFELENGRKRMLASAGELQKGNELALPSKYVNFLYLASHYEKLKGSPEDNEQKQLFVEQHKHYLDEIIEQISEFSKRVILADANLDKVLSAYNKHRDKPIREQAENIIHLFTLTNLGAPAAFKYFDTTIDRKRYTSTKEVLDATLIHQSITGLYETRIDLSQLGGDGGGSSPAPGGSGGLLGRDLLTKLKAQIQFSTEGPQVTWEDRPAMCLVLNLEEEYRLHEKPVPPSIDPSWLQLFPMVWAEKAGMGLANQVPPVVVELKSDASPVAVRQYPMSKEAREGIRPHIQRFLDLGILVPCQSPWNTPLLPVKKPGTNDYRPVQDLREVNKRVQDIHPTVPNPYNLLSSLPPSHTWYSVLDLKDAFFCLKLHPNSQPLFAFEWRDPEKGNTGQLTWTRLPQGFKNSPTLFNEALHRDLASFRALNPQVVMLQYVDDLLVAAPTYRDCKEGTRRLLQELSKLGYRVSAKKAQLCREEVTYLGYLLKGGKRWLTPARKATVMKIPTPTTPRQVREFLGTAGFCRLWIPGFASLAAPLYPLTRPKVPFTWTEAHQEAFGRIKEALLSAPALALPDLTKPFALYVDEKEGVARGVLTQTLGPWRRPVAYLSKKLDPVASGWPTCLKAIAAVALLLKDADKLTLGQNVLVIAPHNLESIVRQPPDRWMTNARMTHYQSLLLNERVSFAPPAILNPATLLPVESDDTPIHICSEILAEETGTRPDLRDQPLPGVPAWYTDGSSFIMDGRRQAGAAIVDNKRTVWASNLPEGTSAQKAELIALTQALRLAEGKSINIYTDSRYAFATAHVHGAIYKQRGWLTSAGKDIKNKEEILALLEAIHLPKRVAIIHCPGHQRGTDPVATGNRKADEAAKQAAQSTRILTETTKNAGKRTADGSEFEKRTADGSEFESPKKKAKVE

SEQ ID NO: 4527 - protein, 2096 aa, synthetic construct
MPAAKRVKLDGGDKKYSIGLDIGTNSVGWAVITDEYKVPSKKFKVLGNTDRHSIKKNLIGALLFDSGETAEATRLKRTARRRYTRRKNRICYLQEIFSNEMAKVDDSFFHRLEESFLVEEDKKHERHPIFGNIVDEVAYHEKYPTIYHLRKKLVDSTDKADLRLIYLALAHMIKFRGHFLIEGDLNPDNSDVDKLFIQLVQTYNQLFEENPINASGVDAKAILSARLSKSRRLENLIAQLPGEKKNGLFGNLIALSLGLTPNFKSNFDLAEDAKLQLSKDTYDDDLDNLLAQIGDQYADLFLAAKNLSDAILLSDILRVNTEITKAPLSASMIKRYDEHHQDLTLLKALVRQQLPEKYKEIFFDQSKNGYAGYIDGGASQEEFYKFIKPILEKMDGTEELLVKLNREDLLRKQRTFDNGSIPHQIHLGELHAILRRQEDFYPFLKDNREKIEKILTFRIPYYVGPLARGNSRFAWMTRKSEETITPWNFEEVVDKGASAQSFIERMTNFDKNLPNEKVLPKHSLLYEYFTVYNELTKVKYVTEGMRKPAFLSGEQKKAIVDLLFKTNRKVTVKQLKEDYFKKIECFDSVEISGVEDRFNASLGTYHDLLKIIKDKDFLDNEENEDILEDIVLTLTLFEDREMIEERLKTYAHLFDDKVMKQLKRRRYTGWGRLSRKLINGIRDKQSGKTILDFLKSDGFANRNFMQLIHDDSLTFKEDIQKAQVSGQGDSLHEHIANLAGSPAIKKGILQTVKVVDELVKVMGRHKPENIVIEMARENQTTQKGQKNSRERMKRIEEGIKELGSQILKEHPVENTQLQNEKLYLYYLQNGRDMYVDQELDINRLSDYDVDHIVPQSFLKDDSIDNKVLTRSDKARGKSDNVPSEEVVKKMKNYWRQLLNAKLITQRKFDNLTKAERGGLSELDKAGFIKRQLVETRQITKHVAQILDSRMNTKYDENDKLIREVKVITLKSKLVSDFRKDFQFYKVREINNYHHAHDAYLNAVVGTALIKKYPKLESEFVYGDYKVYDVRKMIAKSEQEIGKATAKYFFYSNIMNFFKTEITLANGEIRKRPLIETNGETGEIVWDKGRDFATVRKVLSMPQVNIVKKTEVQTGGFSKESILPKRNSDKLIARKKDWDPKKYGGFDSPTVAYSVLVVAKVEKGKSKKLKSVKELLGITIMERSSFEKNPIDFLEAKGYKEVKKDLIIKLPKYSLFELENGRKRMLASAGELQKGNELALPSKYVNFLYLASHYEKLKGSPEDNEQKQLFVEQHKHYLDEIIEQISEFSKRVILADANLDKVLSAYNKHRDKPIREQAENIIHLFTLTNLGAPAAFKYFDTTIDRKRYTSTKEVLDATLIHQSITGLYETRIDLSQLGGDGGEAAAKPAPGGSGGTLNIEDEYRLHETSKEPDVPLGSTWLSDFPQAWAETGGMGLAVRQAPLIIPLKATSTPVSIKQYPMSQEARLGIKPHIQRLLDQGILVPCQSPWNTPLLPVKKPGTNDYRPVQDLREVNKRVEDIHPTVPNPYNLLSGLPPSHQWYTVLDLKDAFFCLRLHPTSQPLFAFEWRDPEMGISGQLTWTRLPQGFKNSPTLFNEALHRDLADFRIQHPDLILLQYVDDLLLAATSEQDCQRGTRALLQTLGNLGYRASAKKAQICQKQVKYLGYLLKEGQRWLTEARKETVMGQPTPKTPRQLREFLGKAGFCRLFIPGFAEMAAPLYPLTKPGTLFNWGPDQQKAYQEIKQALLTAPALGLPDLTKPFELFVDEKQGYAKGVLTQKLGPWRRPVAYLSKKLDPVAAGWPPCLRMVAAIAVLTKDAGKLTMGQPLVILAPHAVEALVKQPPDRWLSNARMTHYQAMLLDTDRVQFGPVVALNPATLLPLPEKEAPHDCLEILAETHGTRPDLTDQPIPDADYTWYTDGSSFLQEGQRRAGAAVTTETEVIWARALPAGTSAQRAELIALTQALKMAEGKKLNVYTDSRYAFATAHVHGEIYRRRGWLTSEGREIKNKNEILALLKALFLPKRLSIIHCPGHQKGNSAEARGNRMADQAAREAAMKAVLETSTLLAGKRTADGSEFEKRTADGSEFESPKKKAKVE

SEQ ID NO: 4528 - protein, 2096 aa, synthetic construct
MPAAKRVKLDGGDKKYSIGLDIGTNSVGWAVITDEYKVPSKKFKVLGNTDRHSIKKNLIGALLFDSGETAEATRLKRTARRRYTRRKNRICYLQEIFSNEMAKVDDSFFHRLEESFLVEEDKKHERHPIFGNIVDEVAYHEKYPTIYHLRKKLVDSTDKADLRLIYLALAHMIKFRGHFLIEGDLNPDNSDVDKLFIQLVQTYNQLFEENPINASGVDAKAILSARLSKSRRLENLIAQLPGEKKNGLFGNLIALSLGLTPNFKSNFDLAEDAKLQLSKDTYDDDLDNLLAQIGDQYADLFLAAKNLSDAILLSDILRVNTEITKAPLSASMIKRYDEHHQDLTLLKALVRQQLPEKYKEIFFDQSKNGYAGYIDGGASQEEFYKFIKPILEKMDGTEELLVKLNREDLLRKQRTFDNGSIPHQIHLGELHAILRRQEDFYPFLKDNREKIEKILTFRIPYYVGPLARGNSRFAWMTRKSEETITPWNFEEVVDKGASAQSFIERMTNFDKNLPNEKVLPKHSLLYEYFTVYNELTKVKYVTEGMRKPAFLSGEQKKAIVDLLFKTNRKVTVKQLKEDYFKKIECFDSVEISGVEDRFNASLGTYHDLLKIIKDKDFLDNEENEDILEDIVLTLTLFEDREMIEERLKTYAHLFDDKVMKQLKRRRYTGWGRLSRKLINGIRDKQSGKTILDFLKSDGFANRNFMQLIHDDSLTFKEDIQKAQVSGQGDSLHEHIANLAGSPAIKKGILQTVKVVDELVKVMGRHKPENIVIEMARENQTTQKGQKNSRERMKRIEEGIKELGSQILKEHPVENTQLQNEKLYLYYLQNGRDMYVDQELDINRLSDYDVDHIVPQSFLKDDSIDNKVLTRSDKARGKSDNVPSEEVVKKMKNYWRQLLNAKLITQRKFDNLTKAERGGLSELDKAGFIKRQLVETRQITKHVAQILDSRMNTKYDENDKLIREVKVITLKSKLVSDFRKDFQFYKVREINNYHHAHDAYLNAVVGTALIKKYPKLESEFVYGDYKVYDVRKMIAKSEQEIGKATAKYFFYSNIMNFFKTEITLANGEIRKRPLIETNGETGEIVWDKGRDFATVRKVLSMPQVNIVKKTEVQTGGFSKESILPKRNSDKLIARKKDWDPKKYGGFDSPTVAYSVLVVAKVEKGKSKKLKSVKELLGITIMERSSFEKNPIDFLEAKGYKEVKKDLIIKLPKYSLFELENGRKRMLASAGELQKGNELALPSKYVNFLYLASHYEKLKGSPEDNEQKQLFVEQHKHYLDEIIEQISEFSKRVILADANLDKVLSAYNKHRDKPIREQAENIIHLFTLTNLGAPAAFKYFDTTIDRKRYTSTKEVLDATLIHQSITGLYETRIDLSQLGGDGGPAPEAAAKGGSGGTLNLEDEYRLYETSAEPEVSPGSTWLSDFPQAWAETGGMGLAVRQAPLIIPLKATSTPVSIKQYPMSQEAKLGIKPHIQRLLDQGILVPCQSPWNTPLLPVKKPGTNDYRPVQDLREVNKRVEDIHPTVPNPYNLLSGLPPSHRWYTVLDLKDAFFCLRLHPTSQPLFAFEWRDPGMGISGQLTWTRLPQGFKNSPTLFNEALHRDLADFRIQHPDLILLQYVDDILLAATSELDCQQGTRALLLTLGNLGYRASAKKAQLCQKQVKYLGYLLKEGQRWLTEARKETVMGQPTPKTPRQLREFLGKAGFCRLFIPGFAEMAAPLYPLTKPGTLFNWGPDQQKAYQEIKQALLTAPALGLPDLTKPFELFVDEKQGYAKGVLTQKLGPWRRPVAYLSKKLDPVAAGWPPCLRMVAAIAVLRKDAGKLTMGQPLVILAPHAVEALVKQPPDRWLSNARMTHYQAMLLDTDRVQFGPVVALNPATLLPLPEEGAPHDCLEILAETHGTRPDLTDQPIPDADHTWYTDGSSFLQEGQRKAGAAVTTETEVIWARALPAGTSAQRAELIALTQALKMAEGKRLNVYTDSRYAFATAHIHGEIYRRRGWLTSEGREIKNKSEILALLKALFLPKRLSIIHCLGHQKGDSAEARGNRLADQAAREAAIKTPPDTSTLLAGKRTADGSEFEKRTADGSEFESPKKKAKVE

SEQ ID NO: 4529 - protein, 2088 aa, synthetic construct
MPAAKRVKLDGGDKKYSIGLDIGTNSVGWAVITDEYKVPSKKFKVLGNTDRHSIKKNLIGALLFDSGETAEATRLKRTARRRYTRRKNRICYLQEIFSNEMAKVDDSFFHRLEESFLVEEDKKHERHPIFGNIVDEVAYHEKYPTIYHLRKKLVDSTDKADLRLIYLALAHMIKFRGHFLIEGDLNPDNSDVDKLFIQLVQTYNQLFEENPINASGVDAKAILSARLSKSRRLENLIAQLPGEKKNGLFGNLIALSLGLTPNFKSNFDLAEDAKLQLSKDTYDDDLDNLLAQIGDQYADLFLAAKNLSDAILLSDILRVNTEITKAPLSASMIKRYDEHHQDLTLLKALVRQQLPEKYKEIFFDQSKNGYAGYIDGGASQEEFYKFIKPILEKMDGTEELLVKLNREDLLRKQRTFDNGSIPHQIHLGELHAILRRQEDFYPFLKDNREKIEKILTFRIPYYVGPLARGNSRFAWMTRKSEETITPWNFEEVVDKGASAQSFIERMTNFDKNLPNEKVLPKHSLLYEYFTVYNELTKVKYVTEGMRKPAFLSGEQKKAIVDLLFKTNRKVTVKQLKEDYFKKIECFDSVEISGVEDRFNASLGTYHDLLKIIKDKDFLDNEENEDILEDIVLTLTLFEDREMIEERLKTYAHLFDDKVMKQLKRRRYTGWGRLSRKLINGIRDKQSGKTILDFLKSDGFANRNFMQLIHDDSLTFKEDIQKAQVSGQGDSLHEHIANLAGSPAIKKGILQTVKVVDELVKVMGRHKPENIVIEMARENQTTQKGQKNSRERMKRIEEGIKELGSQILKEHPVENTQLQNEKLYLYYLQNGRDMYVDQELDINRLSDYDVDHIVPQSFLKDDSIDNKVLTRSDKARGKSDNVPSEEVVKKMKNYWRQLLNAKLITQRKFDNLTKAERGGLSELDKAGFIKRQLVETRQITKHVAQILDSRMNTKYDENDKLIREVKVITLKSKLVSDFRKDFQFYKVREINNYHHAHDAYLNAVVGTALIKKYPKLESEFVYGDYKVYDVRKMIAKSEQEIGKATAKYFFYSNIMNFFKTEITLANGEIRKRPLIETNGETGEIVWDKGRDFATVRKVLSMPQVNIVKKTEVQTGGFSKESILPKRNSDKLIARKKDWDPKKYGGFDSPTVAYSVLVVAKVEKGKSKKLKSVKELLGITIMERSSFEKNPIDFLEAKGYKEVKKDLIIKLPKYSLFELENGRKRMLASAGELQKGNELALPSKYVNFLYLASHYEKLKGSPEDNEQKQLFVEQHKHYLDEIIEQISEFSKRVILADANLDKVLSAYNKHRDKPIREQAENIIHLFTLTNLGAPAAFKYFDTTIDRKRYTSTKEVLDATLIHQSITGLYETRIDLSQLGGDGGPAPEAAAKGGSGGLDDEYRLYSPLVKPDQNIQFWLEQFPQAWAETAGMGLAKQVPPQVIQLKASATPVSVRQYPLSKEAQEGIRPHVQRLIQQGILVPVQSPWNTPLLPVRKPGTNDYRPVQDLREVNKRVQDIHPTVPNPYNLLCALPPQRSWYTVLDLKDAFFCLRLHPTSQPLFAFEWRDPGTGRTGQLTWTRLPQGFKNSPTIFNEALHRDLANFRIQHPQVTLLQYVDDLLLAGATKQDCLEGTKALLLELSDLGYRASAKKAQICRREVTYLGYSLRDGQRWLTEARKKTVVQIPAPTTAKQVREFLGKAGFCRLFIPGFATLAAPLYPLTKPKGEFSWAPEHQKAFDAIKKALLSAPALALPDVTKPFTLYVDERKGVARGVLTQTLGPWRRPVAYLSKKLDPVASGWPVCLKAIAAVAILVKDADKLTLGQNITVIAPHALENIVRQPPDRWMTNARMTHYQSLLLTERVTFAPPAALNPATLLPEETDEPVTHDCHQLLIEETGVRKDLTDIPLTGEVLTWFTDGSSYVVEGKRMAGAAVVDGTRTIWASSLPEGTSAQKAELMALTQALRLAEGKSINIYTDSRYAFATAHVHGAIYKQRGWLTSAGREIKNKEEILSLLEALHLPKRLAIIHCPGHQKAKDPISRGNQMADRVAKQAAQGVNLLPAGKRTADGSEFEKRTADGSEFESPKKKAKVE

SEQ ID NO: 4530 - protein, 2096 aa, synthetic construct
MPAAKRVKLDGGDKKYSIGLDIGTNSVGWAVITDEYKVPSKKFKVLGNTDRHSIKKNLIGALLFDSGETAEATRLKRTARRRYTRRKNRICYLQEIFSNEMAKVDDSFFHRLEESFLVEEDKKHERHPIFGNIVDEVAYHEKYPTIYHLRKKLVDSTDKADLRLIYLALAHMIKFRGHFLIEGDLNPDNSDVDKLFIQLVQTYNQLFEENPINASGVDAKAILSARLSKSRRLENLIAQLPGEKKNGLFGNLIALSLGLTPNFKSNFDLAEDAKLQLSKDTYDDDLDNLLAQIGDQYADLFLAAKNLSDAILLSDILRVNTEITKAPLSASMIKRYDEHHQDLTLLKALVRQQLPEKYKEIFFDQSKNGYAGYIDGGASQEEFYKFIKPILEKMDGTEELLVKLNREDLLRKQRTFDNGSIPHQIHLGELHAILRRQEDFYPFLKDNREKIEKILTFRIPYYVGPLARGNSRFAWMTRKSEETITPWNFEEVVDKGASAQSFIERMTNFDKNLPNEKVLPKHSLLYEYFTVYNELTKVKYVTEGMRKPAFLSGEQKKAIVDLLFKTNRKVTVKQLKEDYFKKIECFDSVEISGVEDRFNASLGTYHDLLKIIKDKDFLDNEENEDILEDIVLTLTLFEDREMIEERLKTYAHLFDDKVMKQLKRRRYTGWGRLSRKLINGIRDKQSGKTILDFLKSDGFANRNFMQLIHDDSLTFKEDIQKAQVSGQGDSLHEHIANLAGSPAIKKGILQTVKVVDELVKVMGRHKPENIVIEMARENQTTQKGQKNSRERMKRIEEGIKELGSQILKEHPVENTQLQNEKLYLYYLQNGRDMYVDQELDINRLSDYDVDHIVPQSFLKDDSIDNKVLTRSDKARGKSDNVPSEEVVKKMKNYWRQLLNAKLITQRKFDNLTKAERGGLSELDKAGFIKRQLVETRQITKHVAQILDSRMNTKYDENDKLIREVKVITLKSKLVSDFRKDFQFYKVREINNYHHAHDAYLNAVVGTALIKKYPKLESEFVYGDYKVYDVRKMIAKSEQEIGKATAKYFFYSNIMNFFKTEITLANGEIRKRPLIETNGETGEIVWDKGRDFATVRKVLSMPQVNIVKKTEVQTGGFSKESILPKRNSDKLIARKKDWDPKKYGGFDSPTVAYSVLVVAKVEKGKSKKLKSVKELLGITIMERSSFEKNPIDFLEAKGYKEVKKDLIIKLPKYSLFELENGRKRMLASAGELQKGNELALPSKYVNFLYLASHYEKLKGSPEDNEQKQLFVEQHKHYLDEIIEQISEFSKRVILADANLDKVLSAYNKHRDKPIREQAENIIHLFTLTNLGAPAAFKYFDTTIDRKRYTSTKEVLDATLIHQSITGLYETRIDLSQLGGDGGGGGEAAAKGSSGGTLNIEDEHRLHETSKEPDVSLGSTWLSDFPQAWAETGGMGLAVRQAPLIIPLKATSTPVSIKQYPMSQEARLGIKPHIQRLLDQGILVPCQSPWNTPLLPVKKPGTNDYRPVQDLREVNKRVEDIHPTVPNPYNLLSGLPPSHQWYTVLDLKDAFFCLRLHPTSQPLFAFEWRDPEMGISGQLTWTRLPQGFKNSPTLFNEALHRDLADFRIQHPDLILLQYVDDLLLAATSELDCQQGTRALLQTLGNLGYRASAKKAQICQKQVKYLGYLLKEGQRWLTEARKETVMGQPTPKTPRQLREFLGTAGFCRLWIPGFAEMAAPLYPLTKPGTLFNWGPDQQKAYQEIKQALLTAPALGLPDLTKPFELFVDEKQGYAKGVLTQKLGPWRRPVAYLSKKLDPVAAGWPPCLRMVAAIAVLTKDAGKLTMGQPLVILAPHAVEALVKQPPDRWLSNARMTHYQALLLDTDRVQFGPVVALNPATLLPLPEEGLQHNCLDILAEAHGTRPDLTDQPLPDADHTWYTDGSSLLQEGQRKAGAAVTTETEVIWAKALPAGTSAQRAELIALTQALKMAEGKKLNVYTDSRYAFATAHIHGEIYRRRGWLTSEGKEIKNKDEILALLKALFLPKRLSIIHCPGHQKGHSAEARGNRMADQAARKAAITETPDTSTLLAGKRTADGSEFEKRTADGSEFESPKKKAKVE

SEQ ID NO: 4531 - protein, 2094 aa, synthetic construct
MPAAKRVKLDGGDKKYSIGLDIGTNSVGWAVITDEYKVPSKKFKVLGNTDRHSIKKNLIGALLFDSGETAEATRLKRTARRRYTRRKNRICYLQEIFSNEMAKVDDSFFHRLEESFLVEEDKKHERHPIFGNIVDEVAYHEKYPTIYHLRKKLVDSTDKADLRLIYLALAHMIKFRGHFLIEGDLNPDNSDVDKLFIQLVQTYNQLFEENPINASGVDAKAILSARLSKSRRLENLIAQLPGEKKNGLFGNLIALSLGLTPNFKSNFDLAEDAKLQLSKDTYDDDLDNLLAQIGDQYADLFLAAKNLSDAILLSDILRVNTEITKAPLSASMIKRYDEHHQDLTLLKALVRQQLPEKYKEIFFDQSKNGYAGYIDGGASQEEFYKFIKPILEKMDGTEELLVKLNREDLLRKQRTFDNGSIPHQIHLGELHAILRRQEDFYPFLKDNREKIEKILTFRIPYYVGPLARGNSRFAWMTRKSEETITPWNFEEVVDKGASAQSFIERMTNFDKNLPNEKVLPKHSLLYEYFTVYNELTKVKYVTEGMRKPAFLSGEQKKAIVDLLFKTNRKVTVKQLKEDYFKKIECFDSVEISGVEDRFNASLGTYHDLLKIIKDKDFLDNEENEDILEDIVLTLTLFEDREMIEERLKTYAHLFDDKVMKQLKRRRYTGWGRLSRKLINGIRDKQSGKTILDFLKSDGFANRNFMQLIHDDSLTFKEDIQKAQVSGQGDSLHEHIANLAGSPAIKKGILQTVKVVDELVKVMGRHKPENIVIEMARENQTTQKGQKNSRERMKRIEEGIKELGSQILKEHPVENTQLQNEKLYLYYLQNGRDMYVDQELDINRLSDYDVDHIVPQSFLKDDSIDNKVLTRSDKARGKSDNVPSEEVVKKMKNYWRQLLNAKLITQRKFDNLTKAERGGLSELDKAGFIKRQLVETRQITKHVAQILDSRMNTKYDENDKLIREVKVITLKSKLVSDFRKDFQFYKVREINNYHHAHDAYLNAVVGTALIKKYPKLESEFVYGDYKVYDVRKMIAKSEQEIGKATAKYFFYSNIMNFFKTEITLANGEIRKRPLIETNGETGEIVWDKGRDFATVRKVLSMPQVNIVKKTEVQTGGFSKESILPKRNSDKLIARKKDWDPKKYGGFDSPTVAYSVLVVAKVEKGKSKKLKSVKELLGITIMERSSFEKNPIDFLEAKGYKEVKKDLIIKLPKYSLFELENGRKRMLASAGELQKGNELALPSKYVNFLYLASHYEKLKGSPEDNEQKQLFVEQHKHYLDEIIEQISEFSKRVILADANLDKVLSAYNKHRDKPIREQAENIIHLFTLTNLGAPAAFKYFDTTIDRKRYTSTKEVLDATLIHQSITGLYETRIDLSQLGGDGGEAAAKGGGGSSGGVLNLEEEYRLHEKPVPSSIDPSWLQLFPTVWAERAGMGLANQVPPVVVELRSGASPVAVRQYPMSKEAREGIRPHIQRFLDLGVLVPCQSPWNTPLLPVKKPGTNDYRPVQDLREINKRVQDIHPTVPNPYNLLSSLPPSHTWYSVLDLKDAFFCLKLHPNSQPLFAFEWRDPEKGNTGQLTWTRLPQGFKNSPTLFNEALHRDLAPFRALNPQVVLLQYVDDLLVAAPTYRDCKEGTQKLLQELSKLGYRVSAKKAQLCQKEVTYLGYLLKEGKRWLTPARKATVMKIPPPTTPRQVREFLGKAGFCRLFIPGFASLAAPLYPLTKPSIPFIWTEEHQKAFDRIKEALLSAPALALPDLTKPFTLYVDERAGVARGVLTQTLGPWRRPVAYLSKKLDPVASGWPTCLKAVAAVALLLKDADKLTLGQNVTVIASHSLESIVRQPPDRWMTNARMTHYQSLLLNERVSFAPPAVLNPATLLPVESEATPVHRCSEILAEETGTRRDLKDQPLPGVPAWYTDGSSFIAEGKRRAGAAIVDGKRTVWASSLPEGTSAQKAELVALTQALRLAEGKDINIYTDSRYAFATAHIHGAIYKQRGWLTSAGKDIKNKEEILALLEAIHLPKRVAIIHCPGHQKGNDPVATGNRRADEAAKQAALSTRVLAETTKPAGKRTADGSEFEKRTADGSEFESPKKKAKVE

SEQ ID NO: 4532 - protein, 2088 aa, synthetic construct
MPAAKRVKLDGGDKKYSIGLDIGTNSVGWAVITDEYKVPSKKFKVLGNTDRHSIKKNLIGALLFDSGETAEATRLKRTARRRYTRRKNRICYLQEIFSNEMAKVDDSFFHRLEESFLVEEDKKHERHPIFGNIVDEVAYHEKYPTIYHLRKKLVDSTDKADLRLIYLALAHMIKFRGHFLIEGDLNPDNSDVDKLFIQLVQTYNQLFEENPINASGVDAKAILSARLSKSRRLENLIAQLPGEKKNGLFGNLIALSLGLTPNFKSNFDLAEDAKLQLSKDTYDDDLDNLLAQIGDQYADLFLAAKNLSDAILLSDILRVNTEITKAPLSASMIKRYDEHHQDLTLLKALVRQQLPEKYKEIFFDQSKNGYAGYIDGGASQEEFYKFIKPILEKMDGTEELLVKLNREDLLRKQRTFDNGSIPHQIHLGELHAILRRQEDFYPFLKDNREKIEKILTFRIPYYVGPLARGNSRFAWMTRKSEETITPWNFEEVVDKGASAQSFIERMTNFDKNLPNEKVLPKHSLLYEYFTVYNELTKVKYVTEGMRKPAFLSGEQKKAIVDLLFKTNRKVTVKQLKEDYFKKIECFDSVEISGVEDRFNASLGTYHDLLKIIKDKDFLDNEENEDILEDIVLTLTLFEDREMIEERLKTYAHLFDDKVMKQLKRRRYTGWGRLSRKLINGIRDKQSGKTILDFLKSDGFANRNFMQLIHDDSLTFKEDIQKAQVSGQGDSLHEHIANLAGSPAIKKGILQTVKVVDELVKVMGRHKPENIVIEMARENQTTQKGQKNSRERMKRIEEGIKELGSQILKEHPVENTQLQNEKLYLYYLQNGRDMYVDQELDINRLSDYDVDHIVPQSFLKDDSIDNKVLTRSDKARGKSDNVPSEEVVKKMKNYWRQLLNAKLITQRKFDNLTKAERGGLSELDKAGFIKRQLVETRQITKHVAQILDSRMNTKYDENDKLIREVKVITLKSKLVSDFRKDFQFYKVREINNYHHAHDAYLNAVVGTALIKKYPKLESEFVYGDYKVYDVRKMIAKSEQEIGKATAKYFFYSNIMNFFKTEITLANGEIRKRPLIETNGETGEIVWDKGRDFATVRKVLSMPQVNIVKKTEVQTGGFSKESILPKRNSDKLIARKKDWDPKKYGGFDSPTVAYSVLVVAKVEKGKSKKLKSVKELLGITIMERSSFEKNPIDFLEAKGYKEVKKDLIIKLPKYSLFELENGRKRMLASAGELQKGNELALPSKYVNFLYLASHYEKLKGSPEDNEQKQLFVEQHKHYLDEIIEQISEFSKRVILADANLDKVLSAYNKHRDKPIREQAENIIHLFTLTNLGAPAAFKYFDTTIDRKRYTSTKEVLDATLIHQSITGLYETRIDLSQLGGDGGGSSGGGPAPGGTLQLDDEYRLYSPLVKPDQNIQFWLEQFPQAWAETAGMGLAKQVPPQVIQLKASATPVSVRQYPLSKEAQEGIRPHVQRLIQQGILVPVQSPWNTPLLPVRKPGTNDYRPVQDLREVNKRVQDIHPTVPNPYNLLCALPPQRSWYTVLDLKDAFFCLRLHPTSQPLFAFEWRDPGTGRTGQLTWTRLPQGFKNSPTIFNEALHRDLANFRIQHPQVTLLQYVDDLLLAGATKQDCLEGTKALLLELSDLGYRASAKKAQICRREVTYLGYSLRDGQRWLTEARKKTVVQIPAPTTAKQVREFLGTAGFCRLWIPGFATLAAPLYPLTKPKGEFSWAPEHQKAFDAIKKALLSAPALALPDVTKPFTLYVDERKGVARGVLTQTLGPWRRPVAYLSKKLDPVASGWPVCLKAIAAVAILVKDADKLTLGQNITVIAPHALENIVRQPPDRWMTNARMTHYQSLLLTERVTFAPPAALNPATLLPEETDEPVTHDCHQLLIEETGVRKDLTDIPLTGEVLTWFTDGSSYVVEGKRMAGAAVVDGTRTIWASSLPEGTSAQKAELMALTQALRLAEGKSINIYTDSRYAFATAHVHGAIYKQRGWLTSAGREIKNKEEILSLLEALHLPKRLAIIHCPGHQKAKDPISRGNQMADRVAKQAAQGVNLLAGKRTADGSEFEKRTADGSEFESPKKKAKVE

SEQ ID NO: 4533 - protein, 2094 aa, synthetic construct
MPAAKRVKLDGGDKKYSIGLDIGTNSVGWAVITDEYKVPSKKFKVLGNTDRHSIKKNLIGALLFDSGETAEATRLKRTARRRYTRRKNRICYLQEIFSNEMAKVDDSFFHRLEESFLVEEDKKHERHPIFGNIVDEVAYHEKYPTIYHLRKKLVDSTDKADLRLIYLALAHMIKFRGHFLIEGDLNPDNSDVDKLFIQLVQTYNQLFEENPINASGVDAKAILSARLSKSRRLENLIAQLPGEKKNGLFGNLIALSLGLTPNFKSNFDLAEDAKLQLSKDTYDDDLDNLLAQIGDQYADLFLAAKNLSDAILLSDILRVNTEITKAPLSASMIKRYDEHHQDLTLLKALVRQQLPEKYKEIFFDQSKNGYAGYIDGGASQEEFYKFIKPILEKMDGTEELLVKLNREDLLRKQRTFDNGSIPHQIHLGELHAILRRQEDFYPFLKDNREKIEKILTFRIPYYVGPLARGNSRFAWMTRKSEETITPWNFEEVVDKGASAQSFIERMTNFDKNLPNEKVLPKHSLLYEYFTVYNELTKVKYVTEGMRKPAFLSGEQKKAIVDLLFKTNRKVTVKQLKEDYFKKIECFDSVEISGVEDRFNASLGTYHDLLKIIKDKDFLDNEENEDILEDIVLTLTLFEDREMIEERLKTYAHLFDDKVMKQLKRRRYTGWGRLSRKLINGIRDKQSGKTILDFLKSDGFANRNFMQLIHDDSLTFKEDIQKAQVSGQGDSLHEHIANLAGSPAIKKGILQTVKVVDELVKVMGRHKPENIVIEMARENQTTQKGQKNSRERMKRIEEGIKELGSQILKEHPVENTQLQNEKLYLYYLQNGRDMYVDQELDINRLSDYDVDHIVPQSFLKDDSIDNKVLTRSDKARGKSDNVPSEEVVKKMKNYWRQLLNAKLITQRKFDNLTKAERGGLSELDKAGFIKRQLVETRQITKHVAQILDSRMNTKYDENDKLIREVKVITLKSKLVSDFRKDFQFYKVREINNYHHAHDAYLNAVVGTALIKKYPKLESEFVYGDYKVYDVRKMIAKSEQEIGKATAKYFFYSNIMNFFKTEITLANGEIRKRPLIETNGETGEIVWDKGRDFATVRKVLSMPQVNIVKKTEVQTGGFSKESILPKRNSDKLIARKKDWDPKKYGGFDSPTVAYSVLVVAKVEKGKSKKLKSVKELLGITIMERSSFEKNPIDFLEAKGYKEVKKDLIIKLPKYSLFELENGRKRMLASAGELQKGNELALPSKYVNFLYLASHYEKLKGSPEDNEQKQLFVEQHKHYLDEIIEQISEFSKRVILADANLDKVLSAYNKHRDKPIREQAENIIHLFTLTNLGAPAAFKYFDTTIDRKRYTSTKEVLDATLIHQSITGLYETRIDLSQLGGDGGPAPGSSGGGGGTLNLEDEYRLYETSAEPEVSPGSTWLSDFPQAWAETGGMGLAVRQAPLIIPLKATSTPVSIKQYPMSQEAKLGIKPHIQRLLDQGILVPCQSPWNTPLLPVKKPGTNDYRPVQDLREVNKRVEDIHPTVPNPYNLLSGLPPSHRWYTVLDLKDAFFCLRLHPTSQPLFAFEWRDPGMGISGQLTWTRLPQGFKNSPTLFNEALHRDLADFRIQHPDLILLQYVDDILLAATSELDCQQGTRALLLTLGNLGYRASAKKAQLCQKQVKYLGYLLKEGQRWLTEARKETVMGQPTPKTPRQLREFLGKAGFCRLFIPGFAEMAAPLYPLTKPGTLFNWGPDQQKAYQEIKQALLTAPALGLPDLTKPFELFVDEKQGYAKGVLTQKLGPWRRPVAYLSKKLDPVAAGWPPCLRMVAAIAVLRKDAGKLTMGQPLVILAPHAVEALVKQPPDRWLSNARMTHYQAMLLDTDRVQFGPVVALNPATLLPLPEEGAPHDCLEILAETHGTRPDLTDQPIPDADHTWYTDGSSFLQEGQRKAGAAVTTETEVIWARALPAGTSAQRAELIALTQALKMAEGKRLNVYTDSRYAFATAHIHGEIYRRRGWLTSEGREIKNKSEILALLKALFLPKRLSIIHCLGHQKGDSAEARGNRLADQAAREAAIKTPPDTSTLLAGKRTADGSEFEKRTADGSEFESPKKKAKVE

SEQ ID NO: 4534 - protein, 2096 aa, synthetic construct
MPAAKRVKLDGGDKKYSIGLDIGTNSVGWAVITDEYKVPSKKFKVLGNTDRHSIKKNLIGALLFDSGETAEATRLKRTARRRYTRRKNRICYLQEIFSNEMAKVDDSFFHRLEESFLVEEDKKHERHPIFGNIVDEVAYHEKYPTIYHLRKKLVDSTDKADLRLIYLALAHMIKFRGHFLIEGDLNPDNSDVDKLFIQLVQTYNQLFEENPINASGVDAKAILSARLSKSRRLENLIAQLPGEKKNGLFGNLIALSLGLTPNFKSNFDLAEDAKLQLSKDTYDDDLDNLLAQIGDQYADLFLAAKNLSDAILLSDILRVNTEITKAPLSASMIKRYDEHHQDLTLLKALVRQQLPEKYKEIFFDQSKNGYAGYIDGGASQEEFYKFIKPILEKMDGTEELLVKLNREDLLRKQRTFDNGSIPHQIHLGELHAILRRQEDFYPFLKDNREKIEKILTFRIPYYVGPLARGNSRFAWMTRKSEETITPWNFEEVVDKGASAQSFIERMTNFDKNLPNEKVLPKHSLLYEYFTVYNELTKVKYVTEGMRKPAFLSGEQKKAIVDLLFKTNRKVTVKQLKEDYFKKIECFDSVEISGVEDRFNASLGTYHDLLKIIKDKDFLDNEENEDILEDIVLTLTLFEDREMIEERLKTYAHLFDDKVMKQLKRRRYTGWGRLSRKLINGIRDKQSGKTILDFLKSDGFANRNFMQLIHDDSLTFKEDIQKAQVSGQGDSLHEHIANLAGSPAIKKGILQTVKVVDELVKVMGRHKPENIVIEMARENQTTQKGQKNSRERMKRIEEGIKELGSQILKEHPVENTQLQNEKLYLYYLQNGRDMYVDQELDINRLSDYDVDHIVPQSFLKDDSIDNKVLTRSDKARGKSDNVPSEEVVKKMKNYWRQLLNAKLITQRKFDNLTKAERGGLSELDKAGFIKRQLVETRQITKHVAQILDSRMNTKYDENDKLIREVKVITLKSKLVSDFRKDFQFYKVREINNYHHAHDAYLNAVVGTALIKKYPKLESEFVYGDYKVYDVRKMIAKSEQEIGKATAKYFFYSNIMNFFKTEITLANGEIRKRPLIETNGETGEIVWDKGRDFATVRKVLSMPQVNIVKKTEVQTGGFSKESILPKRNSDKLIARKKDWDPKKYGGFDSPTVAYSVLVVAKVEKGKSKKLKSVKELLGITIMERSSFEKNPIDFLEAKGYKEVKKDLIIKLPKYSLFELENGRKRMLASAGELQKGNELALPSKYVNFLYLASHYEKLKGSPEDNEQKQLFVEQHKHYLDEIIEQISEFSKRVILADANLDKVLSAYNKHRDKPIREQAENIIHLFTLTNLGAPAAFKYFDTTIDRKRYTSTKEVLDATLIHQSITGLYETRIDLSQLGGDGGGGGPAPEAAAKGGTLNIEDEHRLHETSKEPDVSLGSTWLSDFPQAWAETGGMGLAVRQAPLIIPLKATSTPVSIKQYPMSQEARLGIKPHIQRLLDQGILVPCQSPWNTPLLPVKKPGTNDYRPVQDLREVNKRVEDIHPTVPNPYNLLSGLPPSHQWYTVLDLKDAFFCLRLHPTSQPLFAFEWRDPEMGISGQLTWTRLPQGFKNSPTLFNEALHRDLADFRIQHPDLILLQYVDDLLLAATSELDCQQGTRALLQTLGNLGYRASAKKAQICQKQVKYLGYLLKEGQRWLTEARKETVMGQPTPKTPRQLREFLGTAGFCRLWIPGFAEMAAPLYPLTKPGTLFNWGPDQQKAYQEIKQALLTAPALGLPDLTKPFELFVDEKQGYAKGVLTQKLGPWRRPVAYLSKKLDPVAAGWPPCLRMVAAIAVLTKDAGKLTMGQPLVILAPHAVEALVKQPPDRWLSNARMTHYQALLLDTDRVQFGPVVALNPATLLPLPEEGLQHNCLDILAEAHGTRPDLTDQPLPDADHTWYTDGSSLLQEGQRKAGAAVTTETEVIWAKALPAGTSAQRAELIALTQALKMAEGKKLNVYTDSRYAFATAHIHGEIYRRRGWLTSEGKEIKNKDEILALLKALFLPKRLSIIHCPGHQKGHSAEARGNRMADQAARKAAITETPDTSTLLAGKRTADGSEFEKRTADGSEFESPKKKAKVE

SEQ ID NO: 4535 - protein, 2096 aa, synthetic construct
MPAAKRVKLDGGDKKYSIGLDIGTNSVGWAVITDEYKVPSKKFKVLGNTDRHSIKKNLIGALLFDSGETAEATRLKRTARRRYTRRKNRICYLQEIFSNEMAKVDDSFFHRLEESFLVEEDKKHERHPIFGNIVDEVAYHEKYPTIYHLRKKLVDSTDKADLRLIYLALAHMIKFRGHFLIEGDLNPDNSDVDKLFIQLVQTYNQLFEENPINASGVDAKAILSARLSKSRRLENLIAQLPGEKKNGLFGNLIALSLGLTPNFKSNFDLAEDAKLQLSKDTYDDDLDNLLAQIGDQYADLFLAAKNLSDAILLSDILRVNTEITKAPLSASMIKRYDEHHQDLTLLKALVRQQLPEKYKEIFFDQSKNGYAGYIDGGASQEEFYKFIKPILEKMDGTEELLVKLNREDLLRKQRTFDNGSIPHQIHLGELHAILRRQEDFYPFLKDNREKIEKILTFRIPYYVGPLARGNSRFAWMTRKSEETITPWNFEEVVDKGASAQSFIERMTNFDKNLPNEKVLPKHSLLYEYFTVYNELTKVKYVTEGMRKPAFLSGEQKKAIVDLLFKTNRKVTVKQLKEDYFKKIECFDSVEISGVEDRFNASLGTYHDLLKIIKDKDFLDNEENEDILEDIVLTLTLFEDREMIEERLKTYAHLFDDKVMKQLKRRRYTGWGRLSRKLINGIRDKQSGKTILDFLKSDGFANRNFMQLIHDDSLTFKEDIQKAQVSGQGDSLHEHIANLAGSPAIKKGILQTVKVVDELVKVMGRHKPENIVIEMARENQTTQKGQKNSRERMKRIEEGIKELGSQILKEHPVENTQLQNEKLYLYYLQNGRDMYVDQELDINRLSDYDVDHIVPQSFLKDDSIDNKVLTRSDKARGKSDNVPSEEVVKKMKNYWRQLLNAKLITQRKFDNLTKAERGGLSELDKAGFIKRQLVETRQITKHVAQILDSRMNTKYDENDKLIREVKVITLKSKLVSDFRKDFQFYKVREINNYHHAHDAYLNAVVGTALIKKYPKLESEFVYGDYKVYDVRKMIAKSEQEIGKATAKYFFYSNIMNFFKTEITLANGEIRKRPLIETNGETGEIVWDKGRDFATVRKVLSMPQVNIVKKTEVQTGGFSKESILPKRNSDKLIARKKDWDPKKYGGFDSPTVAYSVLVVAKVEKGKSKKLKSVKELLGITIMERSSFEKNPIDFLEAKGYKEVKKDLIIKLPKYSLFELENGRKRMLASAGELQKGNELALPSKYVNFLYLASHYEKLKGSPEDNEQKQLFVEQHKHYLDEIIEQISEFSKRVILADANLDKVLSAYNKHRDKPIREQAENIIHLFTLTNLGAPAAFKYFDTTIDRKRYTSTKEVLDATLIHQSITGLYETRIDLSQLGGDGGEAAAKGGGPAPGGTLNIEDEHRLHETSKEPDVSLGSTWLSDFPQAWAETGGMGLAVRQAPLIIPLKATSTPVSIKQYPMSQEARLGIKPHIQRLLDQGILVPCQSPWNTPLLPVKKPGTNDYRPVQDLREVNKRVEDIHPTVPNPYNLLSGLPPSHQWYTVLDLKDAFFCLRLHPTSQPLFAFEWRDPEMGISGQLTWTRLPQGFKNSPTLFNEALHRDLADFRIQHPDLILLQYVDDLLLAATSELDCQQGTRALLQTLGNLGYRASAKKAQICQKQVKYLGYLLKEGQRWLTEARKETVMGQPTPKTPRQLREFLGTAGFCRLWIPGFAEMAAPLYPLTKPGTLFNWGPDQQKAYQEIKQALLTAPALGLPDLTKPFELFVDEKQGYAKGVLTQKLGPWRRPVAYLSKKLDPVAAGWPPCLRMVAAIAVLTKDAGKLTMGQPLVILAPHAVEALVKQPPDRWLSNARMTHYQALLLDTDRVQFGPVVALNPATLLPLPEEGLQHNCLDILAEAHGTRPDLTDQPLPDADHTWYTDGSSLLQEGQRKAGAAVTTETEVIWAKALPAGTSAQRAELIALTQALKMAEGKKLNVYTDSRYAFATAHIHGEIYRRRGWLTSEGKEIKNKDEILALLKALFLPKRLSIIHCPGHQKGHSAEARGNRMADQAARKAAITETPDTSTLLAGKRTADGSEFEKRTADGSEFESPKKKAKVE

SEQ ID NO: 4536 - protein, 2096 aa, synthetic construct
MPAAKRVKLDGGDKKYSIGLDIGTNSVGWAVITDEYKVPSKKFKVLGNTDRHSIKKNLIGALLFDSGETAEATRLKRTARRRYTRRKNRICYLQEIFSNEMAKVDDSFFHRLEESFLVEEDKKHERHPIFGNIVDEVAYHEKYPTIYHLRKKLVDSTDKADLRLIYLALAHMIKFRGHFLIEGDLNPDNSDVDKLFIQLVQTYNQLFEENPINASGVDAKAILSARLSKSRRLENLIAQLPGEKKNGLFGNLIALSLGLTPNFKSNFDLAEDAKLQLSKDTYDDDLDNLLAQIGDQYADLFLAAKNLSDAILLSDILRVNTEITKAPLSASMIKRYDEHHQDLTLLKALVRQQLPEKYKEIFFDQSKNGYAGYIDGGASQEEFYKFIKPILEKMDGTEELLVKLNREDLLRKQRTFDNGSIPHQIHLGELHAILRRQEDFYPFLKDNREKIEKILTFRIPYYVGPLARGNSRFAWMTRKSEETITPWNFEEVVDKGASAQSFIERMTNFDKNLPNEKVLPKHSLLYEYFTVYNELTKVKYVTEGMRKPAFLSGEQKKAIVDLLFKTNRKVTVKQLKEDYFKKIECFDSVEISGVEDRFNASLGTYHDLLKIIKDKDFLDNEENEDILEDIVLTLTLFEDREMIEERLKTYAHLFDDKVMKQLKRRRYTGWGRLSRKLINGIRDKQSGKTILDFLKSDGFANRNFMQLIHDDSLTFKEDIQKAQVSGQGDSLHEHIANLAGSPAIKKGILQTVKVVDELVKVMGRHKPENIVIEMARENQTTQKGQKNSRERMKRIEEGIKELGSQILKEHPVENTQLQNEKLYLYYLQNGRDMYVDQELDINRLSDYDVDHIVPQSFLKDDSIDNKVLTRSDKARGKSDNVPSEEVVKKMKNYWRQLLNAKLITQRKFDNLTKAERGGLSELDKAGFIKRQLVETRQITKHVAQILDSRMNTKYDENDKLIREVKVITLKSKLVSDFRKDFQFYKVREINNYHHAHDAYLNAVVGTALIKKYPKLESEFVYGDYKVYDVRKMIAKSEQEIGKATAKYFFYSNIMNFFKTEITLANGEIRKRPLIETNGETGEIVWDKGRDFATVRKVLSMPQVNIVKKTEVQTGGFSKESILPKRNSDKLIARKKDWDPKKYGGFDSPTVAYSVLVVAKVEKGKSKKLKSVKELLGITIMERSSFEKNPIDFLEAKGYKEVKKDLIIKLPKYSLFELENGRKRMLASAGELQKGNELALPSKYVNFLYLASHYEKLKGSPEDNEQKQLFVEQHKHYLDEIIEQISEFSKRVILADANLDKVLSAYNKHRDKPIREQAENIIHLFTLTNLGAPAAFKYFDTTIDRKRYTSTKEVLDATLIHQSITGLYETRIDLSQLGGDGGEAAAKPAPGGGGGTLNIEDEYRLHETSKEPDVSLGSTWLSDFPQAWAETGGMGLAVRQAPLIIPLKATSTPVSIKQYPMSQEARLGIKPHIQRLLDQGILVPCQSPWNTPLLPVKKPGTNDYRPVQDLREVNKRVEDIHPTVPNPYNLLSGLPPSHQWYTVLDLKDAFFCLRLHPTSQPLFAFEWRDPEMGISGQLTWTRLPQGFKNSPTLFNEALHRDLAGFRIQHPDLILLQYVDDLLLAATSELDCQQGTRALLQTLGDLGYRASAKKAQICQKQVKYLGYLLKEGQRWLTEARKETVMGQPIPKTPRQLREFLGKAGFCRLFIPGFAEMAAPLYPLTKPGTLFNWGPDQQKAFQEIKQALLTAPALGLPDLTKPFELFVDEKQGYAKGVLTQKLGPWRRPVAYLSKKLDPVAAGWPPCLRMVAAIAVLTKDAGKLTMGQPLVILAPHAVEALVKQPPDRWLSNARMTHYQALLLDTDRVQFGPVVALNPATLLPLPEEGLQHDCLDILAEAHGTRSDLMDQPLPDADHTWYTDGSSFLQEGQRKAGAAVTTETEVIWARALPAGTSAQRAELIALTQALKMAEGKKLNVYTDSRYAFATAHIHGEIYRRRGWLTSEGKEIKNKDEILALLKALFLPKRLSIIHCPGHQKGNSAEARGNRMADQAAREVATRETPETSTLLAGKRTADGSEFEKRTADGSEFESPKKKAKVE

SEQ ID NO: 4537 - protein, 2127 aa, synthetic construct
MPAAKRVKLDGGDKKYSIGLDIGTNSVGWAVITDEYKVPSKKFKVLGNTDRHSIKKNLIGALLFDSGETAEATRLKRTARRRYTRRKNRICYLQEIFSNEMAKVDDSFFHRLEESFLVEEDKKHERHPIFGNIVDEVAYHEKYPTIYHLRKKLVDSTDKADLRLIYLALAHMIKFRGHFLIEGDLNPDNSDVDKLFIQLVQTYNQLFEENPINASGVDAKAILSARLSKSRRLENLIAQLPGEKKNGLFGNLIALSLGLTPNFKSNFDLAEDAKLQLSKDTYDDDLDNLLAQIGDQYADLFLAAKNLSDAILLSDILRVNTEITKAPLSASMIKRYDEHHQDLTLLKALVRQQLPEKYKEIFFDQSKNGYAGYIDGGASQEEFYKFIKPILEKMDGTEELLVKLNREDLLRKQRTFDNGSIPHQIHLGELHAILRRQEDFYPFLKDNREKIEKILTFRIPYYVGPLARGNSRFAWMTRKSEETITPWNFEEVVDKGASAQSFIERMTNFDKNLPNEKVLPKHSLLYEYFTVYNELTKVKYVTEGMRKPAFLSGEQKKAIVDLLFKTNRKVTVKQLKEDYFKKIECFDSVEISGVEDRFNASLGTYHDLLKIIKDKDFLDNEENEDILEDIVLTLTLFEDREMIEERLKTYAHLFDDKVMKQLKRRRYTGWGRLSRKLINGIRDKQSGKTILDFLKSDGFANRNFMQLIHDDSLTFKEDIQKAQVSGQGDSLHEHIANLAGSPAIKKGILQTVKVVDELVKVMGRHKPENIVIEMARENQTTQKGQKNSRERMKRIEEGIKELGSQILKEHPVENTQLQNEKLYLYYLQNGRDMYVDQELDINRLSDYDVDHIVPQSFLKDDSIDNKVLTRSDKARGKSDNVPSEEVVKKMKNYWRQLLNAKLITQRKFDNLTKAERGGLSELDKAGFIKRQLVETRQITKHVAQILDSRMNTKYDENDKLIREVKVITLKSKLVSDFRKDFQFYKVREINNYHHAHDAYLNAVVGTALIKKYPKLESEFVYGDYKVYDVRKMIAKSEQEIGKATAKYFFYSNIMNFFKTEITLANGEIRKRPLIETNGETGEIVWDKGRDFATVRKVLSMPQVNIVKKTEVQTGGFSKESILPKRNSDKLIARKKDWDPKKYGGFDSPTVAYSVLVVAKVEKGKSKKLKSVKELLGITIMERSSFEKNPIDFLEAKGYKEVKKDLIIKLPKYSLFELENGRKRMLASAGELQKGNELALPSKYVNFLYLASHYEKLKGSPEDNEQKQLFVEQHKHYLDEIIEQISEFSKRVILADANLDKVLSAYNKHRDKPIREQAENIIHLFTLTNLGAPAAFKYFDTTIDRKRYTSTKEVLDATLIHQSITGLYETRIDLSQLGGDGGPAPEAAAKGGGGGLLGRDLLTKLKAQIQFSTEGPQVTWEDRPAMCLVLNLEEEYRLHEKPVPPSIDPSWLQLFPMVWAEKAGMGLANQVPPVVVELKSDASPVAVRQYPMSKEAREGIRPHIQRFLDLGILVPCQSPWNTPLLPVKKPGTNDYRPVQDLREVNKRVQDIHPTVPNPYNLLSSLPPSHTWYSVLDLKDAFFCLKLHPNSQPLFAFEWRDPEKGNTGQLTWTRLPQGFKNSPTLFNEALHRDLASFRALNPQVVMLQYVDDLLVAAPTYRDCKEGTRRLLQELSKLGYRVSAKKAQLCREEVTYLGYLLKGGKRWLTPARKATVMKIPTPTTPRQVREFLGTAGFCRLWIPGFASLAAPLYPLTRPKVPFTWTEAHQEAFGRIKEALLSAPALALPDLTKPFALYVDEKEGVARGVLTQTLGPWRRPVAYLSKKLDPVASGWPTCLKAIAAVALLLKDADKLTLGQNVLVIAPHNLESIVRQPPDRWMTNARMTHYQSLLLNERVSFAPPAILNPATLLPVESDDTPIHICSEILAEETGTRPDLRDQPLPGVPAWYTDGSSFIMDGRRQAGAAIVDNKRTVWASNLPEGTSAQKAELIALTQALRLAEGKSINIYTDSRYAFATAHVHGAIYKQRGWLTSAGKDIKNKEEILALLEAIHLPKRVAIIHCPGHQRGTDPVATGNRKADEAAKQAAQSTRILTETTKNAGKRTADGSEFEKRTADGSEFESPKKKAKVE

SEQ ID NO: 4538 - protein, 2096 aa, synthetic construct
MPAAKRVKLDGGDKKYSIGLDIGTNSVGWAVITDEYKVPSKKFKVLGNTDRHSIKKNLIGALLFDSGETAEATRLKRTARRRYTRRKNRICYLQEIFSNEMAKVDDSFFHRLEESFLVEEDKKHERHPIFGNIVDEVAYHEKYPTIYHLRKKLVDSTDKADLRLIYLALAHMIKFRGHFLIEGDLNPDNSDVDKLFIQLVQTYNQLFEENPINASGVDAKAILSARLSKSRRLENLIAQLPGEKKNGLFGNLIALSLGLTPNFKSNFDLAEDAKLQLSKDTYDDDLDNLLAQIGDQYADLFLAAKNLSDAILLSDILRVNTEITKAPLSASMIKRYDEHHQDLTLLKALVRQQLPEKYKEIFFDQSKNGYAGYIDGGASQEEFYKFIKPILEKMDGTEELLVKLNREDLLRKQRTFDNGSIPHQIHLGELHAILRRQEDFYPFLKDNREKIEKILTFRIPYYVGPLARGNSRFAWMTRKSEETITPWNFEEVVDKGASAQSFIERMTNFDKNLPNEKVLPKHSLLYEYFTVYNELTKVKYVTEGMRKPAFLSGEQKKAIVDLLFKTNRKVTVKQLKEDYFKKIECFDSVEISGVEDRFNASLGTYHDLLKIIKDKDFLDNEENEDILEDIVLTLTLFEDREMIEERLKTYAHLFDDKVMKQLKRRRYTGWGRLSRKLINGIRDKQSGKTILDFLKSDGFANRNFMQLIHDDSLTFKEDIQKAQVSGQGDSLHEHIANLAGSPAIKKGILQTVKVVDELVKVMGRHKPENIVIEMARENQTTQKGQKNSRERMKRIEEGIKELGSQILKEHPVENTQLQNEKLYLYYLQNGRDMYVDQELDINRLSDYDVDHIVPQSFLKDDSIDNKVLTRSDKARGKSDNVPSEEVVKKMKNYWRQLLNAKLITQRKFDNLTKAERGGLSELDKAGFIKRQLVETRQITKHVAQILDSRMNTKYDENDKLIREVKVITLKSKLVSDFRKDFQFYKVREINNYHHAHDAYLNAVVGTALIKKYPKLESEFVYGDYKVYDVRKMIAKSEQEIGKATAKYFFYSNIMNFFKTEITLANGEIRKRPLIETNGETGEIVWDKGRDFATVRKVLSMPQVNIVKKTEVQTGGFSKESILPKRNSDKLIARKKDWDPKKYGGFDSPTVAYSVLVVAKVEKGKSKKLKSVKELLGITIMERSSFEKNPIDFLEAKGYKEVKKDLIIKLPKYSLFELENGRKRMLASAGELQKGNELALPSKYVNFLYLASHYEKLKGSPEDNEQKQLFVEQHKHYLDEIIEQISEFSKRVILADANLDKVLSAYNKHRDKPIREQAENIIHLFTLTNLGAPAAFKYFDTTIDRKRYTSTKEVLDATLIHQSITGLYETRIDLSQLGGDGGGSSEAAAKPAPGGTLNIEDEYRLHETSKEPDVPLGSTWLSDFPQAWAETGGMGLAVRQAPLIIPLKATSTPVSIKQYPMSQEARLGIKPHIQRLLDQGILVPCQSPWNTPLLPVKKPGTNDYRPVQDLREVNKRVEDIHPTVPNPYNLLSGLPPSHQWYTVLDLKDAFFCLRLHPTSQPLFAFEWRDPEMGISGQLTWTRLPQGFKNSPTLFNEALHRDLADFRIQHPDLILLQYVDDLLLAATSEQDCQRGTRALLQTLGNLGYRASAKKAQICQKQVKYLGYLLKEGQRWLTEARKETVMGQPTPKTPRQLREFLGTAGFCRLWIPGFAEMAAPLYPLTKPGTLFNWGPDQQKAYQEIKQALLTAPALGLPDLTKPFELFVDEKQGYAKGVLTQKLGPWRRPVAYLSKKLDPVAAGWPPCLRMVAAIAVLTKDAGKLTMGQPLVILAPHAVEALVKQPPDRWLSNARMTHYQAMLLDTDRVQFGPVVALNPATLLPLPEKEAPHDCLEILAETHGTRPDLTDQPIPDADYTWYTDGSSFLQEGQRRAGAAVTTETEVIWARALPAGTSAQRAELIALTQALKMAEGKKLNVYTDSRYAFATAHVHGEIYRRRGWLTSEGREIKNKNEILALLKALFLPKRLSIIHCPGHQKGNSAEARGNRMADQAAREAAMKAVLETSTLLAGKRTADGSEFEKRTADGSEFESPKKKAKVE

SEQ ID NO: 4539 - protein, 2098 aa, synthetic construct
MPAAKRVKLDGGDKKYSIGLDIGTNSVGWAVITDEYKVPSKKFKVLGNTDRHSIKKNLIGALLFDSGETAEATRLKRTARRRYTRRKNRICYLQEIFSNEMAKVDDSFFHRLEESFLVEEDKKHERHPIFGNIVDEVAYHEKYPTIYHLRKKLVDSTDKADLRLIYLALAHMIKFRGHFLIEGDLNPDNSDVDKLFIQLVQTYNQLFEENPINASGVDAKAILSARLSKSRRLENLIAQLPGEKKNGLFGNLIALSLGLTPNFKSNFDLAEDAKLQLSKDTYDDDLDNLLAQIGDQYADLFLAAKNLSDAILLSDILRVNTEITKAPLSASMIKRYDEHHQDLTLLKALVRQQLPEKYKEIFFDQSKNGYAGYIDGGASQEEFYKFIKPILEKMDGTEELLVKLNREDLLRKQRTFDNGSIPHQIHLGELHAILRRQEDFYPFLKDNREKIEKILTFRIPYYVGPLARGNSRFAWMTRKSEETITPWNFEEVVDKGASAQSFIERMTNFDKNLPNEKVLPKHSLLYEYFTVYNELTKVKYVTEGMRKPAFLSGEQKKAIVDLLFKTNRKVTVKQLKEDYFKKIECFDSVEISGVEDRFNASLGTYHDLLKIIKDKDFLDNEENEDILEDIVLTLTLFEDREMIEERLKTYAHLFDDKVMKQLKRRRYTGWGRLSRKLINGIRDKQSGKTILDFLKSDGFANRNFMQLIHDDSLTFKEDIQKAQVSGQGDSLHEHIANLAGSPAIKKGILQTVKVVDELVKVMGRHKPENIVIEMARENQTTQKGQKNSRERMKRIEEGIKELGSQILKEHPVENTQLQNEKLYLYYLQNGRDMYVDQELDINRLSDYDVDHIVPQSFLKDDSIDNKVLTRSDKARGKSDNVPSEEVVKKMKNYWRQLLNAKLITQRKFDNLTKAERGGLSELDKAGFIKRQLVETRQITKHVAQILDSRMNTKYDENDKLIREVKVITLKSKLVSDFRKDFQFYKVREINNYHHAHDAYLNAVVGTALIKKYPKLESEFVYGDYKVYDVRKMIAKSEQEIGKATAKYFFYSNIMNFFKTEITLANGEIRKRPLIETNGETGEIVWDKGRDFATVRKVLSMPQVNIVKKTEVQTGGFSKESILPKRNSDKLIARKKDWDPKKYGGFDSPTVAYSVLVVAKVEKGKSKKLKSVKELLGITIMERSSFEKNPIDFLEAKGYKEVKKDLIIKLPKYSLFELENGRKRMLASAGELQKGNELALPSKYVNFLYLASHYEKLKGSPEDNEQKQLFVEQHKHYLDEIIEQISEFSKRVILADANLDKVLSAYNKHRDKPIREQAENIIHLFTLTNLGAPAAFKYFDTTIDRKRYTSTKEVLDATLIHQSITGLYETRIDLSQLGGDGGGSSPAPEAAAKGGTAPLEEEYRLFLEAPIQNVTLLEQWKREIPKVWAEINPPGLASTQAPIHVQLLSTALPVRVRQYPITLEAKRSLRETIRKFRAAGILRPVHSPWNTPLLPVRKSGTSEYRMVQDLREVNKRVETIHPTVPNPYTLLSLLPPDRIWYSVLDLKDAFFCIPLAPESQLIFAFEWADAEEGESGQLTWTRLPQGFKNSPTLFNEALNRDLQGFRLDHPSVSLLQYVDDLLIAADTQAACLSATRDLLMTLAELGYRVSGKKAQLCQEEVTYLGFKIHKGSRSLSNSRTQAILQIPVPKTKRQVREFLGKIGYCRLFIPGFAELAQPLYAATRPGNDPLVWGEKEEEAFQSLKLALTQPPALALPSLDKPFQLFVEETSGAAKGVLTQALGPWKRPVAYLSKRLDPVAAGWPRCLRAIAAAALLTREASKLTFGQDIEITSSHNLESLLRSPPDKWLTNARITQYQVLLLDPPRVRFKQTAALNPATLLPETDDTLPIHHCLDTLDSLTSTRPDLTDQPLAQAEATLFTDGSSYIRDGKRYAGAAVVTLDSVIWAEPLPIGTSAQKAELIALTKALEWSKDKSVNIYTDSRYAFATLHVHGMIYRERGWLTAGGKAIKNAPEILALLTAVWLPKRVAVMHCKGHQKDDAPTSTGNRRADEVAREVAIRPLSTQATISAGKRTADGSEFEKRTADGSEFESPKKKAKVE

SEQ ID NO: 4540 - protein, 2131 aa, synthetic construct
MPAAKRVKLDGGDKKYSIGLDIGTNSVGWAVITDEYKVPSKKFKVLGNTDRHSIKKNLIGALLFDSGETAEATRLKRTARRRYTRRKNRICYLQEIFSNEMAKVDDSFFHRLEESFLVEEDKKHERHPIFGNIVDEVAYHEKYPTIYHLRKKLVDSTDKADLRLIYLALAHMIKFRGHFLIEGDLNPDNSDVDKLFIQLVQTYNQLFEENPINASGVDAKAILSARLSKSRRLENLIAQLPGEKKNGLFGNLIALSLGLTPNFKSNFDLAEDAKLQLSKDTYDDDLDNLLAQIGDQYADLFLAAKNLSDAILLSDILRVNTEITKAPLSASMIKRYDEHHQDLTLLKALVRQQLPEKYKEIFFDQSKNGYAGYIDGGASQEEFYKFIKPILEKMDGTEELLVKLNREDLLRKQRTFDNGSIPHQIHLGELHAILRRQEDFYPFLKDNREKIEKILTFRIPYYVGPLARGNSRFAWMTRKSEETITPWNFEEVVDKGASAQSFIERMTNFDKNLPNEKVLPKHSLLYEYFTVYNELTKVKYVTEGMRKPAFLSGEQKKAIVDLLFKTNRKVTVKQLKEDYFKKIECFDSVEISGVEDRFNASLGTYHDLLKIIKDKDFLDNEENEDILEDIVLTLTLFEDREMIEERLKTYAHLFDDKVMKQLKRRRYTGWGRLSRKLINGIRDKQSGKTILDFLKSDGFANRNFMQLIHDDSLTFKEDIQKAQVSGQGDSLHEHIANLAGSPAIKKGILQTVKVVDELVKVMGRHKPENIVIEMARENQTTQKGQKNSRERMKRIEEGIKELGSQILKEHPVENTQLQNEKLYLYYLQNGRDMYVDQELDINRLSDYDVDHIVPQSFLKDDSIDNKVLTRSDKARGKSDNVPSEEVVKKMKNYWRQLLNAKLITQRKFDNLTKAERGGLSELDKAGFIKRQLVETRQITKHVAQILDSRMNTKYDENDKLIREVKVITLKSKLVSDFRKDFQFYKVREINNYHHAHDAYLNAVVGTALIKKYPKLESEFVYGDYKVYDVRKMIAKSEQEIGKATAKYFFYSNIMNFFKTEITLANGEIRKRPLIETNGETGEIVWDKGRDFATVRKVLSMPQVNIVKKTEVQTGGFSKESILPKRNSDKLIARKKDWDPKKYGGFDSPTVAYSVLVVAKVEKGKSKKLKSVKELLGITIMERSSFEKNPIDFLEAKGYKEVKKDLIIKLPKYSLFELENGRKRMLASAGELQKGNELALPSKYVNFLYLASHYEKLKGSPEDNEQKQLFVEQHKHYLDEIIEQISEFSKRVILADANLDKVLSAYNKHRDKPIREQAENIIHLFTLTNLGAPAAFKYFDTTIDRKRYTSTKEVLDATLIHQSITGLYETRIDLSQLGGDGGAEAAAKEAAAKEAAAKEAAAKALEAEAAAKEAAAKEAAAKEAAAKAGGTLNIEDEYRLHETSKGPDVPLGSTWLSDFPQAWAETGGMGLAVRQAPLIIPLKATSTPVSIKQYPMSQEARLGIKPHIQRLLDQGILVPCQSPWNTPLLPVKKPGTNDYRPVQDLREVNKRVEDIHPTVPNPYNLLSGLPPSHQWYTVLDLKDAFFCLRLHPTSQSLFAFEWRDPEMGISGQLTWTRLPQGFKNSPTLFNEALHRDLADFRIQHPDLILLQYVDDLLLAATSELDCQQGTRALLQTLGDLGYRASAKKAQICQKQVKYLGYLLKEGQRWLTEARKETVMGQPTPKTPRQLREFLGTAGFCRLWIPGFAEMAAPLYPLTKPGTLFEWGPDQQKAYQEIKQALLTAPALGLPDLTKPFELFVDEKQGYAKGVLTQKLGPWRRPVAYLSKKLDPVAAGWPPCLRMVAAIAVLTKDAGKLTMGQPLVILAPHAVEALVKQPPDRWLSNARMTHYQALLLDTDRVQFGPIVALNPATLLPLPEEGLQHDCLDILAEAHGTRPDLTDQPLPDADHTWYTDGSSFLQEGQRKAGAAVTTETEVVWAKALPAGTSAQRAELIALTQALKMAEGKKLNVYTDSRYAFATAHIHGEIYRRRGWLTSEGKEIKNKDEILALLKALFLPKRLSIIHCPGHQKGNRAEARGNRMADQAAREVATRETPETSTLLAGKRTADGSEFEKRTADGSEFESPKKKAKVE

SEQ ID NO: 4541 - protein, 2122 aa, synthetic construct
MPAAKRVKLDGGDKKYSIGLDIGTNSVGWAVITDEYKVPSKKFKVLGNTDRHSIKKNLIGALLFDSGETAEATRLKRTARRRYTRRKNRICYLQEIFSNEMAKVDDSFFHRLEESFLVEEDKKHERHPIFGNIVDEVAYHEKYPTIYHLRKKLVDSTDKADLRLIYLALAHMIKFRGHFLIEGDLNPDNSDVDKLFIQLVQTYNQLFEENPINASGVDAKAILSARLSKSRRLENLIAQLPGEKKNGLFGNLIALSLGLTPNFKSNFDLAEDAKLQLSKDTYDDDLDNLLAQIGDQYADLFLAAKNLSDAILLSDILRVNTEITKAPLSASMIKRYDEHHQDLTLLKALVRQQLPEKYKEIFFDQSKNGYAGYIDGGASQEEFYKFIKPILEKMDGTEELLVKLNREDLLRKQRTFDNGSIPHQIHLGELHAILRRQEDFYPFLKDNREKIEKILTFRIPYYVGPLARGNSRFAWMTRKSEETITPWNFEEVVDKGASAQSFIERMTNFDKNLPNEKVLPKHSLLYEYFTVYNELTKVKYVTEGMRKPAFLSGEQKKAIVDLLFKTNRKVTVKQLKEDYFKKIECFDSVEISGVEDRFNASLGTYHDLLKIIKDKDFLDNEENEDILEDIVLTLTLFEDREMIEERLKTYAHLFDDKVMKQLKRRRYTGWGRLSRKLINGIRDKQSGKTILDFLKSDGFANRNFMQLIHDDSLTFKEDIQKAQVSGQGDSLHEHIANLAGSPAIKKGILQTVKVVDELVKVMGRHKPENIVIEMARENQTTQKGQKNSRERMKRIEEGIKELGSQILKEHPVENTQLQNEKLYLYYLQNGRDMYVDQELDINRLSDYDVDHIVPQSFLKDDSIDNKVLTRSDKARGKSDNVPSEEVVKKMKNYWRQLLNAKLITQRKFDNLTKAERGGLSELDKAGFIKRQLVETRQITKHVAQILDSRMNTKYDENDKLIREVKVITLKSKLVSDFRKDFQFYKVREINNYHHAHDAYLNAVVGTALIKKYPKLESEFVYGDYKVYDVRKMIAKSEQEIGKATAKYFFYSNIMNFFKTEITLANGEIRKRPLIETNGETGEIVWDKGRDFATVRKVLSMPQVNIVKKTEVQTGGFSKESILPKRNSDKLIARKKDWDPKKYGGFDSPTVAYSVLVVAKVEKGKSKKLKSVKELLGITIMERSSFEKNPIDFLEAKGYKEVKKDLIIKLPKYSLFELENGRKRMLASAGELQKGNELALPSKYVNFLYLASHYEKLKGSPEDNEQKQLFVEQHKHYLDEIIEQISEFSKRVILADANLDKVLSAYNKHRDKPIREQAENIIHLFTLTNLGAPAAFKYFDTTIDRKRYTSTKEVLDATLIHQSITGLYETRIDLSQLGGDGGAEAAAKEAAAKEAAAKEAAAKALEAEAAAKEAAAKEAAAKEAAAKAGGIPWLMKKPLQLTTLVPLQEYEERLLKQTMLTGSYKEKLQSLFLKYDALWQHWENQVGHRRIKPHHIATGTVNPRPQKQYPINPKAKASIQTVINDLLKQGVLIQQNSIMNTPVYPVPKPDGKWRMVLDYREVNKTIPLIAAQNQHSAGILSSIFRGKYKTTLDLSNGFWAHSITPESYWLTAFTWLGQQYCWTRLPQGFLNSPALFNADVVDLLKEVPNVQVYVDDIYISHDDPREHLEQLEKVFSLLLNAGYVVSLKKSEIAQHEVEFLGFNITKEGRGLTETFKQKLLNITPPRDLKQLQSILGKLNFARNFIPNFSELVKPLYNIIATAPGKYITWTTDNSQQLQNIISMLNSAENLEERNPEVRLIMKVNTSPSAGYIRFYNEFAKRPIMYLNYVYTKAEVKFTNTEKLLTTIHKGLIKALDLGMGQEILVYSPIVSMTKIQKTPLPERKALPIRWITWMSYLEDPRIQFHYDKTLPELQQVPTVTDDIIAKIKHPSEFSMVFYTDGSAIKHPNVNKSHNAGMGIAQVQFKPEFTVINTWSIPLGDHTAQLAEVAAVEFACKKALKIDGPVLIVTDSFYVAESVNKELPYWQSNGFFNNKKKPLKHVSKWKSIADCIQLKPDIIIIHEKGHQPTASTFHTEGNNLADKLATQGSYVVNAGKRTADGSEFEKRTADGSEFESPKKKAKVE

SEQ ID NO: 4542-6000 - skipped (1459 entries)

SEQ ID NO: 6001 - protein, 2090 aa, synthetic construct
MPAAKRVKLDGGDKKYSIGLDIGTNSVGWAVITDEYKVPSKKFKVLGNTDRHSIKKNLIGALLFDSGETAEATRLKRTARRRYTRRKNRICYLQEIFSNEMAKVDDSFFHRLEESFLVEEDKKHERHPIFGNIVDEVAYHEKYPTIYHLRKKLVDSTDKADLRLIYLALAHMIKFRGHFLIEGDLNPDNSDVDKLFIQLVQTYNQLFEENPINASGVDAKAILSARLSKSRRLENLIAQLPGEKKNGLFGNLIALSLGLTPNFKSNFDLAEDAKLQLSKDTYDDDLDNLLAQIGDQYADLFLAAKNLSDAILLSDILRVNTEITKAPLSASMIKRYDEHHQDLTLLKALVRQQLPEKYKEIFFDQSKNGYAGYIDGGASQEEFYKFIKPILEKMDGTEELLVKLNREDLLRKQRTFDNGSIPHQIHLGELHAILRRQEDFYPFLKDNREKIEKILTFRIPYYVGPLARGNSRFAWMTRKSEETITPWNFEEVVDKGASAQSFIERMTNFDKNLPNEKVLPKHSLLYEYFTVYNELTKVKYVTEGMRKPAFLSGEQKKAIVDLLFKTNRKVTVKQLKEDYFKKIECFDSVEISGVEDRFNASLGTYHDLLKIIKDKDFLDNEENEDILEDIVLTLTLFEDREMIEERLKTYAHLFDDKVMKQLKRRRYTGWGRLSRKLINGIRDKQSGKTILDFLKSDGFANRNFMQLIHDDSLTFKEDIQKAQVSGQGDSLHEHIANLAGSPAIKKGILQTVKVVDELVKVMGRHKPENIVIEMARENQTTQKGQKNSRERMKRIEEGIKELGSQILKEHPVENTQLQNEKLYLYYLQNGRDMYVDQELDINRLSDYDVDHIVPQSFLKDDSIDNKVLTRSDKARGKSDNVPSEEVVKKMKNYWRQLLNAKLITQRKFDNLTKAERGGLSELDKAGFIKRQLVETRQITKHVAQILDSRMNTKYDENDKLIREVKVITLKSKLVSDFRKDFQFYKVREINNYHHAHDAYLNAVVGTALIKKYPKLESEFVYGDYKVYDVRKMIAKSEQEIGKATAKYFFYSNIMNFFKTEITLANGEIRKRPLIETNGETGEIVWDKGRDFATVRKVLSMPQVNIVKKTEVQTGGFSKESILPKRNSDKLIARKKDWDPKKYGGFDSPTVAYSVLVVAKVEKGKSKKLKSVKELLGITIMERSSFEKNPIDFLEAKGYKEVKKDLIIKLPKYSLFELENGRKRMLASAGELQKGNELALPSKYVNFLYLASHYEKLKGSPEDNEQKQLFVEQHKHYLDEIIEQISEFSKRVILADANLDKVLSAYNKHRDKPIREQAENIIHLFTLTNLGAPAAFKYFDTTIDRKRYTSTKEVLDATLIHQSITGLYETRIDLSQLGGDGGGGSGGTAPLEEEYRLFLEAPIQNVTLLEQWKREIPKVWAEINPPGLASTQAPIHVQLLSTALPVRVRQYPITLEAKRSLRETIRKFRAAGILRPVHSPWNTPLLPVRKSGTSEYRMVQDLREVNKRVETIHPTVPNPYTLLSLLPPDRIWYSVLDLKDAFFCIPLAPESQLIFAFEWADAEEGESGQLTWTRLPQGFKNSPTLFNEALNRDLQGFRLDHPSVSLLQYVDDLLIAADTQAACLSATRDLLMTLAELGYRVSGKKAQLCQEEVTYLGFKIHKGSRSLSNSRTQAILQIPVPKTKRQVREFLGKIGYCRLFIPGFAELAQPLYAATRPGNDPLVWGEKEEEAFQSLKLALTQPPALALPSLDKPFQLFVEETSGAAKGVLTQALGPWKRPVAYLSKRLDPVAAGWPRCLRAIAAAALLTREASKLTFGQDIEITSSHNLESLLRSPPDKWLTNARITQYQVLLLDPPRVRFKQTAALNPATLLPETDDTLPIHHCLDTLDSLTSTRPDLTDQPLAQAEATLFTDGSSYIRDGKRYAGAAVVTLDSVIWAEPLPIGTSAQKAELIALTKALEWSKDKSVNIYTDSRYAFATLHVHGMIYRERGWLTAGGKAIKNAPEILALLTAVWLPKRVAVMHCKGHQKDDAPTSTGNRRADEVAREVAIRPLSTQATISAGKRTADGSEFEKRTADGSEFESPKKKAKVE

SEQ ID NO: 6002 - protein, 2094 aa, synthetic construct
MPAAKRVKLDGGDKKYSIGLDIGTNSVGWAVITDEYKVPSKKFKVLGNTDRHSIKKNLIGALLFDSGETAEATRLKRTARRRYTRRKNRICYLQEIFSNEMAKVDDSFFHRLEESFLVEEDKKHERHPIFGNIVDEVAYHEKYPTIYHLRKKLVDSTDKADLRLIYLALAHMIKFRGHFLIEGDLNPDNSDVDKLFIQLVQTYNQLFEENPINASGVDAKAILSARLSKSRRLENLIAQLPGEKKNGLFGNLIALSLGLTPNFKSNFDLAEDAKLQLSKDTYDDDLDNLLAQIGDQYADLFLAAKNLSDAILLSDILRVNTEITKAPLSASMIKRYDEHHQDLTLLKALVRQQLPEKYKEIFFDQSKNGYAGYIDGGASQEEFYKFIKPILEKMDGTEELLVKLNREDLLRKQRTFDNGSIPHQIHLGELHAILRRQEDFYPFLKDNREKIEKILTFRIPYYVGPLARGNSRFAWMTRKSEETITPWNFEEVVDKGASAQSFIERMTNFDKNLPNEKVLPKHSLLYEYFTVYNELTKVKYVTEGMRKPAFLSGEQKKAIVDLLFKTNRKVTVKQLKEDYFKKIECFDSVEISGVEDRFNASLGTYHDLLKIIKDKDFLDNEENEDILEDIVLTLTLFEDREMIEERLKTYAHLFDDKVMKQLKRRRYTGWGRLSRKLINGIRDKQSGKTILDFLKSDGFANRNFMQLIHDDSLTFKEDIQKAQVSGQGDSLHEHIANLAGSPAIKKGILQTVKVVDELVKVMGRHKPENIVIEMARENQTTQKGQKNSRERMKRIEEGIKELGSQILKEHPVENTQLQNEKLYLYYLQNGRDMYVDQELDINRLSDYDVDHIVPQSFLKDDSIDNKVLTRSDKARGKSDNVPSEEVVKKMKNYWRQLLNAKLITQRKFDNLTKAERGGLSELDKAGFIKRQLVETRQITKHVAQILDSRMNTKYDENDKLIREVKVITLKSKLVSDFRKDFQFYKVREINNYHHAHDAYLNAVVGTALIKKYPKLESEFVYGDYKVYDVRKMIAKSEQEIGKATAKYFFYSNIMNFFKTEITLANGEIRKRPLIETNGETGEIVWDKGRDFATVRKVLSMPQVNIVKKTEVQTGGFSKESILPKRNSDKLIARKKDWDPKKYGGFDSPTVAYSVLVVAKVEKGKSKKLKSVKELLGITIMERSSFEKNPIDFLEAKGYKEVKKDLIIKLPKYSLFELENGRKRMLASAGELQKGNELALPSKYVNFLYLASHYEKLKGSPEDNEQKQLFVEQHKHYLDEIIEQISEFSKRVILADANLDKVLSAYNKHRDKPIREQAENIIHLFTLTNLGAPAAFKYFDTTIDRKRYTSTKEVLDATLIHQSITGLYETRIDLSQLGGDGGGGSGGTVSLQDEHRLFDIPVTTSLPDVWLQDFPQAWAETGGLGRAKCQAPIIIDLKPTAVPVSIKQYPMSLEAHMGIRQHIIKFLELGVLRPCRSPWNTPLLPVKKPGTQDYRPVQDLREINKRTVDIHPTVPNPYNLLSTLKPDYSWYTVLDLKDAFFCLPLAPQSQELFAFEWKDPERGISGQLTWTRLPQGFKNSPTLFDEALHRDLTDFRTQHPEVTLLQYVDDLLLAAPTKKACTQGTRHLLQELGEKGYRASAKKAQICQTKVTYLGYILSEGKRWLTPGRIETVARIPPPRNPREVREFLGTAGFCRLWIPGFAELAAPLYALTKESTPFTWQTEHQLAFEALKKALLSAPALGLPDTSKPFTLFLDERQGIAKGVLTQKLGPWKRPVAYLSKKLDPVAAGWPPCLRIMAATAMLVKDSAKLTLGQPLTVITPHTLEAIVRQPPDRWITNARLTHYQALLLDTDRVQFGPPVTLNPATLLPVPENQPSPHDCRQVLAETHGTREDLKDQELPDADHTWYTDGSSYLDSGTRRAGAAVVDGHNTIWAQSLPPGTSAQKAELIALTKALELSKGKKANIYTDSRYAFATAHTHGSIYERRGLLTSEGKEIKNKAEIIALLKALFLPQEVAIIHCPGHQKGQDPVAVGNRQADRVARQAAMAEVLTLATEPDNTSHITAGKRTADGSEFEKRTADGSEFESPKKKAKVE

SEQ ID NO: 6003 - protein, 2079 aa, synthetic construct
MPAAKRVKLDGGDKKYSIGLDIGTNSVGWAVITDEYKVPSKKFKVLGNTDRHSIKKNLIGALLFDSGETAEATRLKRTARRRYTRRKNRICYLQEIFSNEMAKVDDSFFHRLEESFLVEEDKKHERHPIFGNIVDEVAYHEKYPTIYHLRKKLVDSTDKADLRLIYLALAHMIKFRGHFLIEGDLNPDNSDVDKLFIQLVQTYNQLFEENPINASGVDAKAILSARLSKSRRLENLIAQLPGEKKNGLFGNLIALSLGLTPNFKSNFDLAEDAKLQLSKDTYDDDLDNLLAQIGDQYADLFLAAKNLSDAILLSDILRVNTEITKAPLSASMIKRYDEHHQDLTLLKALVRQQLPEKYKEIFFDQSKNGYAGYIDGGASQEEFYKFIKPILEKMDGTEELLVKLNREDLLRKQRTFDNGSIPHQIHLGELHAILRRQEDFYPFLKDNREKIEKILTFRIPYYVGPLARGNSRFAWMTRKSEETITPWNFEEVVDKGASAQSFIERMTNFDKNLPNEKVLPKHSLLYEYFTVYNELTKVKYVTEGMRKPAFLSGEQKKAIVDLLFKTNRKVTVKQLKEDYFKKIECFDSVEISGVEDRFNASLGTYHDLLKIIKDKDFLDNEENEDILEDIVLTLTLFEDREMIEERLKTYAHLFDDKVMKQLKRRRYTGWGRLSRKLINGIRDKQSGKTILDFLKSDGFANRNFMQLIHDDSLTFKEDIQKAQVSGQGDSLHEHIANLAGSPAIKKGILQTVKVVDELVKVMGRHKPENIVIEMARENQTTQKGQKNSRERMKRIEEGIKELGSQILKEHPVENTQLQNEKLYLYYLQNGRDMYVDQELDINRLSDYDVDHIVPQSFLKDDSIDNKVLTRSDKARGKSDNVPSEEVVKKMKNYWRQLLNAKLITQRKFDNLTKAERGGLSELDKAGFIKRQLVETRQITKHVAQILDSRMNTKYDENDKLIREVKVITLKSKLVSDFRKDFQFYKVREINNYHHAHDAYLNAVVGTALIKKYPKLESEFVYGDYKVYDVRKMIAKSEQEIGKATAKYFFYSNIMNFFKTEITLANGEIRKRPLIETNGETGEIVWDKGRDFATVRKVLSMPQVNIVKKTEVQTGGFSKESILPKRNSDKLIARKKDWDPKKYGGFDSPTVAYSVLVVAKVEKGKSKKLKSVKELLGITIMERSSFEKNPIDFLEAKGYKEVKKDLIIKLPKYSLFELENGRKRMLASAGELQKGNELALPSKYVNFLYLASHYEKLKGSPEDNEQKQLFVEQHKHYLDEIIEQISEFSKRVILADANLDKVLSAYNKHRDKPIREQAENIIHLFTLTNLGAPAAFKYFDTTIDRKRYTSTKEVLDATLIHQSITGLYETRIDLSQLGGDGGGGSGGVPWILKKPLELTIKLDLEEQQGTLLNNSILSKKGKEELKQLFEKYSALWQSWENQVGHRRIRPHKIATGTVKPTPQKQYHINPKAKPDIQIVINDLLKQGVLIQKESTMNTPVYPVPKPNGRWRMVLDYRAVNKVTPLIAVQNQHSYGILGSLFKGRYKTTIDLSNGFWAHPIVPEDYWITAFTWQGKQYCWTVLPQGFLNSPGLFTGDVVDLLQGIPNVEVYVDDVYISHDSEKEHLEYLDILFNRLKEAGYIISLKKSNIANSIVDFLGFQITNEGRGLTDTFKEKLENITAPTTLKQLQSILGLLNFARNFIPDFTELIAPLYALIPKSTKNYVPWQIEHSTTLETLITKLNGAEYLQGRKGDKTLIMKVNASYTTGYIRYYNEGEKKPISYVSIVFSKTELKFTELEKLLTTVHKGLLKALDLSMGQNIHVYSPIVSMQNIQKTPQTAKKALASRWLSWLSYLEDPRIRFFYDPQMPALKDLPAVDTGKDNKKHPSNFQHIFYTDGSAITSPTKEGHLNAGMGIVYFINKDGNLQKQQEWSISLGNHTAQFAEIAAFEFALKKCLPLGGNILVVTDSNYVAKAYNEELDVWASNGFVNNRKKPLKHISKWKSVADLKRLRPDVVVTHEPGHQKLDSSPHAYGNNLADQLATQASFKVHAGKRTADGSEFEKRTADGSEFESPKKKAKVE

SEQ ID NO: 6004 - protein, 2087 aa, synthetic construct
MPAAKRVKLDGGDKKYSIGLDIGTNSVGWAVITDEYKVPSKKFKVLGNTDRHSIKKNLIGALLFDSGETAEATRLKRTARRRYTRRKNRICYLQEIFSNEMAKVDDSFFHRLEESFLVEEDKKHERHPIFGNIVDEVAYHEKYPTIYHLRKKLVDSTDKADLRLIYLALAHMIKFRGHFLIEGDLNPDNSDVDKLFIQLVQTYNQLFEENPINASGVDAKAILSARLSKSRRLENLIAQLPGEKKNGLFGNLIALSLGLTPNFKSNFDLAEDAKLQLSKDTYDDDLDNLLAQIGDQYADLFLAAKNLSDAILLSDILRVNTEITKAPLSASMIKRYDEHHQDLTLLKALVRQQLPEKYKEIFFDQSKNGYAGYIDGGASQEEFYKFIKPILEKMDGTEELLVKLNREDLLRKQRTFDNGSIPHQIHLGELHAILRRQEDFYPFLKDNREKIEKILTFRIPYYVGPLARGNSRFAWMTRKSEETITPWNFEEVVDKGASAQSFIERMTNFDKNLPNEKVLPKHSLLYEYFTVYNELTKVKYVTEGMRKPAFLSGEQKKAIVDLLFKTNRKVTVKQLKEDYFKKIECFDSVEISGVEDRFNASLGTYHDLLKIIKDKDFLDNEENEDILEDIVLTLTLFEDREMIEERLKTYAHLFDDKVMKQLKRRRYTGWGRLSRKLINGIRDKQSGKTILDFLKSDGFANRNFMQLIHDDSLTFKEDIQKAQVSGQGDSLHEHIANLAGSPAIKKGILQTVKVVDELVKVMGRHKPENIVIEMARENQTTQKGQKNSRERMKRIEEGIKELGSQILKEHPVENTQLQNEKLYLYYLQNGRDMYVDQELDINRLSDYDVDHIVPQSFLKDDSIDNKVLTRSDKARGKSDNVPSEEVVKKMKNYWRQLLNAKLITQRKFDNLTKAERGGLSELDKAGFIKRQLVETRQITKHVAQILDSRMNTKYDENDKLIREVKVITLKSKLVSDFRKDFQFYKVREINNYHHAHDAYLNAVVGTALIKKYPKLESEFVYGDYKVYDVRKMIAKSEQEIGKATAKYFFYSNIMNFFKTEITLANGEIRKRPLIETNGETGEIVWDKGRDFATVRKVLSMPQVNIVKKTEVQTGGFSKESILPKRNSDKLIARKKDWDPKKYGGFDSPTVAYSVLVVAKVEKGKSKKLKSVKELLGITIMERSSFEKNPIDFLEAKGYKEVKKDLIIKLPKYSLFELENGRKRMLASAGELQKGNELALPSKYVNFLYLASHYEKLKGSPEDNEQKQLFVEQHKHYLDEIIEQISEFSKRVILADANLDKVLSAYNKHRDKPIREQAENIIHLFTLTNLGAPAAFKYFDTTIDRKRYTSTKEVLDATLIHQSITGLYETRIDLSQLGGDGGGGSGGTLQLEEEYRLFEPESTQKQEMDIWLKNFPQAWAETGGMGTAHCQAPVLIQLKATATPISIRQYPMPHEAYQGIKPHIRRMLDQGILKPCQSPWNTPLLPVKKPGTEDYRPVQDLREVNKRVEDIHPTVPNPYNLLSTLPPSHPWYTVLDLKDAFFCLRLHSESQLLFAFEWRDPEIGLSGQLTWTRLPQGFKNSPTLFNEALHSDLADFRVRYPALVLLQYVDDLLLAAATRTECLEGTKALLETLGNKGYRASAKKAQICLQEVTYLGYSLKDGQRWLTKARKEAILSIPVPKNSRQVREFLGKAGYCRLFIPGFAELAAPLYPLTRPGTLFQWGTEQQLAFEDIKKALLSSPALGLPDITKPFELFIDENSGFAKGVLVQKLGPWKRPVAYLSKKLDTVASGWPPCLRMVAAIAILVKDAGKLTLGQPLTILTSHPVEALVRQPPNKWLSNARMTHYQAMLLDAERVHFGPTVSLNPATLLPLPSGGNHHDCLQILAETHGTRPDLTDQPLPDADLTWYTDGSSFIRNGEREAGAAVTTESEVIWAAPLPPGTSAQRAELIALTQALKMAEGKKLTVYTDSRYAFATTHVHGEIYRRRGWLTSEGKEIKNKNEILALLEALFLPKRLSIIHCPGHQKGDSPQAKGNRLADDTAKKAATETHSSLTVLPAGKRTADGSEFEKRTADGSEFESPKKKAKVE

SEQ ID NO: 6005 - protein, 2079 aa, synthetic construct
MPAAKRVKLDGGDKKYSIGLDIGTNSVGWAVITDEYKVPSKKFKVLGNTDRHSIKKNLIGALLFDSGETAEATRLKRTARRRYTRRKNRICYLQEIFSNEMAKVDDSFFHRLEESFLVEEDKKHERHPIFGNIVDEVAYHEKYPTIYHLRKKLVDSTDKADLRLIYLALAHMIKFRGHFLIEGDLNPDNSDVDKLFIQLVQTYNQLFEENPINASGVDAKAILSARLSKSRRLENLIAQLPGEKKNGLFGNLIALSLGLTPNFKSNFDLAEDAKLQLSKDTYDDDLDNLLAQIGDQYADLFLAAKNLSDAILLSDILRVNTEITKAPLSASMIKRYDEHHQDLTLLKALVRQQLPEKYKEIFFDQSKNGYAGYIDGGASQEEFYKFIKPILEKMDGTEELLVKLNREDLLRKQRTFDNGSIPHQIHLGELHAILRRQEDFYPFLKDNREKIEKILTFRIPYYVGPLARGNSRFAWMTRKSEETITPWNFEEVVDKGASAQSFIERMTNFDKNLPNEKVLPKHSLLYEYFTVYNELTKVKYVTEGMRKPAFLSGEQKKAIVDLLFKTNRKVTVKQLKEDYFKKIECFDSVEISGVEDRFNASLGTYHDLLKIIKDKDFLDNEENEDILEDIVLTLTLFEDREMIEERLKTYAHLFDDKVMKQLKRRRYTGWGRLSRKLINGIRDKQSGKTILDFLKSDGFANRNFMQLIHDDSLTFKEDIQKAQVSGQGDSLHEHIANLAGSPAIKKGILQTVKVVDELVKVMGRHKPENIVIEMARENQTTQKGQKNSRERMKRIEEGIKELGSQILKEHPVENTQLQNEKLYLYYLQNGRDMYVDQELDINRLSDYDVDHIVPQSFLKDDSIDNKVLTRSDKARGKSDNVPSEEVVKKMKNYWRQLLNAKLITQRKFDNLTKAERGGLSELDKAGFIKRQLVETRQITKHVAQILDSRMNTKYDENDKLIREVKVITLKSKLVSDFRKDFQFYKVREINNYHHAHDAYLNAVVGTALIKKYPKLESEFVYGDYKVYDVRKMIAKSEQEIGKATAKYFFYSNIMNFFKTEITLANGEIRKRPLIETNGETGEIVWDKGRDFATVRKVLSMPQVNIVKKTEVQTGGFSKESILPKRNSDKLIARKKDWDPKKYGGFDSPTVAYSVLVVAKVEKGKSKKLKSVKELLGITIMERSSFEKNPIDFLEAKGYKEVKKDLIIKLPKYSLFELENGRKRMLASAGELQKGNELALPSKYVNFLYLASHYEKLKGSPEDNEQKQLFVEQHKHYLDEIIEQISEFSKRVILADANLDKVLSAYNKHRDKPIREQAENIIHLFTLTNLGAPAAFKYFDTTIDRKRYTSTKEVLDATLIHQSITGLYETRIDLSQLGGDGGGGSGGVPWLTQQPLQLTILVPLQEYQEKILSKTALPEDQKQQLKTLFVKYDNLWQHWENQVGHRKIRPHNIATGDYPPRPQKQYPINPKAKPSIQIVIDDLLKQGVLTPQNSTMNTPVYPVPKPDGRWRMVLDYREVNKTIPLTAAQNQHSAGILATIVRQKYKTTLDLANGFWAHPITPESYWLTAFTWQGKQYCWTRLPQGFLNSPALFNADVVDLLKEIPNVQVYVDDIYLSHDDPKEHVQQLEKVFQILLQAGYVVSLKKSEIGQKTVEFLGFNITKEGRGLTDTFKTKLLNITPPKDLKQLQSILGKLNFARNFIPNFAELVQPLYNLIAPAKGKYIEWSEENTKQLNMVIEALNTASNLEERLPEQRLVIKVNTSPSAGYVRYYNETGKKPIMYLNYVFSKAELKFSMLEKLLTTMHKALIKAMDLAMGQEILVYSPIVSMTKIQKTPLPERKALPIRWITWMTYLEDPRIQFHYDKTLPELKHIPDVYTSSQSPVKHPSQYEGVFYTDGSAIKSPDPTKSNNAGMGIVHATYKPEYQVLNQWSIPLGNHTAQMAEIAAVEFACKKALKIPGPVLVITDSFYVAESANKELPYWKSNGFVNNKKKPLKHISKWKSIAECLSMKPDITIQHEKGISLQIPVFILKGNALADKLATQGSYVVNAGKRTADGSEFEKRTADGSEFESPKKKAKVE

SEQ ID NO: 6006 - protein, 2210 aa, synthetic construct
MPAAKRVKLDGGDKKYSIGLDIGTNSVGWAVITDEYKVPSKKFKVLGNTDRHSIKKNLIGALLFDSGETAEATRLKRTARRRYTRRKNRICYLQEIFSNEMAKVDDSFFHRLEESFLVEEDKKHERHPIFGNIVDEVAYHEKYPTIYHLRKKLVDSTDKADLRLIYLALAHMIKFRGHFLIEGDLNPDNSDVDKLFIQLVQTYNQLFEENPINASGVDAKAILSARLSKSRRLENLIAQLPGEKKNGLFGNLIALSLGLTPNFKSNFDLAEDAKLQLSKDTYDDDLDNLLAQIGDQYADLFLAAKNLSDAILLSDILRVNTEITKAPLSASMIKRYDEHHQDLTLLKALVRQQLPEKYKEIFFDQSKNGYAGYIDGGASQEEFYKFIKPILEKMDGTEELLVKLNREDLLRKQRTFDNGSIPHQIHLGELHAILRRQEDFYPFLKDNREKIEKILTFRIPYYVGPLARGNSRFAWMTRKSEETITPWNFEEVVDKGASAQSFIERMTNFDKNLPNEKVLPKHSLLYEYFTVYNELTKVKYVTEGMRKPAFLSGEQKKAIVDLLFKTNRKVTVKQLKEDYFKKIECFDSVEISGVEDRFNASLGTYHDLLKIIKDKDFLDNEENEDILEDIVLTLTLFEDREMIEERLKTYAHLFDDKVMKQLKRRRYTGWGRLSRKLINGIRDKQSGKTILDFLKSDGFANRNFMQLIHDDSLTFKEDIQKAQVSGQGDSLHEHIANLAGSPAIKKGILQTVKVVDELVKVMGRHKPENIVIEMARENQTTQKGQKNSRERMKRIEEGIKELGSQILKEHPVENTQLQNEKLYLYYLQNGRDMYVDQELDINRLSDYDVDHIVPQSFLKDDSIDNKVLTRSDKARGKSDNVPSEEVVKKMKNYWRQLLNAKLITQRKFDNLTKAERGGLSELDKAGFIKRQLVETRQITKHVAQILDSRMNTKYDENDKLIREVKVITLKSKLVSDFRKDFQFYKVREINNYHHAHDAYLNAVVGTALIKKYPKLESEFVYGDYKVYDVRKMIAKSEQEIGKATAKYFFYSNIMNFFKTEITLANGEIRKRPLIETNGETGEIVWDKGRDFATVRKVLSMPQVNIVKKTEVQTGGFSKESILPKRNSDKLIARKKDWDPKKYGGFDSPTVAYSVLVVAKVEKGKSKKLKSVKELLGITIMERSSFEKNPIDFLEAKGYKEVKKDLIIKLPKYSLFELENGRKRMLASAGELQKGNELALPSKYVNFLYLASHYEKLKGSPEDNEQKQLFVEQHKHYLDEIIEQISEFSKRVILADANLDKVLSAYNKHRDKPIREQAENIIHLFTLTNLGAPAAFKYFDTTIDRKRYTSTKEVLDATLIHQSITGLYETRIDLSQLGGDGGGGSGGTLGDQGSRGSDPLPEPRVTLTVEGIPTEFLVNTGAEHSVLTKPMGKMGSKRTVVAGATGSKVYPWTTKRLLKIGQKQVTHSFLVIPECPAPLLGRDLLTKLKAQIQFSTEGPQVTWEDRPAMCLVLNLEEEYRLHEKPVPPSIDPSWLQLFPMVWAEKAGMGLANQVPPVVVELKSDASPVAVRQYPMSKEAREGIRPHIQRFLDLGILVPCQSPWNTPLLPVKKPGTNDYRPVQDLREVNKRVQDIHPTVPNPYNLLSSLPPSHTWYSVLDLKDAFFCLKLHPNSQPLFAFEWRDPEKGNTGQLTWTRLPQGFKNSPTLFDEALHRDLASFRALNPQVVMLQYVDDLLVAAPTYRDCKEGTRRLLQELSKLGYRVSAKKAQLCREEVTYLGYLLKGGKRWLTPARKATVMKIPTPTTPRQVREFLGTAGFCRLWIPGFASLAAPLYPLTREKVPFTWTEAHQEAFGRIKEALLSAPALALPDLTKPFALYVDEKEGVARGVLTQTLGPWRRPVAYLSKKLDPVASGWPTCLKAIAAVALLLKDADKLTLGQNVLVIAPHNLESIVRQPPDRWMTNARMTHYQSLLLNERVSFAPPAILNPATLLPVESDDTPIHICSEILAEETGTRPDLRDQPLPGVPAWYTDGSSFIMDGRRQAGAAIVDNKRTVWASNLPEGTSAQKAELIALTQALRLAEGKSINIYTDSRYAFATAHVHGAIYKQRGLLTSAGKDIKNKEEILALLEAIHLPKRVAIIHCPGHQRGTDPVATGNRKADEAAKQAAQSTRILTETTKNAGKRTADGSEFEKRTADGSEFESPKKKAKVE

SEQ ID NO: 6007 - protein, 2210 aa, synthetic construct
MPAAKRVKLDGGDKKYSIGLDIGTNSVGWAVITDEYKVPSKKFKVLGNTDRHSIKKNLIGALLFDSGETAEATRLKRTARRRYTRRKNRICYLQEIFSNEMAKVDDSFFHRLEESFLVEEDKKHERHPIFGNIVDEVAYHEKYPTIYHLRKKLVDSTDKADLRLIYLALAHMIKFRGHFLIEGDLNPDNSDVDKLFIQLVQTYNQLFEENPINASGVDAKAILSARLSKSRRLENLIAQLPGEKKNGLFGNLIALSLGLTPNFKSNFDLAEDAKLQLSKDTYDDDLDNLLAQIGDQYADLFLAAKNLSDAILLSDILRVNTEITKAPLSASMIKRYDEHHQDLTLLKALVRQQLPEKYKEIFFDQSKNGYAGYIDGGASQEEFYKFIKPILEKMDGTEELLVKLNREDLLRKQRTFDNGSIPHQIHLGELHAILRRQEDFYPFLKDNREKIEKILTFRIPYYVGPLARGNSRFAWMTRKSEETITPWNFEEVVDKGASAQSFIERMTNFDKNLPNEKVLPKHSLLYEYFTVYNELTKVKYVTEGMRKPAFLSGEQKKAIVDLLFKTNRKVTVKQLKEDYFKKIECFDSVEISGVEDRFNASLGTYHDLLKIIKDKDFLDNEENEDILEDIVLTLTLFEDREMIEERLKTYAHLFDDKVMKQLKRRRYTGWGRLSRKLINGIRDKQSGKTILDFLKSDGFANRNFMQLIHDDSLTFKEDIQKAQVSGQGDSLHEHIANLAGSPAIKKGILQTVKVVDELVKVMGRHKPENIVIEMARENQTTQKGQKNSRERMKRIEEGIKELGSQILKEHPVENTQLQNEKLYLYYLQNGRDMYVDQELDINRLSDYDVDHIVPQSFLKDDSIDNKVLTRSDKARGKSDNVPSEEVVKKMKNYWRQLLNAKLITQRKFDNLTKAERGGLSELDKAGFIKRQLVETRQITKHVAQILDSRMNTKYDENDKLIREVKVITLKSKLVSDFRKDFQFYKVREINNYHHAHDAYLNAVVGTALIKKYPKLESEFVYGDYKVYDVRKMIAKSEQEIGKATAKYFFYSNIMNFFKTEITLANGEIRKRPLIETNGETGEIVWDKGRDFATVRKVLSMPQVNIVKKTEVQTGGFSKESILPKRNSDKLIARKKDWDPKKYGGFDSPTVAYSVLVVAKVEKGKSKKLKSVKELLGITIMERSSFEKNPIDFLEAKGYKEVKKDLIIKLPKYSLFELENGRKRMLASAGELQKGNELALPSKYVNFLYLASHYEKLKGSPEDNEQKQLFVEQHKHYLDEIIEQISEFSKRVILADANLDKVLSAYNKHRDKPIREQAENIIHLFTLTNLGAPAAFKYFDTTIDRKRYTSTKEVLDATLIHQSITGLYETRIDLSQLGGDGGGGSGGTLGDQGSRGSDPLPEPRVTLTVEGIPTEFLVNTGAEHSVLTKPMGKMGSKRTVVAGATGSKVYPWTTKRLLKIGQKQVTHSFLVIPECPAPLLGRDLLTKLKAQIQFSTEGPQVTWEDRPAMCLVLNLEEEYRLHEKPVPPSIDPSWLQLFPMVWAEKAGMGLANQVPPVVVELKSDASPVAVRQYPMSKEAREGIRPHIQRFLDLGILVPCQSPWNTPLLPVKKPGTNDYRPVQDLREVNKRVQDIHPTVPNPYNLLSSLPPSHTWYSVLDLKDAFFCLKLHPNSQPLFAFEWRDPEKGNTGQLTWTRLPQGFKNSPTLFNEALHRDLASFRALNPQVVMLQYVDDLLVAAPTYRDCKEGTRRLLQELSKLGYRVSAKKAQLCREEVTYLGYLLKGGKRWLTPARKATVMKIPTPTTPRQVREFLGTAGFCRLWIPGFASLAAPLYPLTRPKVPFTWTEAHQEAFGRIKEALLSAPALALPDLTKPFALYVDEKEGVARGVLTQTLGPWRRPVAYLSKKLDPVASGWPTCLKAIAAVALLLKDADKLTLGQNVLVIAPHNLESIVRQPPDRWMTNARMTHYQSLLLNERVSFAPPAILNPATLLPVESDDTPIHICSEILAEETGTRPDLRDQPLPGVPAWYTDGSSFIMDGRRQAGAAIVDNKRTVWASNLPEGTSAQKAELIALTQALRLAEGKSINIYTDSRYAFATAHVHGAIYKQRGWLTSAGKDIKNKEEILALLEAIHLPKRVAIIHCPGHQRGTDPVATGNRKADEAAKQAAQSTRILTETTKNAGKRTADGSEFEKRTADGSEFESPKKKAKVE

SEQ ID NO: 6008 - protein, 2088 aa, synthetic construct
MPAAKRVKLDGGDKKYSIGLDIGTNSVGWAVITDEYKVPSKKFKVLGNTDRHSIKKNLIGALLFDSGETAEATRLKRTARRRYTRRKNRICYLQEIFSNEMAKVDDSFFHRLEESFLVEEDKKHERHPIFGNIVDEVAYHEKYPTIYHLRKKLVDSTDKADLRLIYLALAHMIKFRGHFLIEGDLNPDNSDVDKLFIQLVQTYNQLFEENPINASGVDAKAILSARLSKSRRLENLIAQLPGEKKNGLFGNLIALSLGLTPNFKSNFDLAEDAKLQLSKDTYDDDLDNLLAQIGDQYADLFLAAKNLSDAILLSDILRVNTEITKAPLSASMIKRYDEHHQDLTLLKALVRQQLPEKYKEIFFDQSKNGYAGYIDGGASQEEFYKFIKPILEKMDGTEELLVKLNREDLLRKQRTFDNGSIPHQIHLGELHAILRRQEDFYPFLKDNREKIEKILTFRIPYYVGPLARGNSRFAWMTRKSEETITPWNFEEVVDKGASAQSFIERMTNFDKNLPNEKVLPKHSLLYEYFTVYNELTKVKYVTEGMRKPAFLSGEQKKAIVDLLFKTNRKVTVKQLKEDYFKKIECFDSVEISGVEDRFNASLGTYHDLLKIIKDKDFLDNEENEDILEDIVLTLTLFEDREMIEERLKTYAHLFDDKVMKQLKRRRYTGWGRLSRKLINGIRDKQSGKTILDFLKSDGFANRNFMQLIHDDSLTFKEDIQKAQVSGQGDSLHEHIANLAGSPAIKKGILQTVKVVDELVKVMGRHKPENIVIEMARENQTTQKGQKNSRERMKRIEEGIKELGSQILKEHPVENTQLQNEKLYLYYLQNGRDMYVDQELDINRLSDYDVDHIVPQSFLKDDSIDNKVLTRSDKARGKSDNVPSEEVVKKMKNYWRQLLNAKLITQRKFDNLTKAERGGLSELDKAGFIKRQLVETRQITKHVAQILDSRMNTKYDENDKLIREVKVITLKSKLVSDFRKDFQFYKVREINNYHHAHDAYLNAVVGTALIKKYPKLESEFVYGDYKVYDVRKMIAKSEQEIGKATAKYFFYSNIMNFFKTEITLANGEIRKRPLIETNGETGEIVWDKGRDFATVRKVLSMPQVNIVKKTEVQTGGFSKESILPKRNSDKLIARKKDWDPKKYGGFDSPTVAYSVLVVAKVEKGKSKKLKSVKELLGITIMERSSFEKNPIDFLEAKGYKEVKKDLIIKLPKYSLFELENGRKRMLASAGELQKGNELALPSKYVNFLYLASHYEKLKGSPEDNEQKQLFVEQHKHYLDEIIEQISEFSKRVILADANLDKVLSAYNKHRDKPIREQAENIIHLFTLTNLGAPAAFKYFDTTIDRKRYTSTKEVLDATLIHQSITGLYETRIDLSQLGGDGGGGSGGTLNLEDEYRLYETSAEPEVSPGSTWLSDFPQAWAETGGMGLAVRQAPLIIPLKATSTPVSIKQYPMSQEAKLGIKPHIQRLLDQGILVPCQSPWNTPLLPVKKPGTNDYRPVQDLREVNKRVEDIHPTVPNPYNLLSGLPPSHRWYTVLDLKDAFFCLRLHPTSQPLFAFEWRDPGMGISGQLTWTRLPQGFKNSPTLFNEALHRDLADFRIQHPDLILLQYVDDILLAATSELDCQQGTRALLLTLGNLGYRASAKKAQLCQKQVKYLGYLLKEGQRWLTEARKETVMGQPTPKTPRQLREFLGKAGFCRLFIPGFAEMAAPLYPLTKPGTLFNWGPDQQKAYQEIKQALLTAPALGLPDLTKPFELFVDEKQGYAKGVLTQKLGPWRRPVAYLSKKLDPVAAGWPPCLRMVAAIAVLRKDAGKLTMGQPLVILAPHAVEALVKQPPDRWLSNARMTHYQAMLLDTDRVQFGPVVALNPATLLPLPEEGAPHDCLEILAETHGTRPDLTDQPIPDADHTWYTDGSSFLQEGQRKAGAAVTTETEVIWARALPAGTSAQRAELIALTQALKMAEGKRLNVYTDSRYAFATAHIHGEIYRRRGWLTSEGREIKNKSEILALLKALFLPKRLSIIHCLGHQKGDSAEARGNRLADQAAREAAIKTPPDTSTLLAGKRTADGSEFEKRTADGSEFESPKKKAKVE

SEQ ID NO: 6009 - protein, 2088 aa, synthetic construct
MPAAKRVKLDGGDKKYSIGLDIGTNSVGWAVITDEYKVPSKKFKVLGNTDRHSIKKNLIGALLFDSGETAEATRLKRTARRRYTRRKNRICYLQEIFSNEMAKVDDSFFHRLEESFLVEEDKKHERHPIFGNIVDEVAYHEKYPTIYHLRKKLVDSTDKADLRLIYLALAHMIKFRGHFLIEGDLNPDNSDVDKLFIQLVQTYNQLFEENPINASGVDAKAILSARLSKSRRLENLIAQLPGEKKNGLFGNLIALSLGLTPNFKSNFDLAEDAKLQLSKDTYDDDLDNLLAQIGDQYADLFLAAKNLSDAILLSDILRVNTEITKAPLSASMIKRYDEHHQDLTLLKALVRQQLPEKYKEIFFDQSKNGYAGYIDGGASQEEFYKFIKPILEKMDGTEELLVKLNREDLLRKQRTFDNGSIPHQIHLGELHAILRRQEDFYPFLKDNREKIEKILTFRIPYYVGPLARGNSRFAWMTRKSEETITPWNFEEVVDKGASAQSFIERMTNFDKNLPNEKVLPKHSLLYEYFTVYNELTKVKYVTEGMRKPAFLSGEQKKAIVDLLFKTNRKVTVKQLKEDYFKKIECFDSVEISGVEDRFNASLGTYHDLLKIIKDKDFLDNEENEDILEDIVLTLTLFEDREMIEERLKTYAHLFDDKVMKQLKRRRYTGWGRLSRKLINGIRDKQSGKTILDFLKSDGFANRNFMQLIHDDSLTFKEDIQKAQVSGQGDSLHEHIANLAGSPAIKKGILQTVKVVDELVKVMGRHKPENIVIEMARENQTTQKGQKNSRERMKRIEEGIKELGSQILKEHPVENTQLQNEKLYLYYLQNGRDMYVDQELDINRLSDYDVDHIVPQSFLKDDSIDNKVLTRSDKARGKSDNVPSEEVVKKMKNYWRQLLNAKLITQRKFDNLTKAERGGLSELDKAGFIKRQLVETRQITKHVAQILDSRMNTKYDENDKLIREVKVITLKSKLVSDFRKDFQFYKVREINNYHHAHDAYLNAVVGTALIKKYPKLESEFVYGDYKVYDVRKMIAKSEQEIGKATAKYFFYSNIMNFFKTEITLANGEIRKRPLIETNGETGEIVWDKGRDFATVRKVLSMPQVNIVKKTEVQTGGFSKESILPKRNSDKLIARKKDWDPKKYGGFDSPTVAYSVLVVAKVEKGKSKKLKSVKELLGITIMERSSFEKNPIDFLEAKGYKEVKKDLIIKLPKYSLFELENGRKRMLASAGELQKGNELALPSKYVNFLYLASHYEKLKGSPEDNEQKQLFVEQHKHYLDEIIEQISEFSKRVILADANLDKVLSAYNKHRDKPIREQAENIIHLFTLTNLGAPAAFKYFDTTIDRKRYTSTKEVLDATLIHQSITGLYETRIDLSQLGGDGGGGSGGTLGIEDEYRLHETSTEPDVSLGSTWLSDFPQAWAETGGMGLAVRQAPLIIPLKATSTPVSIQQYPMSHEARLGIKPHIQRLLDQGILVPCQSPWNTPLLPVKKPGTNDYRPVQDLREVNKRVEDIHPTVPNPYNLLSGLPPSHQWYTVLDLKDAFFCLRLHPTSQPLFAFEWRDPGMGISGQLTWTRLPQGFKNSPTLFNEALHRDLADFRIQHPDLILLQYVDDILLAATSELDCQQGTRALLQTLGDLGYRASAKKAQICQKQVKYLGYLLREGQRWLTEARKETVMGQPVPKTPRQLREFLGTAGFCRLWIPGFAEMAAPLYPLTKPGTLFSWGPDQQKAYQEIKQALLTAPALGLPDLTKPFELFVDEKQGYAKGVLTQKLGPWRRPVAYLSKKLDPVAAGWPPCLRMVAAIAVLTKDAGKLTMGQPLVILAPHAVEALVKQPPDRWLSNARMTHYQAMLLDTDRVQFGPVVALNPATLLPLPEEGAPHDCLEILAETHGTRPDLTDQPIPDADHTWYTDGSSFLQEGQRKAGAAVTTETEVIWAGALPAGTSAQRAELIALTQALKMAEGKRLNVYTDSRYAFATAHIHGEIYRRRGWLTSEGREIKNKSEILALLKALFLPKRLSIIHCLGHQKGDSAEARGNRLADQAAREAAIKTPPDTSTLLAGKRTADGSEFEKRTADGSEFESPKKKAKVE

SEQ ID NO: 6010 - protein, 2088 aa, synthetic construct
MPAAKRVKLDGGDKKYSIGLDIGTNSVGWAVITDEYKVPSKKFKVLGNTDRHSIKKNLIGALLFDSGETAEATRLKRTARRRYTRRKNRICYLQEIFSNEMAKVDDSFFHRLEESFLVEEDKKHERHPIFGNIVDEVAYHEKYPTIYHLRKKLVDSTDKADLRLIYLALAHMIKFRGHFLIEGDLNPDNSDVDKLFIQLVQTYNQLFEENPINASGVDAKAILSARLSKSRRLENLIAQLPGEKKNGLFGNLIALSLGLTPNFKSNFDLAEDAKLQLSKDTYDDDLDNLLAQIGDQYADLFLAAKNLSDAILLSDILRVNTEITKAPLSASMIKRYDEHHQDLTLLKALVRQQLPEKYKEIFFDQSKNGYAGYIDGGASQEEFYKFIKPILEKMDGTEELLVKLNREDLLRKQRTFDNGSIPHQIHLGELHAILRRQEDFYPFLKDNREKIEKILTFRIPYYVGPLARGNSRFAWMTRKSEETITPWNFEEVVDKGASAQSFIERMTNFDKNLPNEKVLPKHSLLYEYFTVYNELTKVKYVTEGMRKPAFLSGEQKKAIVDLLFKTNRKVTVKQLKEDYFKKIECFDSVEISGVEDRFNASLGTYHDLLKIIKDKDFLDNEENEDILEDIVLTLTLFEDREMIEERLKTYAHLFDDKVMKQLKRRRYTGWGRLSRKLINGIRDKQSGKTILDFLKSDGFANRNFMQLIHDDSLTFKEDIQKAQVSGQGDSLHEHIANLAGSPAIKKGILQTVKVVDELVKVMGRHKPENIVIEMARENQTTQKGQKNSRERMKRIEEGIKELGSQILKEHPVENTQLQNEKLYLYYLQNGRDMYVDQELDINRLSDYDVDHIVPQSFLKDDSIDNKVLTRSDKARGKSDNVPSEEVVKKMKNYWRQLLNAKLITQRKFDNLTKAERGGLSELDKAGFIKRQLVETRQITKHVAQILDSRMNTKYDENDKLIREVKVITLKSKLVSDFRKDFQFYKVREINNYHHAHDAYLNAVVGTALIKKYPKLESEFVYGDYKVYDVRKMIAKSEQEIGKATAKYFFYSNIMNFFKTEITLANGEIRKRPLIETNGETGEIVWDKGRDFATVRKVLSMPQVNIVKKTEVQTGGFSKESILPKRNSDKLIARKKDWDPKKYGGFDSPTVAYSVLVVAKVEKGKSKKLKSVKELLGITIMERSSFEKNPIDFLEAKGYKEVKKDLIIKLPKYSLFELENGRKRMLASAGELQKGNELALPSKYVNFLYLASHYEKLKGSPEDNEQKQLFVEQHKHYLDEIIEQISEFSKRVILADANLDKVLSAYNKHRDKPIREQAENIIHLFTLTNLGAPAAFKYFDTTIDRKRYTSTKEVLDATLIHQSITGLYETRIDLSQLGGDGGGGSGGTLNIEDEYRLHETSKEPDVSLGSTWLSDFPQAWAETGGMGLAVRQAPLIIPLKATSTPVSIKQYPMSQEARLGIKPHIQRLLDQGILVPCQSPWNTPLLPVKKPGTNDYRPVQDLREVNKRVEDIHPTVPNPYNLLSGLPPSHQWYTVLDLKDAFFCLRLHPTSQPLFAFEWRDPEMGISGQLTWTRLPQGFKNSPTLFNEALHRDLAGFRIQHPDLILLQYVDDLLLAATSELDCQQGTRALLQTLGDLGYRASAKKAQICQKQVKYLGYLLKEGQRWLTEARKETVMGQPIPKTPRQLREFLGTAGFCRLWIPGFAEMAAPLYPLTKPGTLFNWGPDQQKAFQEIKQALLTAPALGLPDLTKPFELFVDEKQGYAKGVLTQKLGPWRRPVAYLSKKLDPVAAGWPPCLRMVAAIAVLTKDAGKLTMGQPLVILAPHAVEALVKQPPDRWLSNARMTHYQALLLDTDRVQFGPVVALNPATLLPLPEEGLQHDCLDILAEAHGTRSDLMDQPLPDADHTWYTDGSSFLQEGQRKAGAAVTTETEVIWARALPAGTSAQRAELIALTQALKMAEGKKLNVYTDSRYAFATAHIHGEIYRRRGWLTSEGKEIKNKDEILALLKALFLPKRLSIIHCPGHQKGNSAEARGNRMADQAAREVATRETPETSTLLAGKRTADGSEFEKRTADGSEFESPKKKAKVE

SEQ ID NO: 6011 - protein, 2088 aa, synthetic construct
MPAAKRVKLDGGDKKYSIGLDIGTNSVGWAVITDEYKVPSKKFKVLGNTDRHSIKKNLIGALLFDSGETAEATRLKRTARRRYTRRKNRICYLQEIFSNEMAKVDDSFFHRLEESFLVEEDKKHERHPIFGNIVDEVAYHEKYPTIYHLRKKLVDSTDKADLRLIYLALAHMIKFRGHFLIEGDLNPDNSDVDKLFIQLVQTYNQLFEENPINASGVDAKAILSARLSKSRRLENLIAQLPGEKKNGLFGNLIALSLGLTPNFKSNFDLAEDAKLQLSKDTYDDDLDNLLAQIGDQYADLFLAAKNLSDAILLSDILRVNTEITKAPLSASMIKRYDEHHQDLTLLKALVRQQLPEKYKEIFFDQSKNGYAGYIDGGASQEEFYKFIKPILEKMDGTEELLVKLNREDLLRKQRTFDNGSIPHQIHLGELHAILRRQEDFYPFLKDNREKIEKILTFRIPYYVGPLARGNSRFAWMTRKSEETITPWNFEEVVDKGASAQSFIERMTNFDKNLPNEKVLPKHSLLYEYFTVYNELTKVKYVTEGMRKPAFLSGEQKKAIVDLLFKTNRKVTVKQLKEDYFKKIECFDSVEISGVEDRFNASLGTYHDLLKIIKDKDFLDNEENEDILEDIVLTLTLFEDREMIEERLKTYAHLFDDKVMKQLKRRRYTGWGRLSRKLINGIRDKQSGKTILDFLKSDGFANRNFMQLIHDDSLTFKEDIQKAQVSGQGDSLHEHIANLAGSPAIKKGILQTVKVVDELVKVMGRHKPENIVIEMARENQTTQKGQKNSRERMKRIEEGIKELGSQILKEHPVENTQLQNEKLYLYYLQNGRDMYVDQELDINRLSDYDVDHIVPQSFLKDDSIDNKVLTRSDKARGKSDNVPSEEVVKKMKNYWRQLLNAKLITQRKFDNLTKAERGGLSELDKAGFIKRQLVETRQITKHVAQILDSRMNTKYDENDKLIREVKVITLKSKLVSDFRKDFQFYKVREINNYHHAHDAYLNAVVGTALIKKYPKLESEFVYGDYKVYDVRKMIAKSEQEIGKATAKYFFYSNIMNFFKTEITLANGEIRKRPLIETNGETGEIVWDKGRDFATVRKVLSMPQVNIVKKTEVQTGGFSKESILPKRNSDKLIARKKDWDPKKYGGFDSPTVAYSVLVVAKVEKGKSKKLKSVKELLGITIMERSSFEKNPIDFLEAKGYKEVKKDLIIKLPKYSLFELENGRKRMLASAGELQKGNELALPSKYVNFLYLASHYEKLKGSPEDNEQKQLFVEQHKHYLDEIIEQISEFSKRVILADANLDKVLSAYNKHRDKPIREQAENIIHLFTLTNLGAPAAFKYFDTTIDRKRYTSTKEVLDATLIHQSITGLYETRIDLSQLGGDGGGGSGGTLNIEDEYRLHETSKGPDVPLGSTWLSDFPQAWAETGGMGLAVRQAPLIIPLKATSTPVSIKQYPMSQEARLGIKPHIQRLLDQGILVPCQSPWNTPLLPVKKPGTNDYRPVQDLREVNKRVEDIHPTVPNPYNLLSGLPPSHQWYTVLDLKDAFFCLRLHPTSQSLFAFEWRDPEMGISGQLTWTRLPQGFKNSPTLFNEALHRDLADFRIQHPDLILLQYVDDLLLAATSELDCQQGTRALLQTLGDLGYRASAKKAQICQKQVKYLGYLLKEGQRWLTEARKETVMGQPTPKTPRQLREFLGTAGFCRLWIPGFAEMAAPLYPLTKPGTLFEWGPDQQKAYQEIKQALLTAPALGLPDLTKPFELFVDEKQGYAKGVLTQKLGPWRRPVAYLSKKLDPVAAGWPPCLRMVAAIAVLTKDAGKLTMGQPLVILAPHAVEALVKQPPDRWLSNARMTHYQALLLDTDRVQFGPIVALNPATLLPLPEEGLQHDCLDILAEAHGTRPDLTDQPLPDADHTWYTDGSSFLQEGQRKAGAAVTTETEVVWAKALPAGTSAQRAELIALTQALKMAEGKKLNVYTDSRYAFATAHIHGEIYRRRGWLTSEGKEIKNKDEILALLKALFLPKRLSIIHCPGHQKGNRAEARGNRMADQAAREVATRETPETSTLLAGKRTADGSEFEKRTADGSEFESPKKKAKVE

SEQ ID NO: 6012 - protein, 2088 aa, synthetic construct
MPAAKRVKLDGGDKKYSIGLDIGTNSVGWAVITDEYKVPSKKFKVLGNTDRHSIKKNLIGALLFDSGETAEATRLKRTARRRYTRRKNRICYLQEIFSNEMAKVDDSFFHRLEESFLVEEDKKHERHPIFGNIVDEVAYHEKYPTIYHLRKKLVDSTDKADLRLIYLALAHMIKFRGHFLIEGDLNPDNSDVDKLFIQLVQTYNQLFEENPINASGVDAKAILSARLSKSRRLENLIAQLPGEKKNGLFGNLIALSLGLTPNFKSNFDLAEDAKLQLSKDTYDDDLDNLLAQIGDQYADLFLAAKNLSDAILLSDILRVNTEITKAPLSASMIKRYDEHHQDLTLLKALVRQQLPEKYKEIFFDQSKNGYAGYIDGGASQEEFYKFIKPILEKMDGTEELLVKLNREDLLRKQRTFDNGSIPHQIHLGELHAILRRQEDFYPFLKDNREKIEKILTFRIPYYVGPLARGNSRFAWMTRKSEETITPWNFEEVVDKGASAQSFIERMTNFDKNLPNEKVLPKHSLLYEYFTVYNELTKVKYVTEGMRKPAFLSGEQKKAIVDLLFKTNRKVTVKQLKEDYFKKIECFDSVEISGVEDRFNASLGTYHDLLKIIKDKDFLDNEENEDILEDIVLTLTLFEDREMIEERLKTYAHLFDDKVMKQLKRRRYTGWGRLSRKLINGIRDKQSGKTILDFLKSDGFANRNFMQLIHDDSLTFKEDIQKAQVSGQGDSLHEHIANLAGSPAIKKGILQTVKVVDELVKVMGRHKPENIVIEMARENQTTQKGQKNSRERMKRIEEGIKELGSQILKEHPVENTQLQNEKLYLYYLQNGRDMYVDQELDINRLSDYDVDHIVPQSFLKDDSIDNKVLTRSDKARGKSDNVPSEEVVKKMKNYWRQLLNAKLITQRKFDNLTKAERGGLSELDKAGFIKRQLVETRQITKHVAQILDSRMNTKYDENDKLIREVKVITLKSKLVSDFRKDFQFYKVREINNYHHAHDAYLNAVVGTALIKKYPKLESEFVYGDYKVYDVRKMIAKSEQEIGKATAKYFFYSNIMNFFKTEITLANGEIRKRPLIETNGETGEIVWDKGRDFATVRKVLSMPQVNIVKKTEVQTGGFSKESILPKRNSDKLIARKKDWDPKKYGGFDSPTVAYSVLVVAKVEKGKSKKLKSVKELLGITIMERSSFEKNPIDFLEAKGYKEVKKDLIIKLPKYSLFELENGRKRMLASAGELQKGNELALPSKYVNFLYLASHYEKLKGSPEDNEQKQLFVEQHKHYLDEIIEQISEFSKRVILADANLDKVLSAYNKHRDKPIREQAENIIHLFTLTNLGAPAAFKYFDTTIDRKRYTSTKEVLDATLIHQSITGLYETRIDLSQLGGDGGGGSGGTLNIEDEYRLHETSKGPDVPLGSTWLSDFPQAWAETGGMGLAVRQAPLIIPLKATSTPVSIKQYPMSQEARLGIKPHIQRLLDQGILVPCQSPWNTPLLPVKKPGTNDYRPVQDLREVNKRVEDIHPTVPNPYNLLSGLPPSHQWYTVLDLKDAFFCLRLHPTSQSLFAFEWRDPEMGISGQLTWTRLPQGFKNSPTLFNEALHRDLADFRIQHPDLILLQYVDDLLLAATSELDCQQGTRALLQTLGDLGYRASAKKAQICQKQVKYLGYLLKEGQRWLTEARKETVMGQPTPKTPRQLREFLGKAGFCRLFIPGFAEMAAPLYPLTKPGTLFEWGPDQQKAYQEIKQALLTAPALGLPDLTKPFELFVDEKQGYAKGVLTQKLGPWRRPVAYLSKKLDPVAAGWPPCLRMVAAIAVLTKDAGKLTMGQPLVILAPHAVEALVKQPPDRWLSNARMTHYQALLLDTDRVQFGPIVALNPATLLPLPEEGLQHDCLDILAEAHGTRPDLTDQPLPDADHTWYTDGSSFLQEGQRKAGAAVTTETEVVWAKALPAGTSAQRAELIALTQALKMAEGKKLNVYTDSRYAFATAHIHGEIYRRRGWLTSEGKEIKNKDEILALLKALFLPKRLSIIHCPGHQKGNRAEARGNRMADQAAREVATRETPETSTLLAGKRTADGSEFEKRTADGSEFESPKKKAKVE

SEQ ID NO: 6013 - protein, 2086 aa, synthetic construct
MPAAKRVKLDGGDKKYSIGLDIGTNSVGWAVITDEYKVPSKKFKVLGNTDRHSIKKNLIGALLFDSGETAEATRLKRTARRRYTRRKNRICYLQEIFSNEMAKVDDSFFHRLEESFLVEEDKKHERHPIFGNIVDEVAYHEKYPTIYHLRKKLVDSTDKADLRLIYLALAHMIKFRGHFLIEGDLNPDNSDVDKLFIQLVQTYNQLFEENPINASGVDAKAILSARLSKSRRLENLIAQLPGEKKNGLFGNLIALSLGLTPNFKSNFDLAEDAKLQLSKDTYDDDLDNLLAQIGDQYADLFLAAKNLSDAILLSDILRVNTEITKAPLSASMIKRYDEHHQDLTLLKALVRQQLPEKYKEIFFDQSKNGYAGYIDGGASQEEFYKFIKPILEKMDGTEELLVKLNREDLLRKQRTFDNGSIPHQIHLGELHAILRRQEDFYPFLKDNREKIEKILTFRIPYYVGPLARGNSRFAWMTRKSEETITPWNFEEVVDKGASAQSFIERMTNFDKNLPNEKVLPKHSLLYEYFTVYNELTKVKYVTEGMRKPAFLSGEQKKAIVDLLFKTNRKVTVKQLKEDYFKKIECFDSVEISGVEDRFNASLGTYHDLLKIIKDKDFLDNEENEDILEDIVLTLTLFEDREMIEERLKTYAHLFDDKVMKQLKRRRYTGWGRLSRKLINGIRDKQSGKTILDFLKSDGFANRNFMQLIHDDSLTFKEDIQKAQVSGQGDSLHEHIANLAGSPAIKKGILQTVKVVDELVKVMGRHKPENIVIEMARENQTTQKGQKNSRERMKRIEEGIKELGSQILKEHPVENTQLQNEKLYLYYLQNGRDMYVDQELDINRLSDYDVDHIVPQSFLKDDSIDNKVLTRSDKARGKSDNVPSEEVVKKMKNYWRQLLNAKLITQRKFDNLTKAERGGLSELDKAGFIKRQLVETRQITKHVAQILDSRMNTKYDENDKLIREVKVITLKSKLVSDFRKDFQFYKVREINNYHHAHDAYLNAVVGTALIKKYPKLESEFVYGDYKVYDVRKMIAKSEQEIGKATAKYFFYSNIMNFFKTEITLANGEIRKRPLIETNGETGEIVWDKGRDFATVRKVLSMPQVNIVKKTEVQTGGFSKESILPKRNSDKLIARKKDWDPKKYGGFDSPTVAYSVLVVAKVEKGKSKKLKSVKELLGITIMERSSFEKNPIDFLEAKGYKEVKKDLIIKLPKYSLFELENGRKRMLASAGELQKGNELALPSKYVNFLYLASHYEKLKGSPEDNEQKQLFVEQHKHYLDEIIEQISEFSKRVILADANLDKVLSAYNKHRDKPIREQAENIIHLFTLTNLGAPAAFKYFDTTIDRKRYTSTKEVLDATLIHQSITGLYETRIDLSQLGGDGGGGSGGVLNLEEEYRLHEKPVPSSIDPSWLQLFPTVWAERAGMGLANQVPPVVVELRSGASPVAVRQYPMSKEAREGIRPHIQRFLDLGVLVPCQSPWNTPLLPVKKPGTNDYRPVQDLREINKRVQDIHPTVPNPYNLLSSLPPSHTWYSVLDLKDAFFCLKLHPNSQPLFAFEWRDPEKGNTGQLTWTRLPQGFKNSPTLFNEALHRDLAPFRALNPQVVLLQYVDDLLVAAPTYRDCKEGTQKLLQELSKLGYRVSAKKAQLCQKEVTYLGYLLKEGKRWLTPARKATVMKIPPPTTPRQVREFLGKAGFCRLFIPGFASLAAPLYPLTKPSIPFIWTEEHQKAFDRIKEALLSAPALALPDLTKPFTLYVDERAGVARGVLTQTLGPWRRPVAYLSKKLDPVASGWPTCLKAVAAVALLLKDADKLTLGQNVTVIASHSLESIVRQPPDRWMTNARMTHYQSLLLNERVSFAPPAVLNPATLLPVESEATPVHRCSEILAEETGTRRDLKDQPLPGVPAWYTDGSSFIAEGKRRAGAAIVDGKRTVWASSLPEGTSAQKAELVALTQALRLAEGKDINIYTDSRYAFATAHIHGAIYKQRGWLTSAGKDIKNKEEILALLEAIHLPKRVAIIHCPGHQKGNDPVATGNRRADEAAKQAALSTRVLAETTKPAGKRTADGSEFEKRTADGSEFESPKKKAKVE

SEQ ID NO: 6014 - protein, 2088 aa, synthetic construct
MPAAKRVKLDGGDKKYSIGLDIGTNSVGWAVITDEYKVPSKKFKVLGNTDRHSIKKNLIGALLFDSGETAEATRLKRTARRRYTRRKNRICYLQEIFSNEMAKVDDSFFHRLEESFLVEEDKKHERHPIFGNIVDEVAYHEKYPTIYHLRKKLVDSTDKADLRLIYLALAHMIKFRGHFLIEGDLNPDNSDVDKLFIQLVQTYNQLFEENPINASGVDAKAILSARLSKSRRLENLIAQLPGEKKNGLFGNLIALSLGLTPNFKSNFDLAEDAKLQLSKDTYDDDLDNLLAQIGDQYADLFLAAKNLSDAILLSDILRVNTEITKAPLSASMIKRYDEHHQDLTLLKALVRQQLPEKYKEIFFDQSKNGYAGYIDGGASQEEFYKFIKPILEKMDGTEELLVKLNREDLLRKQRTFDNGSIPHQIHLGELHAILRRQEDFYPFLKDNREKIEKILTFRIPYYVGPLARGNSRFAWMTRKSEETITPWNFEEVVDKGASAQSFIERMTNFDKNLPNEKVLPKHSLLYEYFTVYNELTKVKYVTEGMRKPAFLSGEQKKAIVDLLFKTNRKVTVKQLKEDYFKKIECFDSVEISGVEDRFNASLGTYHDLLKIIKDKDFLDNEENEDILEDIVLTLTLFEDREMIEERLKTYAHLFDDKVMKQLKRRRYTGWGRLSRKLINGIRDKQSGKTILDFLKSDGFANRNFMQLIHDDSLTFKEDIQKAQVSGQGDSLHEHIANLAGSPAIKKGILQTVKVVDELVKVMGRHKPENIVIEMARENQTTQKGQKNSRERMKRIEEGIKELGSQILKEHPVENTQLQNEKLYLYYLQNGRDMYVDQELDINRLSDYDVDHIVPQSFLKDDSIDNKVLTRSDKARGKSDNVPSEEVVKKMKNYWRQLLNAKLITQRKFDNLTKAERGGLSELDKAGFIKRQLVETRQITKHVAQILDSRMNTKYDENDKLIREVKVITLKSKLVSDFRKDFQFYKVREINNYHHAHDAYLNAVVGTALIKKYPKLESEFVYGDYKVYDVRKMIAKSEQEIGKATAKYFFYSNIMNFFKTEITLANGEIRKRPLIETNGETGEIVWDKGRDFATVRKVLSMPQVNIVKKTEVQTGGFSKESILPKRNSDKLIARKKDWDPKKYGGFDSPTVAYSVLVVAKVEKGKSKKLKSVKELLGITIMERSSFEKNPIDFLEAKGYKEVKKDLIIKLPKYSLFELENGRKRMLASAGELQKGNELALPSKYVNFLYLASHYEKLKGSPEDNEQKQLFVEQHKHYLDEIIEQISEFSKRVILADANLDKVLSAYNKHRDKPIREQAENIIHLFTLTNLGAPAAFKYFDTTIDRKRYTSTKEVLDATLIHQSITGLYETRIDLSQLGGDGGGGSGGTLNIEDEYRLHETSKEPDVPLGSTWLSDFPQAWAETGGMGLAVRQAPLIIPLKATSTPVSIKQYPMSQEARLGIKPHIQRLLDQGILVPCQSPWNTPLLPVKKPGTNDYRPVQDLREVNKRVEDIHPTVPNPYNLLSGLPPSHQWYTVLDLKDAFFCLRLHPTSQPLFAFEWRDPEMGISGQLTWTRLPQGFKNSPTLFNEALHRDLADFRIQHPDLILLQYVDDLLLAATSEQDCQRGTRALLQTLGNLGYRASAKKAQICQKQVKYLGYLLKEGQRWLTEARKETVMGQPTPKTPRQLREFLGKAGFCRLFIPGFAEMAAPLYPLTKPGTLFNWGPDQQKAYQEIKQALLTAPALGLPDLTKPFELFVDEKQGYAKGVLTQKLGPWRRPVAYLSKKLDPVAAGWPPCLRMVAAIAVLTKDAGKLTMGQPLVILAPHAVEALVKQPPDRWLSNARMTHYQAMLLDTDRVQFGPVVALNPATLLPLPEKEAPHDCLEILAETHGTRPDLTDQPIPDADYTWYTDGSSFLQEGQRRAGAAVTTETEVIWARALPAGTSAQRAELIALTQALKMAEGKKLNVYTDSRYAFATAHVHGEIYRRRGWLTSEGREIKNKNEILALLKALFLPKRLSIIHCPGHQKGNSAEARGNRMADQAAREAAMKAVLETSTLLAGKRTADGSEFEKRTADGSEFESPKKKAKVE

SEQ ID NO: 6015 - protein, 2093 aa, synthetic construct
MPAAKRVKLDGGDKKYSIGLDIGTNSVGWAVITDEYKVPSKKFKVLGNTDRHSIKKNLIGALLFDSGETAEATRLKRTARRRYTRRKNRICYLQEIFSNEMAKVDDSFFHRLEESFLVEEDKKHERHPIFGNIVDEVAYHEKYPTIYHLRKKLVDSTDKADLRLIYLALAHMIKFRGHFLIEGDLNPDNSDVDKLFIQLVQTYNQLFEENPINASGVDAKAILSARLSKSRRLENLIAQLPGEKKNGLFGNLIALSLGLTPNFKSNFDLAEDAKLQLSKDTYDDDLDNLLAQIGDQYADLFLAAKNLSDAILLSDILRVNTEITKAPLSASMIKRYDEHHQDLTLLKALVRQQLPEKYKEIFFDQSKNGYAGYIDGGASQEEFYKFIKPILEKMDGTEELLVKLNREDLLRKQRTFDNGSIPHQIHLGELHAILRRQEDFYPFLKDNREKIEKILTFRIPYYVGPLARGNSRFAWMTRKSEETITPWNFEEVVDKGASAQSFIERMTNFDKNLPNEKVLPKHSLLYEYFTVYNELTKVKYVTEGMRKPAFLSGEQKKAIVDLLFKTNRKVTVKQLKEDYFKKIECFDSVEISGVEDRFNASLGTYHDLLKIIKDKDFLDNEENEDILEDIVLTLTLFEDREMIEERLKTYAHLFDDKVMKQLKRRRYTGWGRLSRKLINGIRDKQSGKTILDFLKSDGFANRNFMQLIHDDSLTFKEDIQKAQVSGQGDSLHEHIANLAGSPAIKKGILQTVKVVDELVKVMGRHKPENIVIEMARENQTTQKGQKNSRERMKRIEEGIKELGSQILKEHPVENTQLQNEKLYLYYLQNGRDMYVDQELDINRLSDYDVDHIVPQSFLKDDSIDNKVLTRSDKARGKSDNVPSEEVVKKMKNYWRQLLNAKLITQRKFDNLTKAERGGLSELDKAGFIKRQLVETRQITKHVAQILDSRMNTKYDENDKLIREVKVITLKSKLVSDFRKDFQFYKVREINNYHHAHDAYLNAVVGTALIKKYPKLESEFVYGDYKVYDVRKMIAKSEQEIGKATAKYFFYSNIMNFFKTEITLANGEIRKRPLIETNGETGEIVWDKGRDFATVRKVLSMPQVNIVKKTEVQTGGFSKESILPKRNSDKLIARKKDWDPKKYGGFDSPTVAYSVLVVAKVEKGKSKKLKSVKELLGITIMERSSFEKNPIDFLEAKGYKEVKKDLIIKLPKYSLFELENGRKRMLASAGELQKGNELALPSKYVNFLYLASHYEKLKGSPEDNEQKQLFVEQHKHYLDEIIEQISEFSKRVILADANLDKVLSAYNKHRDKPIREQAENIIHLFTLTNLGAPAAFKYFDTTIDRKRYTSTKEVLDATLIHQSITGLYETRIDLSQLGGDGGGGSGGSGGTAPLEEEYRLFLEAPIQNVTLLEQWKREIPKVWAEINPPGLASTQAPIHVQLLSTALPVRVRQYPITLEAKRSLRETIRKFRAAGILRPVHSPWNTPLLPVRKSGTSEYRMVQDLREVNKRVETIHPTVPNPYTLLSLLPPDRIWYSVLDLKDAFFCIPLAPESQLIFAFEWADAEEGESGQLTWTRLPQGFKNSPTLFNEALNRDLQGFRLDHPSVSLLQYVDDLLIAADTQAACLSATRDLLMTLAELGYRVSGKKAQLCQEEVTYLGFKIHKGSRSLSNSRTQAILQIPVPKTKRQVREFLGTIGYCRLWIPGFAELAQPLYAATRPGNDPLVWGEKEEEAFQSLKLALTQPPALALPSLDKPFQLFVEETSGAAKGVLTQALGPWKRPVAYLSKRLDPVAAGWPRCLRAIAAAALLTREASKLTFGQDIEITSSHNLESLLRSPPDKWLTNARITQYQVLLLDPPRVRFKQTAALNPATLLPETDDTLPIHHCLDTLDSLTSTRPDLTDQPLAQAEATLFTDGSSYIRDGKRYAGAAVVTLDSVIWAEPLPIGTSAQKAELIALTKALEWSKDKSVNIYTDSRYAFATLHVHGMIYRERGWLTAGGKAIKNAPEILALLTAVWLPKRVAVMHCKGHQKDDAPTSTGNRRADEVAREVAIRPLSTQATISAGKRTADGSEFEKRTADGSEFESPKKKAKVE

SEQ ID NO: 6016 - protein, 2082 aa, synthetic construct
MPAAKRVKLDGGDKKYSIGLDIGTNSVGWAVITDEYKVPSKKFKVLGNTDRHSIKKNLIGALLFDSGETAEATRLKRTARRRYTRRKNRICYLQEIFSNEMAKVDDSFFHRLEESFLVEEDKKHERHPIFGNIVDEVAYHEKYPTIYHLRKKLVDSTDKADLRLIYLALAHMIKFRGHFLIEGDLNPDNSDVDKLFIQLVQTYNQLFEENPINASGVDAKAILSARLSKSRRLENLIAQLPGEKKNGLFGNLIALSLGLTPNFKSNFDLAEDAKLQLSKDTYDDDLDNLLAQIGDQYADLFLAAKNLSDAILLSDILRVNTEITKAPLSASMIKRYDEHHQDLTLLKALVRQQLPEKYKEIFFDQSKNGYAGYIDGGASQEEFYKFIKPILEKMDGTEELLVKLNREDLLRKQRTFDNGSIPHQIHLGELHAILRRQEDFYPFLKDNREKIEKILTFRIPYYVGPLARGNSRFAWMTRKSEETITPWNFEEVVDKGASAQSFIERMTNFDKNLPNEKVLPKHSLLYEYFTVYNELTKVKYVTEGMRKPAFLSGEQKKAIVDLLFKTNRKVTVKQLKEDYFKKIECFDSVEISGVEDRFNASLGTYHDLLKIIKDKDFLDNEENEDILEDIVLTLTLFEDREMIEERLKTYAHLFDDKVMKQLKRRRYTGWGRLSRKLINGIRDKQSGKTILDFLKSDGFANRNFMQLIHDDSLTFKEDIQKAQVSGQGDSLHEHIANLAGSPAIKKGILQTVKVVDELVKVMGRHKPENIVIEMARENQTTQKGQKNSRERMKRIEEGIKELGSQILKEHPVENTQLQNEKLYLYYLQNGRDMYVDQELDINRLSDYDVDHIVPQSFLKDDSIDNKVLTRSDKARGKSDNVPSEEVVKKMKNYWRQLLNAKLITQRKFDNLTKAERGGLSELDKAGFIKRQLVETRQITKHVAQILDSRMNTKYDENDKLIREVKVITLKSKLVSDFRKDFQFYKVREINNYHHAHDAYLNAVVGTALIKKYPKLESEFVYGDYKVYDVRKMIAKSEQEIGKATAKYFFYSNIMNFFKTEITLANGEIRKRPLIETNGETGEIVWDKGRDFATVRKVLSMPQVNIVKKTEVQTGGFSKESILPKRNSDKLIARKKDWDPKKYGGFDSPTVAYSVLVVAKVEKGKSKKLKSVKELLGITIMERSSFEKNPIDFLEAKGYKEVKKDLIIKLPKYSLFELENGRKRMLASAGELQKGNELALPSKYVNFLYLASHYEKLKGSPEDNEQKQLFVEQHKHYLDEIIEQISEFSKRVILADANLDKVLSAYNKHRDKPIREQAENIIHLFTLTNLGAPAAFKYFDTTIDRKRYTSTKEVLDATLIHQSITGLYETRIDLSQLGGDGGGGSGGSGGVPWILKKPLELTIKLDLEEQQGTLLNNSILSKKGKEELKQLFEKYSALWQSWENQVGHRRIRPHKIATGTVKPTPQKQYHINPKAKPDIQIVINDLLKQGVLIQKESTMNTPVYPVPKPNGRWRMVLDYRAVNKVTPLIAVQNQHSYGILGSLFKGRYKTTIDLSNGFWAHPIVPEDYWITAFTWQGKQYCWTVLPQGFLNSPGLFNGDVVDLLQGIPNVEVYVDDVYISHDSEKEHLEYLDILFNRLKEAGYIISLKKSNIANSIVDFLGFQITNEGRGLTDTFKEKLENITAPTTLKQLQSILGKLNFARNFIPDFTELIAPLYALIPKSPKNYVPWQIEHSTTLETLITKLNGAEYLQGRKGDKTLIMKVNASYTTGYIRYYNEGEKKPISYVSIVFSKTELKFTELEKLLTTVHKGLLKALDLSMGQNIHVYSPIVSMQNIQKTPQTAKKALASRWLSWLSYLEDPRIRFFYDPQMPALKDLPAVDTGKDNKKHPSNFQHIFYTDGSAITSPTKEGHLNAGMGIVYFINKDGNLQKQQEWSISLGNHTAQFAEIAAFEFALKKCLPLGGNILVVTDSNYVAKAYNEELDVWASNGFVNNRKKPLKHISKWKSVADLKRLRPDVVVTHEPGHQKLDSSPHAYGNNLADQLATQASFKVHAGKRTADGSEFEKRTADGSEFESPKKKAKVE

SEQ ID NO: 6017 - protein, 2090 aa, synthetic construct
MPAAKRVKLDGGDKKYSIGLDIGTNSVGWAVITDEYKVPSKKFKVLGNTDRHSIKKNLIGALLFDSGETAEATRLKRTARRRYTRRKNRICYLQEIFSNEMAKVDDSFFHRLEESFLVEEDKKHERHPIFGNIVDEVAYHEKYPTIYHLRKKLVDSTDKADLRLIYLALAHMIKFRGHFLIEGDLNPDNSDVDKLFIQLVQTYNQLFEENPINASGVDAKAILSARLSKSRRLENLIAQLPGEKKNGLFGNLIALSLGLTPNFKSNFDLAEDAKLQLSKDTYDDDLDNLLAQIGDQYADLFLAAKNLSDAILLSDILRVNTEITKAPLSASMIKRYDEHHQDLTLLKALVRQQLPEKYKEIFFDQSKNGYAGYIDGGASQEEFYKFIKPILEKMDGTEELLVKLNREDLLRKQRTFDNGSIPHQIHLGELHAILRRQEDFYPFLKDNREKIEKILTFRIPYYVGPLARGNSRFAWMTRKSEETITPWNFEEVVDKGASAQSFIERMTNFDKNLPNEKVLPKHSLLYEYFTVYNELTKVKYVTEGMRKPAFLSGEQKKAIVDLLFKTNRKVTVKQLKEDYFKKIECFDSVEISGVEDRFNASLGTYHDLLKIIKDKDFLDNEENEDILEDIVLTLTLFEDREMIEERLKTYAHLFDDKVMKQLKRRRYTGWGRLSRKLINGIRDKQSGKTILDFLKSDGFANRNFMQLIHDDSLTFKEDIQKAQVSGQGDSLHEHIANLAGSPAIKKGILQTVKVVDELVKVMGRHKPENIVIEMARENQTTQKGQKNSRERMKRIEEGIKELGSQILKEHPVENTQLQNEKLYLYYLQNGRDMYVDQELDINRLSDYDVDHIVPQSFLKDDSIDNKVLTRSDKARGKSDNVPSEEVVKKMKNYWRQLLNAKLITQRKFDNLTKAERGGLSELDKAGFIKRQLVETRQITKHVAQILDSRMNTKYDENDKLIREVKVITLKSKLVSDFRKDFQFYKVREINNYHHAHDAYLNAVVGTALIKKYPKLESEFVYGDYKVYDVRKMIAKSEQEIGKATAKYFFYSNIMNFFKTEITLANGEIRKRPLIETNGETGEIVWDKGRDFATVRKVLSMPQVNIVKKTEVQTGGFSKESILPKRNSDKLIARKKDWDPKKYGGFDSPTVAYSVLVVAKVEKGKSKKLKSVKELLGITIMERSSFEKNPIDFLEAKGYKEVKKDLIIKLPKYSLFELENGRKRMLASAGELQKGNELALPSKYVNFLYLASHYEKLKGSPEDNEQKQLFVEQHKHYLDEIIEQISEFSKRVILADANLDKVLSAYNKHRDKPIREQAENIIHLFTLTNLGAPAAFKYFDTTIDRKRYTSTKEVLDATLIHQSITGLYETRIDLSQLGGDGGGGSGGSGGTLQLEEEYRLFEPESTQKQEMDIWLKNFPQAWAETGGMGTAHCQAPVLIQLKATATPISIRQYPMPHEAYQGIKPHIRRMLDQGILKPCQSPWNTPLLPVKKPGTEDYRPVQDLREVNKRVEDIHPTVPNPYNLLSTLPPSHPWYTVLDLKDAFFCLRLHSESQLLFAFEWRDPEIGLSGQLTWTRLPQGFKNSPTLFNEALHSDLADFRVRYPALVLLQYVDDLLLAAATRTECLEGTKALLETLGNKGYRASAKKAQICLQEVTYLGYSLKDGQRWLTKARKEAILSIPVPKNSRQVREFLGKAGYCRLFIPGFAELAAPLYPLTRPGTLFQWGTEQQLAFEDIKKALLSSPALGLPDITKPFELFIDENSGFAKGVLVQKLGPWKRPVAYLSKKLDTVASGWPPCLRMVAAIAILVKDAGKLTLGQPLTILTSHPVEALVRQPPNKWLSNARMTHYQAMLLDAERVHFGPTVSLNPATLLPLPSGGNHHDCLQILAETHGTRPDLTDQPLPDADLTWYTDGSSFIRNGEREAGAAVTTESEVIWAAPLPPGTSAQRAELIALTQALKMAEGKKLTVYTDSRYAFATTHVHGEIYRRRGWLTSEGKEIKNKNEILALLEALFLPKRLSIIHCPGHQKGDSPQAKGNRLADDTAKKAATETHSSLTVLPAGKRTADGSEFEKRTADGSEFESPKKKAKVE

SEQ ID NO: 6018 - protein, 2171 aa, synthetic construct
MPAAKRVKLDGGDKKYSIGLDIGTNSVGWAVITDEYKVPSKKFKVLGNTDRHSIKKNLIGALLFDSGETAEATRLKRTARRRYTRRKNRICYLQEIFSNEMAKVDDSFFHRLEESFLVEEDKKHERHPIFGNIVDEVAYHEKYPTIYHLRKKLVDSTDKADLRLIYLALAHMIKFRGHFLIEGDLNPDNSDVDKLFIQLVQTYNQLFEENPINASGVDAKAILSARLSKSRRLENLIAQLPGEKKNGLFGNLIALSLGLTPNFKSNFDLAEDAKLQLSKDTYDDDLDNLLAQIGDQYADLFLAAKNLSDAILLSDILRVNTEITKAPLSASMIKRYDEHHQDLTLLKALVRQQLPEKYKEIFFDQSKNGYAGYIDGGASQEEFYKFIKPILEKMDGTEELLVKLNREDLLRKQRTFDNGSIPHQIHLGELHAILRRQEDFYPFLKDNREKIEKILTFRIPYYVGPLARGNSRFAWMTRKSEETITPWNFEEVVDKGASAQSFIERMTNFDKNLPNEKVLPKHSLLYEYFTVYNELTKVKYVTEGMRKPAFLSGEQKKAIVDLLFKTNRKVTVKQLKEDYFKKIECFDSVEISGVEDRFNASLGTYHDLLKIIKDKDFLDNEENEDILEDIVLTLTLFEDREMIEERLKTYAHLFDDKVMKQLKRRRYTGWGRLSRKLINGIRDKQSGKTILDFLKSDGFANRNFMQLIHDDSLTFKEDIQKAQVSGQGDSLHEHIANLAGSPAIKKGILQTVKVVDELVKVMGRHKPENIVIEMARENQTTQKGQKNSRERMKRIEEGIKELGSQILKEHPVENTQLQNEKLYLYYLQNGRDMYVDQELDINRLSDYDVDHIVPQSFLKDDSIDNKVLTRSDKARGKSDNVPSEEVVKKMKNYWRQLLNAKLITQRKFDNLTKAERGGLSELDKAGFIKRQLVETRQITKHVAQILDSRMNTKYDENDKLIREVKVITLKSKLVSDFRKDFQFYKVREINNYHHAHDAYLNAVVGTALIKKYPKLESEFVYGDYKVYDVRKMIAKSEQEIGKATAKYFFYSNIMNFFKTEITLANGEIRKRPLIETNGETGEIVWDKGRDFATVRKVLSMPQVNIVKKTEVQTGGFSKESILPKRNSDKLIARKKDWDPKKYGGFDSPTVAYSVLVVAKVEKGKSKKLKSVKELLGITIMERSSFEKNPIDFLEAKGYKEVKKDLIIKLPKYSLFELENGRKRMLASAGELQKGNELALPSKYVNFLYLASHYEKLKGSPEDNEQKQLFVEQHKHYLDEIIEQISEFSKRVILADANLDKVLSAYNKHRDKPIREQAENIIHLFTLTNLGAPAAFKYFDTTIDRKRYTSTKEVLDATLIHQSITGLYETRIDLSQLGGDGGGGSGGSGGMNPLQLLQPLPAEIKGTKLLAHWNSGATITCIPESFLEDEQPIKKTLIKTIHGEKQQNVYYVTFKVKGRKVEAEVIASPYEYILLSPTDVPWLTQQPLQLTILVPLQEYQEKILSKTALPEDQKQQLKTLFVKYDNLWQHWENQVGHRKIRPHNIATGDYPPRPQKQYPINPKAKPSIQIVIDDLLKQGVLTPQNSTMNTPVYPVPKPDGRWRMVLDYREVNKTIPLTAAQNQHSAGILATIVRQKYKTTLDLANGFWAHPITPESYWLTAFTWQGKQYCWTRLPQGFLNSPALFNADVVDLLKEIPNVQVYVDDIYLSHDDPKEHVQQLEKVFQILLQAGYVVSLKKSEIGQKTVEFLGFNITKEGRGLTDTFKTKLLNITPPKDLKQLQSILGLLNFARNFIPNFAELVQPLYNLIAPAKGKYIEWSEENTKQLNMVIEALNTASNLEERLPEQRLVIKVNTSPSAGYVRYYNETGKKPIMYLNYVFSKAELKFSMLEKLLTTMHKALIKAMDLAMGQEILVYSPIVSMTKIQKTPLPERKALPIRWITWMTYLEDPRIQFHYDKTLPELKHIPDVYTSSQSPVKHPSQYEGVFYTDGSAIKSPDPTKSNNAGMGIVHATYKPEYQVLNQWSIPLGNHTAQMAEIAAVEFACKKALKIPGPVLVITDSFYVAESANKELPYWKSNGFVNNKKKPLKHISKWKSIAECLSMKPDITIQHEKGISLQIPVFILKGNALADKLATQGSYVVNAGKRTADGSEFEKRTADGSEFESPKKKAKVE

SEQ ID NO: 6019 - protein, 2213 aa, synthetic construct
MPAAKRVKLDGGDKKYSIGLDIGTNSVGWAVITDEYKVPSKKFKVLGNTDRHSIKKNLIGALLFDSGETAEATRLKRTARRRYTRRKNRICYLQEIFSNEMAKVDDSFFHRLEESFLVEEDKKHERHPIFGNIVDEVAYHEKYPTIYHLRKKLVDSTDKADLRLIYLALAHMIKFRGHFLIEGDLNPDNSDVDKLFIQLVQTYNQLFEENPINASGVDAKAILSARLSKSRRLENLIAQLPGEKKNGLFGNLIALSLGLTPNFKSNFDLAEDAKLQLSKDTYDDDLDNLLAQIGDQYADLFLAAKNLSDAILLSDILRVNTEITKAPLSASMIKRYDEHHQDLTLLKALVRQQLPEKYKEIFFDQSKNGYAGYIDGGASQEEFYKFIKPILEKMDGTEELLVKLNREDLLRKQRTFDNGSIPHQIHLGELHAILRRQEDFYPFLKDNREKIEKILTFRIPYYVGPLARGNSRFAWMTRKSEETITPWNFEEVVDKGASAQSFIERMTNFDKNLPNEKVLPKHSLLYEYFTVYNELTKVKYVTEGMRKPAFLSGEQKKAIVDLLFKTNRKVTVKQLKEDYFKKIECFDSVEISGVEDRFNASLGTYHDLLKIIKDKDFLDNEENEDILEDIVLTLTLFEDREMIEERLKTYAHLFDDKVMKQLKRRRYTGWGRLSRKLINGIRDKQSGKTILDFLKSDGFANRNFMQLIHDDSLTFKEDIQKAQVSGQGDSLHEHIANLAGSPAIKKGILQTVKVVDELVKVMGRHKPENIVIEMARENQTTQKGQKNSRERMKRIEEGIKELGSQILKEHPVENTQLQNEKLYLYYLQNGRDMYVDQELDINRLSDYDVDHIVPQSFLKDDSIDNKVLTRSDKARGKSDNVPSEEVVKKMKNYWRQLLNAKLITQRKFDNLTKAERGGLSELDKAGFIKRQLVETRQITKHVAQILDSRMNTKYDENDKLIREVKVITLKSKLVSDFRKDFQFYKVREINNYHHAHDAYLNAVVGTALIKKYPKLESEFVYGDYKVYDVRKMIAKSEQEIGKATAKYFFYSNIMNFFKTEITLANGEIRKRPLIETNGETGEIVWDKGRDFATVRKVLSMPQVNIVKKTEVQTGGFSKESILPKRNSDKLIARKKDWDPKKYGGFDSPTVAYSVLVVAKVEKGKSKKLKSVKELLGITIMERSSFEKNPIDFLEAKGYKEVKKDLIIKLPKYSLFELENGRKRMLASAGELQKGNELALPSKYVNFLYLASHYEKLKGSPEDNEQKQLFVEQHKHYLDEIIEQISEFSKRVILADANLDKVLSAYNKHRDKPIREQAENIIHLFTLTNLGAPAAFKYFDTTIDRKRYTSTKEVLDATLIHQSITGLYETRIDLSQLGGDGGGGSGGSGGTLGDQGSRGSDPLPEPRVTLTVEGIPTEFLVNTGAEHSVLTKPMGKMGSKRTVVAGATGSKVYPWTTKRLLKIGQKQVTHSFLVIPECPAPLLGRDLLTKLKAQIQFSTEGPQVTWEDRPAMCLVLNLEEEYRLHEKPVPPSIDPSWLQLFPMVWAEKAGMGLANQVPPVVVELKSDASPVAVRQYPMSKEAREGIRPHIQRFLDLGILVPCQSPWNTPLLPVKKPGTNDYRPVQDLREVNKRVQDIHPTVPNPYNLLSSLPPSHTWYSVLDLKDAFFCLKLHPNSQPLFAFEWRDPEKGNTGQLTWTRLPQGFKNSPTLFDEALHRDLASFRALNPQVVMLQYVDDLLVAAPTYRDCKEGTRRLLQELSKLGYRVSAKKAQLCREEVTYLGYLLKGGKRWLTPARKATVMKIPTPTTPRQVREFLGTAGFCRLWIPGFASLAAPLYPLTREKVPFTWTEAHQEAFGRIKEALLSAPALALPDLTKPFALYVDEKEGVARGVLTQTLGPWRRPVAYLSKKLDPVASGWPTCLKAIAAVALLLKDADKLTLGQNVLVIAPHNLESIVRQPPDRWMTNARMTHYQSLLLNERVSFAPPAILNPATLLPVESDDTPIHICSEILAEETGTRPDLRDQPLPGVPAWYTDGSSFIMDGRRQAGAAIVDNKRTVWASNLPEGTSAQKAELIALTQALRLAEGKSINIYTDSRYAFATAHVHGAIYKQRGLLTSAGKDIKNKEEILALLEAIHLPKRVAIIHCPGHQRGTDPVATGNRKADEAAKQAAQSTRILTETTKNAGKRTADGSEFEKRTADGSEFESPKKKAKVE

SEQ ID NO: 6020 - protein, 2122 aa, synthetic construct
MPAAKRVKLDGGDKKYSIGLDIGTNSVGWAVITDEYKVPSKKFKVLGNTDRHSIKKNLIGALLFDSGETAEATRLKRTARRRYTRRKNRICYLQEIFSNEMAKVDDSFFHRLEESFLVEEDKKHERHPIFGNIVDEVAYHEKYPTIYHLRKKLVDSTDKADLRLIYLALAHMIKFRGHFLIEGDLNPDNSDVDKLFIQLVQTYNQLFEENPINASGVDAKAILSARLSKSRRLENLIAQLPGEKKNGLFGNLIALSLGLTPNFKSNFDLAEDAKLQLSKDTYDDDLDNLLAQIGDQYADLFLAAKNLSDAILLSDILRVNTEITKAPLSASMIKRYDEHHQDLTLLKALVRQQLPEKYKEIFFDQSKNGYAGYIDGGASQEEFYKFIKPILEKMDGTEELLVKLNREDLLRKQRTFDNGSIPHQIHLGELHAILRRQEDFYPFLKDNREKIEKILTFRIPYYVGPLARGNSRFAWMTRKSEETITPWNFEEVVDKGASAQSFIERMTNFDKNLPNEKVLPKHSLLYEYFTVYNELTKVKYVTEGMRKPAFLSGEQKKAIVDLLFKTNRKVTVKQLKEDYFKKIECFDSVEISGVEDRFNASLGTYHDLLKIIKDKDFLDNEENEDILEDIVLTLTLFEDREMIEERLKTYAHLFDDKVMKQLKRRRYTGWGRLSRKLINGIRDKQSGKTILDFLKSDGFANRNFMQLIHDDSLTFKEDIQKAQVSGQGDSLHEHIANLAGSPAIKKGILQTVKVVDELVKVMGRHKPENIVIEMARENQTTQKGQKNSRERMKRIEEGIKELGSQILKEHPVENTQLQNEKLYLYYLQNGRDMYVDQELDINRLSDYDVDHIVPQSFLKDDSIDNKVLTRSDKARGKSDNVPSEEVVKKMKNYWRQLLNAKLITQRKFDNLTKAERGGLSELDKAGFIKRQLVETRQITKHVAQILDSRMNTKYDENDKLIREVKVITLKSKLVSDFRKDFQFYKVREINNYHHAHDAYLNAVVGTALIKKYPKLESEFVYGDYKVYDVRKMIAKSEQEIGKATAKYFFYSNIMNFFKTEITLANGEIRKRPLIETNGETGEIVWDKGRDFATVRKVLSMPQVNIVKKTEVQTGGFSKESILPKRNSDKLIARKKDWDPKKYGGFDSPTVAYSVLVVAKVEKGKSKKLKSVKELLGITIMERSSFEKNPIDFLEAKGYKEVKKDLIIKLPKYSLFELENGRKRMLASAGELQKGNELALPSKYVNFLYLASHYEKLKGSPEDNEQKQLFVEQHKHYLDEIIEQISEFSKRVILADANLDKVLSAYNKHRDKPIREQAENIIHLFTLTNLGAPAAFKYFDTTIDRKRYTSTKEVLDATLIHQSITGLYETRIDLSQLGGDGGGGSGGSGGLLGRDLLTKLKAQIQFSTEGPQVTWEDRPAMCLVLNLEEEYRLHEKPVPPSIDPSWLQLFPMVWAEKAGMGLANQVPPVVVELKSDASPVAVRQYPMSKEAREGIRPHIQRFLDLGILVPCQSPWNTPLLPVKKPGTNDYRPVQDLREVNKRVQDIHPTVPNPYNLLSSLPPSHTWYSVLDLKDAFFCLKLHPNSQPLFAFEWRDPEKGNTGQLTWTRLPQGFKNSPTLFDEALHRDLASFRALNPQVVMLQYVDDLLVAAPTYRDCKEGTRRLLQELSKLGYRVSAKKAQLCREEVTYLGYLLKGGKRWLTPARKATVMKIPTPTTPRQVREFLGTAGFCRLWIPGFASLAAPLYPLTREKVPFTWTEAHQEAFGRIKEALLSAPALALPDLTKPFALYVDEKEGVARGVLTQTLGPWRRPVAYLSKKLDPVASGWPTCLKAIAAVALLLKDADKLTLGQNVLVIAPHNLESIVRQPPDRWMTNARMTHYQSLLLNERVSFAPPAILNPATLLPVESDDTPIHICSEILAEETGTRPDLRDQPLPGVPAWYTDGSSFIMDGRRQAGAAIVDNKRTVWASNLPEGTSAQKAELIALTQALRLAEGKSINIYTDSRYAFATAHVHGAIYKQRGLLTSAGKDIKNKEEILALLEAIHLPKRVAIIHCPGHQRGTDPVATGNRKADEAAKQAAQSTRILTETTKNAGKRTADGSEFEKRTADGSEFESPKKKAKVE

SEQ ID NO: 6021 - protein, 2213 aa, synthetic construct
MPAAKRVKLDGGDKKYSIGLDIGTNSVGWAVITDEYKVPSKKFKVLGNTDRHSIKKNLIGALLFDSGETAEATRLKRTARRRYTRRKNRICYLQEIFSNEMAKVDDSFFHRLEESFLVEEDKKHERHPIFGNIVDEVAYHEKYPTIYHLRKKLVDSTDKADLRLIYLALAHMIKFRGHFLIEGDLNPDNSDVDKLFIQLVQTYNQLFEENPINASGVDAKAILSARLSKSRRLENLIAQLPGEKKNGLFGNLIALSLGLTPNFKSNFDLAEDAKLQLSKDTYDDDLDNLLAQIGDQYADLFLAAKNLSDAILLSDILRVNTEITKAPLSASMIKRYDEHHQDLTLLKALVRQQLPEKYKEIFFDQSKNGYAGYIDGGASQEEFYKFIKPILEKMDGTEELLVKLNREDLLRKQRTFDNGSIPHQIHLGELHAILRRQEDFYPFLKDNREKIEKILTFRIPYYVGPLARGNSRFAWMTRKSEETITPWNFEEVVDKGASAQSFIERMTNFDKNLPNEKVLPKHSLLYEYFTVYNELTKVKYVTEGMRKPAFLSGEQKKAIVDLLFKTNRKVTVKQLKEDYFKKIECFDSVEISGVEDRFNASLGTYHDLLKIIKDKDFLDNEENEDILEDIVLTLTLFEDREMIEERLKTYAHLFDDKVMKQLKRRRYTGWGRLSRKLINGIRDKQSGKTILDFLKSDGFANRNFMQLIHDDSLTFKEDIQKAQVSGQGDSLHEHIANLAGSPAIKKGILQTVKVVDELVKVMGRHKPENIVIEMARENQTTQKGQKNSRERMKRIEEGIKELGSQILKEHPVENTQLQNEKLYLYYLQNGRDMYVDQELDINRLSDYDVDHIVPQSFLKDDSIDNKVLTRSDKARGKSDNVPSEEVVKKMKNYWRQLLNAKLITQRKFDNLTKAERGGLSELDKAGFIKRQLVETRQITKHVAQILDSRMNTKYDENDKLIREVKVITLKSKLVSDFRKDFQFYKVREINNYHHAHDAYLNAVVGTALIKKYPKLESEFVYGDYKVYDVRKMIAKSEQEIGKATAKYFFYSNIMNFFKTEITLANGEIRKRPLIETNGETGEIVWDKGRDFATVRKVLSMPQVNIVKKTEVQTGGFSKESILPKRNSDKLIARKKDWDPKKYGGFDSPTVAYSVLVVAKVEKGKSKKLKSVKELLGITIMERSSFEKNPIDFLEAKGYKEVKKDLIIKLPKYSLFELENGRKRMLASAGELQKGNELALPSKYVNFLYLASHYEKLKGSPEDNEQKQLFVEQHKHYLDEIIEQISEFSKRVILADANLDKVLSAYNKHRDKPIREQAENIIHLFTLTNLGAPAAFKYFDTTIDRKRYTSTKEVLDATLIHQSITGLYETRIDLSQLGGDGGGGSGGSGGTLGDQGSRGSDPLPEPRVTLTVEGIPTEFLVNTGAEHSVLTKPMGKMGSKRTVVAGATGSKVYPWTTKRLLKIGQKQVTHSFLVIPECPAPLLGRDLLTKLKAQIQFSTEGPQVTWEDRPAMCLVLNLEEEYRLHEKPVPPSIDPSWLQLFPMVWAEKAGMGLANQVPPVVVELKSDASPVAVRQYPMSKEAREGIRPHIQRFLDLGILVPCQSPWNTPLLPVKKPGTNDYRPVQDLREVNKRVQDIHPTVPNPYNLLSSLPPSHTWYSVLDLKDAFFCLKLHPNSQPLFAFEWRDPEKGNTGQLTWTRLPQGFKNSPTLFNEALHRDLASFRALNPQVVMLQYVDDLLVAAPTYRDCKEGTRRLLQELSKLGYRVSAKKAQLCREEVTYLGYLLKGGKRWLTPARKATVMKIPTPTTPRQVREFLGTAGFCRLWIPGFASLAAPLYPLTRPKVPFTWTEAHQEAFGRIKEALLSAPALALPDLTKPFALYVDEKEGVARGVLTQTLGPWRRPVAYLSKKLDPVASGWPTCLKAIAAVALLLKDADKLTLGQNVLVIAPHNLESIVRQPPDRWMTNARMTHYQSLLLNERVSFAPPAILNPATLLPVESDDTPIHICSEILAEETGTRPDLRDQPLPGVPAWYTDGSSFIMDGRRQAGAAIVDNKRTVWASNLPEGTSAQKAELIALTQALRLAEGKSINIYTDSRYAFATAHVHGAIYKQRGWLTSAGKDIKNKEEILALLEAIHLPKRVAIIHCPGHQRGTDPVATGNRKADEAAKQAAQSTRILTETTKNAGKRTADGSEFEKRTADGSEFESPKKKAKVE

SEQ ID NO: 6022 - protein, 2091 aa, synthetic construct
MPAAKRVKLDGGDKKYSIGLDIGTNSVGWAVITDEYKVPSKKFKVLGNTDRHSIKKNLIGALLFDSGETAEATRLKRTARRRYTRRKNRICYLQEIFSNEMAKVDDSFFHRLEESFLVEEDKKHERHPIFGNIVDEVAYHEKYPTIYHLRKKLVDSTDKADLRLIYLALAHMIKFRGHFLIEGDLNPDNSDVDKLFIQLVQTYNQLFEENPINASGVDAKAILSARLSKSRRLENLIAQLPGEKKNGLFGNLIALSLGLTPNFKSNFDLAEDAKLQLSKDTYDDDLDNLLAQIGDQYADLFLAAKNLSDAILLSDILRVNTEITKAPLSASMIKRYDEHHQDLTLLKALVRQQLPEKYKEIFFDQSKNGYAGYIDGGASQEEFYKFIKPILEKMDGTEELLVKLNREDLLRKQRTFDNGSIPHQIHLGELHAILRRQEDFYPFLKDNREKIEKILTFRIPYYVGPLARGNSRFAWMTRKSEETITPWNFEEVVDKGASAQSFIERMTNFDKNLPNEKVLPKHSLLYEYFTVYNELTKVKYVTEGMRKPAFLSGEQKKAIVDLLFKTNRKVTVKQLKEDYFKKIECFDSVEISGVEDRFNASLGTYHDLLKIIKDKDFLDNEENEDILEDIVLTLTLFEDREMIEERLKTYAHLFDDKVMKQLKRRRYTGWGRLSRKLINGIRDKQSGKTILDFLKSDGFANRNFMQLIHDDSLTFKEDIQKAQVSGQGDSLHEHIANLAGSPAIKKGILQTVKVVDELVKVMGRHKPENIVIEMARENQTTQKGQKNSRERMKRIEEGIKELGSQILKEHPVENTQLQNEKLYLYYLQNGRDMYVDQELDINRLSDYDVDHIVPQSFLKDDSIDNKVLTRSDKARGKSDNVPSEEVVKKMKNYWRQLLNAKLITQRKFDNLTKAERGGLSELDKAGFIKRQLVETRQITKHVAQILDSRMNTKYDENDKLIREVKVITLKSKLVSDFRKDFQFYKVREINNYHHAHDAYLNAVVGTALIKKYPKLESEFVYGDYKVYDVRKMIAKSEQEIGKATAKYFFYSNIMNFFKTEITLANGEIRKRPLIETNGETGEIVWDKGRDFATVRKVLSMPQVNIVKKTEVQTGGFSKESILPKRNSDKLIARKKDWDPKKYGGFDSPTVAYSVLVVAKVEKGKSKKLKSVKELLGITIMERSSFEKNPIDFLEAKGYKEVKKDLIIKLPKYSLFELENGRKRMLASAGELQKGNELALPSKYVNFLYLASHYEKLKGSPEDNEQKQLFVEQHKHYLDEIIEQISEFSKRVILADANLDKVLSAYNKHRDKPIREQAENIIHLFTLTNLGAPAAFKYFDTTIDRKRYTSTKEVLDATLIHQSITGLYETRIDLSQLGGDGGGGSGGSGGLGIEDEYRLHETSTEPDVSLGSTWLSDFPQAWAETGGMGLAVRQAPLIIPLKATSTPVSIQQYPMSHEARLGIKPHIQRLLDQGILVPCQSPWNTPLLPVKKPGTNDYRPVQDLREVNKRVEDIHPTVPNPYNLLSGLPPSHQWYTVLDLKDAFFCLRLHPTSQPLFAFEWRDPGMGISGQLTWTRLPQGFKNSPTLFNEALHRDLADFRIQHPDLILLQYVDDILLAATSELDCQQGTRALLQTLGDLGYRASAKKAQICQKQVKYLGYLLREGQRWLTEARKETVMGQPVPKTPRQLREFLGKAGFCRLFIPGFAEMAAPLYPLTKPGTLFSWGPDQQKAYQEIKQALLTAPALGLPDLTKPFELFVDEKQGYAKGVLTQKLGPWRRPVAYLSKKLDPVAAGWPPCLRMVAAIAVLTKDAGKLTMGQPLVILAPHAVEALVKQPPDRWLSNARMTHYQAMLLDTDRVQFGPVVALNPATLLPLPEEGAPHDCLEILAETHGTRPDLTDQPIPDADHTWYTDGSSFLQEGQRKAGAAVTTETEVIWAGALPAGTSAQRAELIALTQALKMAEGKRLNVYTDSRYAFATAHIHGEIYRRRGWLTSEGREIKNKSEILALLKALFLPKRLSIIHCLGHQKGDSAEARGNRLADQAAREAAIKTPPDTSTLLIAGKRTADGSEFEKRTADGSEFESPKKKAKVE

SEQ ID NO: 6023 - protein, 2091 aa, synthetic construct
MPAAKRVKLDGGDKKYSIGLDIGTNSVGWAVITDEYKVPSKKFKVLGNTDRHSIKKNLIGALLFDSGETAEATRLKRTARRRYTRRKNRICYLQEIFSNEMAKVDDSFFHRLEESFLVEEDKKHERHPIFGNIVDEVAYHEKYPTIYHLRKKLVDSTDKADLRLIYLALAHMIKFRGHFLIEGDLNPDNSDVDKLFIQLVQTYNQLFEENPINASGVDAKAILSARLSKSRRLENLIAQLPGEKKNGLFGNLIALSLGLTPNFKSNFDLAEDAKLQLSKDTYDDDLDNLLAQIGDQYADLFLAAKNLSDAILLSDILRVNTEITKAPLSASMIKRYDEHHQDLTLLKALVRQQLPEKYKEIFFDQSKNGYAGYIDGGASQEEFYKFIKPILEKMDGTEELLVKLNREDLLRKQRTFDNGSIPHQIHLGELHAILRRQEDFYPFLKDNREKIEKILTFRIPYYVGPLARGNSRFAWMTRKSEETITPWNFEEVVDKGASAQSFIERMTNFDKNLPNEKVLPKHSLLYEYFTVYNELTKVKYVTEGMRKPAFLSGEQKKAIVDLLFKTNRKVTVKQLKEDYFKKIECFDSVEISGVEDRFNASLGTYHDLLKIIKDKDFLDNEENEDILEDIVLTLTLFEDREMIEERLKTYAHLFDDKVMKQLKRRRYTGWGRLSRKLINGIRDKQSGKTILDFLKSDGFANRNFMQLIHDDSLTFKEDIQKAQVSGQGDSLHEHIANLAGSPAIKKGILQTVKVVDELVKVMGRHKPENIVIEMARENQTTQKGQKNSRERMKRIEEGIKELGSQILKEHPVENTQLQNEKLYLYYLQNGRDMYVDQELDINRLSDYDVDHIVPQSFLKDDSIDNKVLTRSDKARGKSDNVPSEEVVKKMKNYWRQLLNAKLITQRKFDNLTKAERGGLSELDKAGFIKRQLVETRQITKHVAQILDSRMNTKYDENDKLIREVKVITLKSKLVSDFRKDFQFYKVREINNYHHAHDAYLNAVVGTALIKKYPKLESEFVYGDYKVYDVRKMIAKSEQEIGKATAKYFFYSNIMNFFKTEITLANGEIRKRPLIETNGETGEIVWDKGRDFATVRKVLSMPQVNIVKKTEVQTGGFSKESILPKRNSDKLIARKKDWDPKKYGGFDSPTVAYSVLVVAKVEKGKSKKLKSVKELLGITIMERSSFEKNPIDFLEAKGYKEVKKDLIIKLPKYSLFELENGRKRMLASAGELQKGNELALPSKYVNFLYLASHYEKLKGSPEDNEQKQLFVEQHKHYLDEIIEQISEFSKRVILADANLDKVLSAYNKHRDKPIREQAENIIHLFTLTNLGAPAAFKYFDTTIDRKRYTSTKEVLDATLIHQSITGLYETRIDLSQLGGDGGGGSGGSGGTLGIEDEYRLHETSTEPDVSLGSTWLSDFPQAWAETGGMGLAVRQAPLIIPLKATSTPVSIQQYPMSHEARLGIKPHIQRLLDQGILVPCQSPWNTPLLPVKKPGTNDYRPVQDLREVNKRVEDIHPTVPNPYNLLSGLPPSHQWYTVLDLKDAFFCLRLHPTSQPLFAFEWRDPGMGISGQLTWTRLPQGFKNSPTLFNEALHRDLADFRIQHPDLILLQYVDDILLAATSELDCQQGTRALLQTLGDLGYRASAKKAQICQKQVKYLGYLLREGQRWLTEARKETVMGQPVPKTPRQLREFLGTAGFCRLWIPGFAEMAAPLYPLTKPGTLFSWGPDQQKAYQEIKQALLTAPALGLPDLTKPFELFVDEKQGYAKGVLTQKLGPWRRPVAYLSKKLDPVAAGWPPCLRMVAAIAVLTKDAGKLTMGQPLVILAPHAVEALVKQPPDRWLSNARMTHYQAMLLDTDRVQFGPVVALNPATLLPLPEEGAPHDCLEILAETHGTRPDLTDQPIPDADHTWYTDGSSFLQEGQRKAGAAVTTETEVIWAGALPAGTSAQRAELIALTQALKMAEGKRLNVYTDSRYAFATAHIHGEIYRRRGWLTSEGREIKNKSEILALLKALFLPKRLSIIHCLGHQKGDSAEARGNRLADQAAREAAIKTPPDTSTLLAGKRTADGSEFEKRTADGSEFESPKKKAKVE

SEQ ID NO: 6024 - protein, 2091 aa, synthetic construct
MPAAKRVKLDGGDKKYSIGLDIGTNSVGWAVITDEYKVPSKKFKVLGNTDRHSIKKNLIGALLFDSGETAEATRLKRTARRRYTRRKNRICYLQEIFSNEMAKVDDSFFHRLEESFLVEEDKKHERHPIFGNIVDEVAYHEKYPTIYHLRKKLVDSTDKADLRLIYLALAHMIKFRGHFLIEGDLNPDNSDVDKLFIQLVQTYNQLFEENPINASGVDAKAILSARLSKSRRLENLIAQLPGEKKNGLFGNLIALSLGLTPNFKSNFDLAEDAKLQLSKDTYDDDLDNLLAQIGDQYADLFLAAKNLSDAILLSDILRVNTEITKAPLSASMIKRYDEHHQDLTLLKALVRQQLPEKYKEIFFDQSKNGYAGYIDGGASQEEFYKFIKPILEKMDGTEELLVKLNREDLLRKQRTFDNGSIPHQIHLGELHAILRRQEDFYPFLKDNREKIEKILTFRIPYYVGPLARGNSRFAWMTRKSEETITPWNFEEVVDKGASAQSFIERMTNFDKNLPNEKVLPKHSLLYEYFTVYNELTKVKYVTEGMRKPAFLSGEQKKAIVDLLFKTNRKVTVKQLKEDYFKKIECFDSVEISGVEDRFNASLGTYHDLLKIIKDKDFLDNEENEDILEDIVLTLTLFEDREMIEERLKTYAHLFDDKVMKQLKRRRYTGWGRLSRKLINGIRDKQSGKTILDFLKSDGFANRNFMQLIHDDSLTFKEDIQKAQVSGQGDSLHEHIANLAGSPAIKKGILQTVKVVDELVKVMGRHKPENIVIEMARENQTTQKGQKNSRERMKRIEEGIKELGSQILKEHPVENTQLQNEKLYLYYLQNGRDMYVDQELDINRLSDYDVDHIVPQSFLKDDSIDNKVLTRSDKARGKSDNVPSEEVVKKMKNYWRQLLNAKLITQRKFDNLTKAERGGLSELDKAGFIKRQLVETRQITKHVAQILDSRMNTKYDENDKLIREVKVITLKSKLVSDFRKDFQFYKVREINNYHHAHDAYLNAVVGTALIKKYPKLESEFVYGDYKVYDVRKMIAKSEQEIGKATAKYFFYSNIMNFFKTEITLANGEIRKRPLIETNGETGEIVWDKGRDFATVRKVLSMPQVNIVKKTEVQTGGFSKESILPKRNSDKLIARKKDWDPKKYGGFDSPTVAYSVLVVAKVEKGKSKKLKSVKELLGITIMERSSFEKNPIDFLEAKGYKEVKKDLIIKLPKYSLFELENGRKRMLASAGELQKGNELALPSKYVNFLYLASHYEKLKGSPEDNEQKQLFVEQHKHYLDEIIEQISEFSKRVILADANLDKVLSAYNKHRDKPIREQAENIIHLFTLTNLGAPAAFKYFDTTIDRKRYTSTKEVLDATLIHQSITGLYETRIDLSQLGGDGGGGSGGSGGTLNIEDEYRLHETSKEPDVSLGSTWLSDFPQAWAETGGMGLAVRQAPLIIPLKATSTPVSIKQYPMSQEARLGIKPHIQRLLDQGILVPCQSPWNTPLLPVKKPGTNDYRPVQDLREVNKRVEDIHPTVPNPYNLLSGLPPSHQWYTVLDLKDAFFCLRLHPTSQPLFAFEWRDPEMGISGQLTWTRLPQGFKNSPTLFNEALHRDLAGFRIQHPDLILLQYVDDLLLAATSELDCQQGTRALLQTLGDLGYRASAKKAQICQKQVKYLGYLLKEGQRWLTEARKETVMGQPIPKTPRQLREFLGTAGFCRLWIPGFAEMAAPLYPLTKPGTLFNWGPDQQKAFQEIKQALLTAPALGLPDLTKPFELFVDEKQGYAKGVLTQKLGPWRRPVAYLSKKLDPVAAGWPPCLRMVAAIAVLTKDAGKLTMGQPLVILAPHAVEALVKQPPDRWLSNARMTHYQALLLDTDRVQFGPVVALNPATLLPLPEEGLQHDCLDILAEAHGTRSDLMDQPLPDADHTWYTDGSSFLQEGQRKAGAAVTTETEVIWARALPAGTSAQRAELIALTQALKMAEGKKLNVYTDSRYAFATAHIHGEIYRRRGWLTSEGKEIKNKDEILALLKALFLPKRLSIIHCPGHQKGNSAEARGNRMADQAAREVATRETPETSTLLAGKRTADGSEFEKRTADGSEFESPKKKAKVE

SEQ ID NO: 6025 - protein, 2091 aa, synthetic construct
MPAAKRVKLDGGDKKYSIGLDIGTNSVGWAVITDEYKVPSKKFKVLGNTDRHSIKKNLIGALLFDSGETAEATRLKRTARRRYTRRKNRICYLQEIFSNEMAKVDDSFFHRLEESFLVEEDKKHERHPIFGNIVDEVAYHEKYPTIYHLRKKLVDSTDKADLRLIYLALAHMIKFRGHFLIEGDLNPDNSDVDKLFIQLVQTYNQLFEENPINASGVDAKAILSARLSKSRRLENLIAQLPGEKKNGLFGNLIALSLGLTPNFKSNFDLAEDAKLQLSKDTYDDDLDNLLAQIGDQYADLFLAAKNLSDAILLSDILRVNTEITKAPLSASMIKRYDEHHQDLTLLKALVRQQLPEKYKEIFFDQSKNGYAGYIDGGASQEEFYKFIKPILEKMDGTEELLVKLNREDLLRKQRTFDNGSIPHQIHLGELHAILRRQEDFYPFLKDNREKIEKILTFRIPYYVGPLARGNSRFAWMTRKSEETITPWNFEEVVDKGASAQSFIERMTNFDKNLPNEKVLPKHSLLYEYFTVYNELTKVKYVTEGMRKPAFLSGEQKKAIVDLLFKTNRKVTVKQLKEDYFKKIECFDSVEISGVEDRFNASLGTYHDLLKIIKDKDFLDNEENEDILEDIVLTLTLFEDREMIEERLKTYAHLFDDKVMKQLKRRRYTGWGRLSRKLINGIRDKQSGKTILDFLKSDGFANRNFMQLIHDDSLTFKEDIQKAQVSGQGDSLHEHIANLAGSPAIKKGILQTVKVVDELVKVMGRHKPENIVIEMARENQTTQKGQKNSRERMKRIEEGIKELGSQILKEHPVENTQLQNEKLYLYYLQNGRDMYVDQELDINRLSDYDVDHIVPQSFLKDDSIDNKVLTRSDKARGKSDNVPSEEVVKKMKNYWRQLLNAKLITQRKFDNLTKAERGGLSELDKAGFIKRQLVETRQITKHVAQILDSRMNTKYDENDKLIREVKVITLKSKLVSDFRKDFQFYKVREINNYHHAHDAYLNAVVGTALIKKYPKLESEFVYGDYKVYDVRKMIAKSEQEIGKATAKYFFYSNIMNFFKTEITLANGEIRKRPLIETNGETGEIVWDKGRDFATVRKVLSMPQVNIVKKTEVQTGGFSKESILPKRNSDKLIARKKDWDPKKYGGFDSPTVAYSVLVVAKVEKGKSKKLKSVKELLGITIMERSSFEKNPIDFLEAKGYKEVKKDLIIKLPKYSLFELENGRKRMLASAGELQKGNELALPSKYVNFLYLASHYEKLKGSPEDNEQKQLFVEQHKHYLDEIIEQISEFSKRVILADANLDKVLSAYNKHRDKPIREQAENIIHLFTLTNLGAPAAFKYFDTTIDRKRYTSTKEVLDATLIHQSITGLYETRIDLSQLGGDGGGGSGGSGGTLNIEDEHRLHETSKEPDVSLGSTWLSDFPQAWAETGGMGLAVRQAPLIIPLKATSTPVSIKQYPMSQEARLGIKPHIQRLLDQGILVPCQSPWNTPLLPVKKPGTNDYRPVQDLREVNKRVEDIHPTVPNPYNLLSGLPPSHQWYTVLDLKDAFFCLRLHPTSQPLFAFEWRDPEMGISGQLTWTRLPQGFKNSPTLFNEALHRDLADFRIQHPDLILLQYVDDLLLAATSELDCQQGTRALLQTLGNLGYRASAKKAQICQKQVKYLGYLLKEGQRWLTEARKETVMGQPTPKTPRQLREFLGTAGFCRLWIPGFAEMAAPLYPLTKPGTLFNWGPDQQKAYQEIKQALLTAPALGLPDLTKPFELFVDEKQGYAKGVLTQKLGPWRRPVAYLSKKLDPVAAGWPPCLRMVAAIAVLTKDAGKLTMGQPLVILAPHAVEALVKQPPDRWLSNARMTHYQALLLDTDRVQFGPVVALNPATLLPLPEEGLQHNCLDILAEAHGTRPDLTDQPLPDADHTWYTDGSSLLQEGQRKAGAAVTTETEVIWAKALPAGTSAQRAELIALTQALKMAEGKKLNVYTDSRYAFATAHIHGEIYRRRGWLTSEGKEIKNKDEILALLKALFLPKRLSIIHCPGHQKGHSAEARGNRMADQAARKAAITETPDTSTLLAGKRTADGSEFEKRTADGSEFESPKKKAKVE

SEQ ID NO: 6026 - protein, 2085 aa, synthetic construct
MPAAKRVKLDGGDKKYSIGLDIGTNSVGWAVITDEYKVPSKKFKVLGNTDRHSIKKNLIGALLFDSGETAEATRLKRTARRRYTRRKNRICYLQEIFSNEMAKVDDSFFHRLEESFLVEEDKKHERHPIFGNIVDEVAYHEKYPTIYHLRKKLVDSTDKADLRLIYLALAHMIKFRGHFLIEGDLNPDNSDVDKLFIQLVQTYNQLFEENPINASGVDAKAILSARLSKSRRLENLIAQLPGEKKNGLFGNLIALSLGLTPNFKSNFDLAEDAKLQLSKDTYDDDLDNLLAQIGDQYADLFLAAKNLSDAILLSDILRVNTEITKAPLSASMIKRYDEHHQDLTLLKALVRQQLPEKYKEIFFDQSKNGYAGYIDGGASQEEFYKFIKPILEKMDGTEELLVKLNREDLLRKQRTFDNGSIPHQIHLGELHAILRRQEDFYPFLKDNREKIEKILTFRIPYYVGPLARGNSRFAWMTRKSEETITPWNFEEVVDKGASAQSFIERMTNFDKNLPNEKVLPKHSLLYEYFTVYNELTKVKYVTEGMRKPAFLSGEQKKAIVDLLFKTNRKVTVKQLKEDYFKKIECFDSVEISGVEDRFNASLGTYHDLLKIIKDKDFLDNEENEDILEDIVLTLTLFEDREMIEERLKTYAHLFDDKVMKQLKRRRYTGWGRLSRKLINGIRDKQSGKTILDFLKSDGFANRNFMQLIHDDSLTFKEDIQKAQVSGQGDSLHEHIANLAGSPAIKKGILQTVKVVDELVKVMGRHKPENIVIEMARENQTTQKGQKNSRERMKRIEEGIKELGSQILKEHPVENTQLQNEKLYLYYLQNGRDMYVDQELDINRLSDYDVDHIVPQSFLKDDSIDNKVLTRSDKARGKSDNVPSEEVVKKMKNYWRQLLNAKLITQRKFDNLTKAERGGLSELDKAGFIKRQLVETRQITKHVAQILDSRMNTKYDENDKLIREVKVITLKSKLVSDFRKDFQFYKVREINNYHHAHDAYLNAVVGTALIKKYPKLESEFVYGDYKVYDVRKMIAKSEQEIGKATAKYFFYSNIMNFFKTEITLANGEIRKRPLIETNGETGEIVWDKGRDFATVRKVLSMPQVNIVKKTEVQTGGFSKESILPKRNSDKLIARKKDWDPKKYGGFDSPTVAYSVLVVAKVEKGKSKKLKSVKELLGITIMERSSFEKNPIDFLEAKGYKEVKKDLIIKLPKYSLFELENGRKRMLASAGELQKGNELALPSKYVNFLYLASHYEKLKGSPEDNEQKQLFVEQHKHYLDEIIEQISEFSKRVILADANLDKVLSAYNKHRDKPIREQAENIIHLFTLTNLGAPAAFKYFDTTIDRKRYTSTKEVLDATLIHQSITGLYETRIDLSQLGGDGGGGSGGSGGTLQLDDEYRLYSPLVKPDQNIQFWLEQFPQAWAETAGMGLAKQVPPQVIQLKASATPVSVRQYPLSKEAQEGIRPHVQRLIQQGILVPVQSPWNTPLLPVRKPGTNDYRPVQDLREVNKRVQDIHPTVPNPYNLLCALPPQRSWYTVLDLKDAFFCLRLHPTSQPLFAFEWRDPGTGRTGQLTWTRLPQGFKNSPTIFDEALHRDLANFRIQHPQVTLLQYVDDLLLAGATKQDCLEGTKALLLELSDLGYRASAKKAQICRREVTYLGYSLRDGQRWLTEARKKTVVQIPAPTTAKQVREFLGTAGFCRLWIPGFATLAAPLYPLTKEKGEFSWAPEHQKAFDAIKKALLSAPALALPDVTKPFTLYVDERKGVARGVLTQTLGPWRRPVAYLSKKLDPVASGWPVCLKAIAAVAILVKDADKLTLGQNITVIAPHALENIVRQPPDRWMTNARMTHYQSLLLTERVTFAPPAALNPATLLPEETDEPVTHDCHQLLIEETGVRKDLTDIPLTGEVLTWFTDGSSYVVEGKRMAGAAVVDGTRTIWASSLPEGTSAQKAELMALTQALRLAEGKSINIYTDSRYAFATAHVHGAIYKQRGLLTSAGREIKNKEEILSLLEALHLPKRLAIIHCPGHQKAKDPISRGNQMADRVAKQAAQGVNLLAGKRTADGSEFEKRTADGSEFESPKKKAKVE

SEQ ID NO: 6027 - protein, 2171 aa, synthetic construct
MPAAKRVKLDGGDKKYSIGLDIGTNSVGWAVITDEYKVPSKKFKVLGNTDRHSIKKNLIGALLFDSGETAEATRLKRTARRRYTRRKNRICYLQEIFSNEMAKVDDSFFHRLEESFLVEEDKKHERHPIFGNIVDEVAYHEKYPTIYHLRKKLVDSTDKADLRLIYLALAHMIKFRGHFLIEGDLNPDNSDVDKLFIQLVQTYNQLFEENPINASGVDAKAILSARLSKSRRLENLIAQLPGEKKNGLFGNLIALSLGLTPNFKSNFDLAEDAKLQLSKDTYDDDLDNLLAQIGDQYADLFLAAKNLSDAILLSDILRVNTEITKAPLSASMIKRYDEHHQDLTLLKALVRQQLPEKYKEIFFDQSKNGYAGYIDGGASQEEFYKFIKPILEKMDGTEELLVKLNREDLLRKQRTFDNGSIPHQIHLGELHAILRRQEDFYPFLKDNREKIEKILTFRIPYYVGPLARGNSRFAWMTRKSEETITPWNFEEVVDKGASAQSFIERMTNFDKNLPNEKVLPKHSLLYEYFTVYNELTKVKYVTEGMRKPAFLSGEQKKAIVDLLFKTNRKVTVKQLKEDYFKKIECFDSVEISGVEDRFNASLGTYHDLLKIIKDKDFLDNEENEDILEDIVLTLTLFEDREMIEERLKTYAHLFDDKVMKQLKRRRYTGWGRLSRKLINGIRDKQSGKTILDFLKSDGFANRNFMQLIHDDSLTFKEDIQKAQVSGQGDSLHEHIANLAGSPAIKKGILQTVKVVDELVKVMGRHKPENIVIEMARENQTTQKGQKNSRERMKRIEEGIKELGSQILKEHPVENTQLQNEKLYLYYLQNGRDMYVDQELDINRLSDYDVDHIVPQSFLKDDSIDNKVLTRSDKARGKSDNVPSEEVVKKMKNYWRQLLNAKLITQRKFDNLTKAERGGLSELDKAGFIKRQLVETRQITKHVAQILDSRMNTKYDENDKLIREVKVITLKSKLVSDFRKDFQFYKVREINNYHHAHDAYLNAVVGTALIKKYPKLESEFVYGDYKVYDVRKMIAKSEQEIGKATAKYFFYSNIMNFFKTEITLANGEIRKRPLIETNGETGEIVWDKGRDFATVRKVLSMPQVNIVKKTEVQTGGFSKESILPKRNSDKLIARKKDWDPKKYGGFDSPTVAYSVLVVAKVEKGKSKKLKSVKELLGITIMERSSFEKNPIDFLEAKGYKEVKKDLIIKLPKYSLFELENGRKRMLASAGELQKGNELALPSKYVNFLYLASHYEKLKGSPEDNEQKQLFVEQHKHYLDEIIEQISEFSKRVILADANLDKVLSAYNKHRDKPIREQAENIIHLFTLTNLGAPAAFKYFDTTIDRKRYTSTKEVLDATLIHQSITGLYETRIDLSQLGGDGGGGSGGSGGMDPLQLLQPLEAEIKGTKLKAHWNSGATITCVPQAFLEEEVPIKNIWIKTIHGEKEQPVYYLTFKIQGRKVEAEVISSPYDYILVSPSDIPWLMKKPLQLTTLVPLQEYEERLLKQTMLTGSYKEKLQSLFLKYDALWQHWENQVGHRRIKPHHIATGTVNPRPQKQYPINPKAKASIQTVINDLLKQGVLIQQNSIMNTPVYPVPKPDGKWRMVLDYREVNKTIPLIAAQNQHSAGILSSIFRGKYKTTLDLSNGFWAHSITPESYWLTAFTWLGQQYCWTRLPQGFLNSPALFNADVVDLLKEVPNVQVYVDDIYISHDDPREHLEQLEKVFSLLLNAGYVVSLKKSEIAQHEVEFLGFNITKEGRGLTETFKQKLLNITPPRDLKQLQSILGLLNFARNFIPNFSELVKPLYNIIATAPGKYITWTTDNSQQLQNIISMLNSAENLEERNPEVRLIMKVNTSPSAGYIRFYNEFAKRPIMYLNYVYTKAEVKFTNTEKLLTTIHKGLIKALDLGMGQEILVYSPIVSMTKIQKTPLPERKALPIRWITWMSYLEDPRIQFHYDKTLPELQQVPTVTDDIIAKIKHPSEFSMVFYTDGSAIKHPNVNKSHNAGMGIAQVQFKPEFTVINTWSIPLGDHTAQLAEVAAVEFACKKALKIDGPVLIVTDSFYVAESVNKELPYWQSNGFFNNKKKPLKHVSKWKSIADCIQLKPDIIIIHEKGHQPTASTFHTEGNNLADKLATQGSYVVNAGKRTADGSEFEKRTADGSEFESPKKKAKVE

SEQ ID NO: 6028 - protein, 2091 aa, synthetic construct
MPAAKRVKLDGGDKKYSIGLDIGTNSVGWAVITDEYKVPSKKFKVLGNTDRHSIKKNLIGALLFDSGETAEATRLKRTARRRYTRRKNRICYLQEIFSNEMAKVDDSFFHRLEESFLVEEDKKHERHPIFGNIVDEVAYHEKYPTIYHLRKKLVDSTDKADLRLIYLALAHMIKFRGHFLIEGDLNPDNSDVDKLFIQLVQTYNQLFEENPINASGVDAKAILSARLSKSRRLENLIAQLPGEKKNGLFGNLIALSLGLTPNFKSNFDLAEDAKLQLSKDTYDDDLDNLLAQIGDQYADLFLAAKNLSDAILLSDILRVNTEITKAPLSASMIKRYDEHHQDLTLLKALVRQQLPEKYKEIFFDQSKNGYAGYIDGGASQEEFYKFIKPILEKMDGTEELLVKLNREDLLRKQRTFDNGSIPHQIHLGELHAILRRQEDFYPFLKDNREKIEKILTFRIPYYVGPLARGNSRFAWMTRKSEETITPWNFEEVVDKGASAQSFIERMTNFDKNLPNEKVLPKHSLLYEYFTVYNELTKVKYVTEGMRKPAFLSGEQKKAIVDLLFKTNRKVTVKQLKEDYFKKIECFDSVEISGVEDRFNASLGTYHDLLKIIKDKDFLDNEENEDILEDIVLTLTLFEDREMIEERLKTYAHLFDDKVMKQLKRRRYTGWGRLSRKLINGIRDKQSGKTILDFLKSDGFANRNFMQLIHDDSLTFKEDIQKAQVSGQGDSLHEHIANLAGSPAIKKGILQTVKVVDELVKVMGRHKPENIVIEMARENQTTQKGQKNSRERMKRIEEGIKELGSQILKEHPVENTQLQNEKLYLYYLQNGRDMYVDQELDINRLSDYDVDHIVPQSFLKDDSIDNKVLTRSDKARGKSDNVPSEEVVKKMKNYWRQLLNAKLITQRKFDNLTKAERGGLSELDKAGFIKRQLVETRQITKHVAQILDSRMNTKYDENDKLIREVKVITLKSKLVSDFRKDFQFYKVREINNYHHAHDAYLNAVVGTALIKKYPKLESEFVYGDYKVYDVRKMIAKSEQEIGKATAKYFFYSNIMNFFKTEITLANGEIRKRPLIETNGETGEIVWDKGRDFATVRKVLSMPQVNIVKKTEVQTGGFSKESILPKRNSDKLIARKKDWDPKKYGGFDSPTVAYSVLVVAKVEKGKSKKLKSVKELLGITIMERSSFEKNPIDFLEAKGYKEVKKDLIIKLPKYSLFELENGRKRMLASAGELQKGNELALPSKYVNFLYLASHYEKLKGSPEDNEQKQLFVEQHKHYLDEIIEQISEFSKRVILADANLDKVLSAYNKHRDKPIREQAENIIHLFTLTNLGAPAAFKYFDTTIDRKRYTSTKEVLDATLIHQSITGLYETRIDLSQLGGDGGGGSGGSGGTLNIEDEYRLHETSKEPDVPLGSTWLSDFPQAWAETGGMGLAVRQAPLIIPLKATSTPVSIKQYPMSQEARLGIKPHIQRLLDQGILVPCQSPWNTPLLPVKKPGTNDYRPVQDLREVNKRVEDIHPTVPNPYNLLSGLPPSHQWYTVLDLKDAFFCLRLHPTSQPLFAFEWRDPEMGISGQLTWTRLPQGFKNSPTLFNEALHRDLADFRIQHPDLILLQYVDDLLLAATSEQDCQRGTRALLQTLGNLGYRASAKKAQICQKQVKYLGYLLKEGQRWLTEARKETVMGQPTPKTPRQLREFLGTAGFCRLWIPGFAEMAAPLYPLTKPGTLFNWGPDQQKAYQEIKQALLTAPALGLPDLTKPFELFVDEKQGYAKGVLTQKLGPWRRPVAYLSKKLDPVAAGWPPCLRMVAAIAVLTKDAGKLTMGQPLVILAPHAVEALVKQPPDRWLSNARMTHYQAMLLDTDRVQFGPVVALNPATLLPLPEKEAPHDCLEILAETHGTRPDLTDQPIPDADYTWYTDGSSFLQEGQRRAGAAVTTETEVIWARALPAGTSAQRAELIALTQALKMAEGKKLNVYTDSRYAFATAHVHGEIYRRRGWLTSEGREIKNKNEILALLKALFLPKRLSIIHCPGHQKGNSAEARGNRMADQAAREAAMKAVLETSTLLAGKRTADGSEFEKRTADGSEFESPKKKAKVE

SEQ ID NO: 6029 - protein, 2096 aa, synthetic construct
MPAAKRVKLDGGDKKYSIGLDIGTNSVGWAVITDEYKVPSKKFKVLGNTDRHSIKKNLIGALLFDSGETAEATRLKRTARRRYTRRKNRICYLQEIFSNEMAKVDDSFFHRLEESFLVEEDKKHERHPIFGNIVDEVAYHEKYPTIYHLRKKLVDSTDKADLRLIYLALAHMIKFRGHFLIEGDLNPDNSDVDKLFIQLVQTYNQLFEENPINASGVDAKAILSARLSKSRRLENLIAQLPGEKKNGLFGNLIALSLGLTPNFKSNFDLAEDAKLQLSKDTYDDDLDNLLAQIGDQYADLFLAAKNLSDAILLSDILRVNTEITKAPLSASMIKRYDEHHQDLTLLKALVRQQLPEKYKEIFFDQSKNGYAGYIDGGASQEEFYKFIKPILEKMDGTEELLVKLNREDLLRKQRTFDNGSIPHQIHLGELHAILRRQEDFYPFLKDNREKIEKILTFRIPYYVGPLARGNSRFAWMTRKSEETITPWNFEEVVDKGASAQSFIERMTNFDKNLPNEKVLPKHSLLYEYFTVYNELTKVKYVTEGMRKPAFLSGEQKKAIVDLLFKTNRKVTVKQLKEDYFKKIECFDSVEISGVEDRFNASLGTYHDLLKIIKDKDFLDNEENEDILEDIVLTLTLFEDREMIEERLKTYAHLFDDKVMKQLKRRRYTGWGRLSRKLINGIRDKQSGKTILDFLKSDGFANRNFMQLIHDDSLTFKEDIQKAQVSGQGDSLHEHIANLAGSPAIKKGILQTVKVVDELVKVMGRHKPENIVIEMARENQTTQKGQKNSRERMKRIEEGIKELGSQILKEHPVENTQLQNEKLYLYYLQNGRDMYVDQELDINRLSDYDVDHIVPQSFLKDDSIDNKVLTRSDKARGKSDNVPSEEVVKKMKNYWRQLLNAKLITQRKFDNLTKAERGGLSELDKAGFIKRQLVETRQITKHVAQILDSRMNTKYDENDKLIREVKVITLKSKLVSDFRKDFQFYKVREINNYHHAHDAYLNAVVGTALIKKYPKLESEFVYGDYKVYDVRKMIAKSEQEIGKATAKYFFYSNIMNFFKTEITLANGEIRKRPLIETNGETGEIVWDKGRDFATVRKVLSMPQVNIVKKTEVQTGGFSKESILPKRNSDKLIARKKDWDPKKYGGFDSPTVAYSVLVVAKVEKGKSKKLKSVKELLGITIMERSSFEKNPIDFLEAKGYKEVKKDLIIKLPKYSLFELENGRKRMLASAGELQKGNELALPSKYVNFLYLASHYEKLKGSPEDNEQKQLFVEQHKHYLDEIIEQISEFSKRVILADANLDKVLSAYNKHRDKPIREQAENIIHLFTLTNLGAPAAFKYFDTTIDRKRYTSTKEVLDATLIHQSITGLYETRIDLSQLGGDGGGGSGGSGGSGGTAPLEEEYRLFLEAPIQNVTLLEQWKREIPKVWAEINPPGLASTQAPIHVQLLSTALPVRVRQYPITLEAKRSLRETIRKFRAAGILRPVHSPWNTPLLPVRKSGTSEYRMVQDLREVNKRVETIHPTVPNPYTLLSLLPPDRIWYSVLDLKDAFFCIPLAPESQLIFAFEWADAEEGESGQLTWTRLPQGFKNSPTLFNEALNRDLQGFRLDHPSVSLLQYVDDLLIAADTQAACLSATRDLLMTLAELGYRVSGKKAQLCQEEVTYLGFKIHKGSRSLSNSRTQAILQIPVPKTKRQVREFLGTIGYCRLWIPGFAELAQPLYAATRPGNDPLVWGEKEEEAFQSLKLALTQPPALALPSLDKPFQLFVEETSGAAKGVLTQALGPWKRPVAYLSKRLDPVAAGWPRCLRAIAAAALLTREASKLTFGQDIEITSSHNLESLLRSPPDKWLTNARITQYQVLLLDPPRVRFKQTAALNPATLLPETDDTLPIHHCLDTLDSLTSTRPDLTDQPLAQAEATLFTDGSSYIRDGKRYAGAAVVTLDSVIWAEPLPIGTSAQKAELIALTKALEWSKDKSVNIYTDSRYAFATLHVHGMIYRERGWLTAGGKAIKNAPEILALLTAVWLPKRVAVMHCKGHQKDDAPTSTGNRRADEVAREVAIRPLSTQATISAGKRTADGSEFEKRTADGSEFESPKKKAKVE

SEQ ID NO: 6030 - protein, 2096 aa, synthetic construct; identical to SEQ ID NO: 4501

SEQ ID NO: 6031 - protein, 2093 aa, synthetic construct
MPAAKRVKLDGGDKKYSIGLDIGTNSVGWAVITDEYKVPSKKFKVLGNTDRHSIKKNLIGALLFDSGETAEATRLKRTARRRYTRRKNRICYLQEIFSNEMAKVDDSFFHRLEESFLVEEDKKHERHPIFGNIVDEVAYHEKYPTIYHLRKKLVDSTDKADLRLIYLALAHMIKFRGHFLIEGDLNPDNSDVDKLFIQLVQTYNQLFEENPINASGVDAKAILSARLSKSRRLENLIAQLPGEKKNGLFGNLIALSLGLTPNFKSNFDLAEDAKLQLSKDTYDDDLDNLLAQIGDQYADLFLAAKNLSDAILLSDILRVNTEITKAPLSASMIKRYDEHHQDLTLLKALVRQQLPEKYKEIFFDQSKNGYAGYIDGGASQEEFYKFIKPILEKMDGTEELLVKLNREDLLRKQRTFDNGSIPHQIHLGELHAILRRQEDFYPFLKDNREKIEKILTFRIPYYVGPLARGNSRFAWMTRKSEETITPWNFEEVVDKGASAQSFIERMTNFDKNLPNEKVLPKHSLLYEYFTVYNELTKVKYVTEGMRKPAFLSGEQKKAIVDLLFKTNRKVTVKQLKEDYFKKIECFDSVEISGVEDRFNASLGTYHDLLKIIKDKDFLDNEENEDILEDIVLTLTLFEDREMIEERLKTYAHLFDDKVMKQLKRRRYTGWGRLSRKLINGIRDKQSGKTILDFLKSDGFANRNFMQLIHDDSLTFKEDIQKAQVSGQGDSLHEHIANLAGSPAIKKGILQTVKVVDELVKVMGRHKPENIVIEMARENQTTQKGQKNSRERMKRIEEGIKELGSQILKEHPVENTQLQNEKLYLYYLQNGRDMYVDQELDINRLSDYDVDHIVPQSFLKDDSIDNKVLTRSDKARGKSDNVPSEEVVKKMKNYWRQLLNAKLITQRKFDNLTKAERGGLSELDKAGFIKRQLVETRQITKHVAQILDSRMNTKYDENDKLIREVKVITLKSKLVSDFRKDFQFYKVREINNYHHAHDAYLNAVVGTALIKKYPKLESEFVYGDYKVYDVRKMIAKSEQEIGKATAKYFFYSNIMNFFKTEITLANGEIRKRPLIETNGETGEIVWDKGRDFATVRKVLSMPQVNIVKKTEVQTGGFSKESILPKRNSDKLIARKKDWDPKKYGGFDSPTVAYSVLVVAKVEKGKSKKLKSVKELLGITIMERSSFEKNPIDFLEAKGYKEVKKDLIIKLPKYSLFELENGRKRMLASAGELQKGNELALPSKYVNFLYLASHYEKLKGSPEDNEQKQLFVEQHKHYLDEIIEQISEFSKRVILADANLDKVLSAYNKHRDKPIREQAENIIHLFTLTNLGAPAAFKYFDTTIDRKRYTSTKEVLDATLIHQSITGLYETRIDLSQLGGDGGGGSGGSGGSGGTLQLEEEYRLFEPESTQKQEMDIWLKNFPQAWAETGGMGTAHCQAPVLIQLKATATPISIRQYPMPHEAYQGIKPHIRRMLDQGILKPCQSPWNTPLLPVKKPGTEDYRPVQDLREVNKRVEDIHPTVPNPYNLLSTLPPSHPWYTVLDLKDAFFCLRLHSESQLLFAFEWRDPEIGLSGQLTWTRLPQGFKNSPTLFNEALHSDLADFRVRYPALVLLQYVDDLLLAAATRTECLEGTKALLETLGNKGYRASAKKAQICLQEVTYLGYSLKDGQRWLTKARKEAILSIPVPKNSRQVREFLGKAGYCRLFIPGFAELAAPLYPLTRPGTLFQWGTEQQLAFEDIKKALLSSPALGLPDITKPFELFIDENSGFAKGVLVQKLGPWKRPVAYLSKKLDTVASGWPPCLRMVAAIAILVKDAGKLTLGQPLTILTSHPVEALVRQPPNKWLSNARMTHYQAMLLDAERVHFGPTVSLNPATLLPLPSGGNHHDCLQILAETHGTRPDLTDQPLPDADLTWYTDGSSFIRNGEREAGAAVTTESEVIWAAPLPPGTSAQRAELIALTQALKMAEGKKLTVYTDSRYAFATTHVHGEIYRRRGWLTSEGKEIKNKNEILALLEALFLPKRLSIIHCPGHQKGDSPQAKGNRLADDTAKKAATETHSSLTVLPAGKRTADGSEFEKRTADGSEFESPKKKAKVE

SEQ ID NO: 6032 - protein, 2094 aa, synthetic construct
MPAAKRVKLDGGDKKYSIGLDIGTNSVGWAVITDEYKVPSKKFKVLGNTDRHSIKKNLIGALLFDSGETAEATRLKRTARRRYTRRKNRICYLQEIFSNEMAKVDDSFFHRLEESFLVEEDKKHERHPIFGNIVDEVAYHEKYPTIYHLRKKLVDSTDKADLRLIYLALAHMIKFRGHFLIEGDLNPDNSDVDKLFIQLVQTYNQLFEENPINASGVDAKAILSARLSKSRRLENLIAQLPGEKKNGLFGNLIALSLGLTPNFKSNFDLAEDAKLQLSKDTYDDDLDNLLAQIGDQYADLFLAAKNLSDAILLSDILRVNTEITKAPLSASMIKRYDEHHQDLTLLKALVRQQLPEKYKEIFFDQSKNGYAGYIDGGASQEEFYKFIKPILEKMDGTEELLVKLNREDLLRKQRTFDNGSIPHQIHLGELHAILRRQEDFYPFLKDNREKIEKILTFRIPYYVGPLARGNSRFAWMTRKSEETITPWNFEEVVDKGASAQSFIERMTNFDKNLPNEKVLPKHSLLYEYFTVYNELTKVKYVTEGMRKPAFLSGEQKKAIVDLLFKTNRKVTVKQLKEDYFKKIECFDSVEISGVEDRFNASLGTYHDLLKIIKDKDFLDNEENEDILEDIVLTLTLFEDREMIEERLKTYAHLFDDKVMKQLKRRRYTGWGRLSRKLINGIRDKQSGKTILDFLKSDGFANRNFMQLIHDDSLTFKEDIQKAQVSGQGDSLHEHIANLAGSPAIKKGILQTVKVVDELVKVMGRHKPENIVIEMARENQTTQKGQKNSRERMKRIEEGIKELGSQILKEHPVENTQLQNEKLYLYYLQNGRDMYVDQELDINRLSDYDVDHIVPQSFLKDDSIDNKVLTRSDKARGKSDNVPSEEVVKKMKNYWRQLLNAKLITQRKFDNLTKAERGGLSELDKAGFIKRQLVETRQITKHVAQILDSRMNTKYDENDKLIREVKVITLKSKLVSDFRKDFQFYKVREINNYHHAHDAYLNAVVGTALIKKYPKLESEFVYGDYKVYDVRKMIAKSEQEIGKATAKYFFYSNIMNFFKTEITLANGEIRKRPLIETNGETGEIVWDKGRDFATVRKVLSMPQVNIVKKTEVQTGGFSKESILPKRNSDKLIARKKDWDPKKYGGFDSPTVAYSVLVVAKVEKGKSKKLKSVKELLGITIMERSSFEKNPIDFLEAKGYKEVKKDLIIKLPKYSLFELENGRKRMLASAGELQKGNELALPSKYVNFLYLASHYEKLKGSPEDNEQKQLFVEQHKHYLDEIIEQISEFSKRVILADANLDKVLSAYNKHRDKPIREQAENIIHLFTLTNLGAPAAFKYFDTTIDRKRYTSTKEVLDATLIHQSITGLYETRIDLSQLGGDGGGGSGGSGGSGGTLNLEDEYRLYETSAEPEVSPGSTWLSDFPQAWAETGGMGLAVRQAPLIIPLKATSTPVSIKQYPMSQEAKLGIKPHIQRLLDQGILVPCQSPWNTPLLPVKKPGTNDYRPVQDLREVNKRVEDIHPTVPNPYNLLSGLPPSHRWYTVLDLKDAFFCLRLHPTSQPLFAFEWRDPGMGISGQLTWTRLPQGFKNSPTLFNEALHRDLADFRIQHPDLILLQYVDDILLAATSELDCQQGTRALLLTLGNLGYRASAKKAQLCQKQVKYLGYLLKEGQRWLTEARKETVMGQPTPKTPRQLREFLGTAGFCRLWIPGFAEMAAPLYPLTKPGTLFNWGPDQQKAYQEIKQALLTAPALGLPDLTKPFELFVDEKQGYAKGVLTQKLGPWRRPVAYLSKKLDPVAAGWPPCLRMVAAIAVLRKDAGKLTMGQPLVILAPHAVEALVKQPPDRWLSNARMTHYQAMLLDTDRVQFGPVVALNPATLLPLPEEGAPHDCLEILAETHGTRPDLTDQPIPDADHTWYTDGSSFLQEGQRKAGAAVTTETEVIWARALPAGTSAQRAELIALTQALKMAEGKRLNVYTDSRYAFATAHIHGEIYRRRGWLTSEGREIKNKSEILALLKALFLPKRLSIIHCLGHQKGDSAEARGNRLADQAAREAAIKTPPDTSTLLAGKRTADGSEFEKRTADGSEFESPKKKAKVE

SEQ ID NO: 6033 - protein, 2094 aa, synthetic construct
MPAAKRVKLDGGDKKYSIGLDIGTNSVGWAVITDEYKVPSKKFKVLGNTDRHSIKKNLIGALLFDSGETAEATRLKRTARRRYTRRKNRICYLQEIFSNEMAKVDDSFFHRLEESFLVEEDKKHERHPIFGNIVDEVAYHEKYPTIYHLRKKLVDSTDKADLRLIYLALAHMIKFRGHFLIEGDLNPDNSDVDKLFIQLVQTYNQLFEENPINASGVDAKAILSARLSKSRRLENLIAQLPGEKKNGLFGNLIALSLGLTPNFKSNFDLAEDAKLQLSKDTYDDDLDNLLAQIGDQYADLFLAAKNLSDAILLSDILRVNTEITKAPLSASMIKRYDEHHQDLTLLKALVRQQLPEKYKEIFFDQSKNGYAGYIDGGASQEEFYKFIKPILEKMDGTEELLVKLNREDLLRKQRTFDNGSIPHQIHLGELHAILRRQEDFYPFLKDNREKIEKILTFRIPYYVGPLARGNSRFAWMTRKSEETITPWNFEEVVDKGASAQSFIERMTNFDKNLPNEKVLPKHSLLYEYFTVYNELTKVKYVTEGMRKPAFLSGEQKKAIVDLLFKTNRKVTVKQLKEDYFKKIECFDSVEISGVEDRFNASLGTYHDLLKIIKDKDFLDNEENEDILEDIVLTLTLFEDREMIEERLKTYAHLFDDKVMKQLKRRRYTGWGRLSRKLINGIRDKQSGKTILDFLKSDGFANRNFMQLIHDDSLTFKEDIQKAQVSGQGDSLHEHIANLAGSPAIKKGILQTVKVVDELVKVMGRHKPENIVIEMARENQTTQKGQKNSRERMKRIEEGIKELGSQILKEHPVENTQLQNEKLYLYYLQNGRDMYVDQELDINRLSDYDVDHIVPQSFLKDDSIDNKVLTRSDKARGKSDNVPSEEVVKKMKNYWRQLLNAKLITQRKFDNLTKAERGGLSELDKAGFIKRQLVETRQITKHVAQILDSRMNTKYDENDKLIREVKVITLKSKLVSDFRKDFQFYKVREINNYHHAHDAYLNAVVGTALIKKYPKLESEFVYGDYKVYDVRKMIAKSEQEIGKATAKYFFYSNIMNFFKTEITLANGEIRKRPLIETNGETGEIVWDKGRDFATVRKVLSMPQVNIVKKTEVQTGGFSKESILPKRNSDKLIARKKDWDPKKYGGFDSPTVAYSVLVVAKVEKGKSKKLKSVKELLGITIMERSSFEKNPIDFLEAKGYKEVKKDLIIKLPKYSLFELENGRKRMLASAGELQKGNELALPSKYVNFLYLASHYEKLKGSPEDNEQKQLFVEQHKHYLDEIIEQISEFSKRVILADANLDKVLSAYNKHRDKPIREQAENIIHLFTLTNLGAPAAFKYFDTTIDRKRYTSTKEVLDATLIHQSITGLYETRIDLSQLGGDGGGGSGGSGGSGGTLNLEDEYRLYETSAEPEVSPGSTWLSDFPQAWAETGGMGLAVRQAPLIIPLKATSTPVSIKQYPMSQEAKLGIKPHIQRLLDQGILVPCQSPWNTPLLPVKKPGTNDYRPVQDLREVNKRVEDIHPTVPNPYNLLSGLPPSHRWYTVLDLKDAFFCLRLHPTSQPLFAFEWRDPGMGISGQLTWTRLPQGFKNSPTLFNEALHRDLADFRIQHPDLILLQYVDDILLAATSELDCQQGTRALLLTLGNLGYRASAKKAQLCQKQVKYLGYLLKEGQRWLTEARKETVMGQPTPKTPRQLREFLGKAGFCRLFIPGFAEMAAPLYPLTKPGTLFNWGPDQQKAYQEIKQALLTAPALGLPDLTKPFELFVDEKQGYAKGVLTQKLGPWRRPVAYLSKKLDPVAAGWPPCLRMVAAIAVLRKDAGKLTMGQPLVILAPHAVEALVKQPPDRWLSNARMTHYQAMLLDTDRVQFGPVVALNPATLLPLPEEGAPHDCLEILAETHGTRPDLTDQPIPDADHTWYTDGSSFLQEGQRKAGAAVTTETEVIWARALPAGTSAQRAELIALTQALKMAEGKRLNVYTDSRYAFATAHIHGEIYRRRGWLTSEGREIKNKSEILALLKALFLPKRLSIIHCLGHQKGDSAEARGNRLADQAAREAAIKTPPDTSTLLAGKRTADGSEFEKRTADGSEFESPKKKAKVE

SEQ ID NO: 6034 - protein, 2094 aa, synthetic construct
MPAAKRVKLDGGDKKYSIGLDIGTNSVGWAVITDEYKVPSKKFKVLGNTDRHSIKKNLIGALLFDSGETAEATRLKRTARRRYTRRKNRICYLQEIFSNEMAKVDDSFFHRLEESFLVEEDKKHERHPIFGNIVDEVAYHEKYPTIYHLRKKLVDSTDKADLRLIYLALAHMIKFRGHFLIEGDLNPDNSDVDKLFIQLVQTYNQLFEENPINASGVDAKAILSARLSKSRRLENLIAQLPGEKKNGLFGNLIALSLGLTPNFKSNFDLAEDAKLQLSKDTYDDDLDNLLAQIGDQYADLFLAAKNLSDAILLSDILRVNTEITKAPLSASMIKRYDEHHQDLTLLKALVRQQLPEKYKEIFFDQSKNGYAGYIDGGASQEEFYKFIKPILEKMDGTEELLVKLNREDLLRKQRTFDNGSIPHQIHLGELHAILRRQEDFYPFLKDNREKIEKILTFRIPYYVGPLARGNSRFAWMTRKSEETITPWNFEEVVDKGASAQSFIERMTNFDKNLPNEKVLPKHSLLYEYFTVYNELTKVKYVTEGMRKPAFLSGEQKKAIVDLLFKTNRKVTVKQLKEDYFKKIECFDSVEISGVEDRFNASLGTYHDLLKIIKDKDFLDNEENEDILEDIVLTLTLFEDREMIEERLKTYAHLFDDKVMKQLKRRRYTGWGRLSRKLINGIRDKQSGKTILDFLKSDGFANRNFMQLIHDDSLTFKEDIQKAQVSGQGDSLHEHIANLAGSPAIKKGILQTVKVVDELVKVMGRHKPENIVIEMARENQTTQKGQKNSRERMKRIEEGIKELGSQILKEHPVENTQLQNEKLYLYYLQNGRDMYVDQELDINRLSDYDVDHIVPQSFLKDDSIDNKVLTRSDKARGKSDNVPSEEVVKKMKNYWRQLLNAKLITQRKFDNLTKAERGGLSELDKAGFIKRQLVETRQITKHVAQILDSRMNTKYDENDKLIREVKVITLKSKLVSDFRKDFQFYKVREINNYHHAHDAYLNAVVGTALIKKYPKLESEFVYGDYKVYDVRKMIAKSEQEIGKATAKYFFYSNIMNFFKTEITLANGEIRKRPLIETNGETGEIVWDKGRDFATVRKVLSMPQVNIVKKTEVQTGGFSKESILPKRNSDKLIARKKDWDPKKYGGFDSPTVAYSVLVVAKVEKGKSKKLKSVKELLGITIMERSSFEKNPIDFLEAKGYKEVKKDLIIKLPKYSLFELENGRKRMLASAGELQKGNELALPSKYVNFLYLASHYEKLKGSPEDNEQKQLFVEQHKHYLDEIIEQISEFSKRVILADANLDKVLSAYNKHRDKPIREQAENIIHLFTLTNLGAPAAFKYFDTTIDRKRYTSTKEVLDATLIHQSITGLYETRIDLSQLGGDGGGGSGGSGGSGGLGIEDEYRLHETSTEPDVSLGSTWLSDFPQAWAETGGMGLAVRQAPLIIPLKATSTPVSIQQYPMSHEARLGIKPHIQRLLDQGILVPCQSPWNTPLLPVKKPGTNDYRPVQDLREVNKRVEDIHPTVPNPYNLLSGLPPSHQWYTVLDLKDAFFCLRLHPTSQPLFAFEWRDPGMGISGQLTWTRLPQGFKNSPTLFNEALHRDLADFRIQHPDLILLQYVDDILLAATSELDCQQGTRALLQTLGDLGYRASAKKAQICQKQVKYLGYLLREGQRWLTEARKETVMGQPVPKTPRQLREFLGKAGFCRLFIPGFAEMAAPLYPLTKPGTLFSWGPDQQKAYQEIKQALLTAPALGLPDLTKPFELFVDEKQGYAKGVLTQKLGPWRRPVAYLSKKLDPVAAGWPPCLRMVAAIAVLTKDAGKLTMGQPLVILAPHAVEALVKQPPDRWLSNARMTHYQAMLLDTDRVQFGPVVALNPATLLPLPEEGAPHDCLEILAETHGTRPDLTDQPIPDADHTWYTDGSSFLQEGQRKAGAAVTTETEVIWAGALPAGTSAQRAELIALTQALKMAEGKRLNVYTDSRYAFATAHIHGEIYRRRGWLTSEGREIKNKSEILALLKALFLPKRLSIIHCLGHQKGDSAEARGNRLADQAAREAAIKTPPDTSTLLIAGKRTADGSEFEKRTADGSEFESPKKKAKVE

SEQ ID NO: 6035 - protein, 2094 aa, synthetic construct
MPAAKRVKLDGGDKKYSIGLDIGTNSVGWAVITDEYKVPSKKFKVLGNTDRHSIKKNLIGALLFDSGETAEATRLKRTARRRYTRRKNRICYLQEIFSNEMAKVDDSFFHRLEESFLVEEDKKHERHPIFGNIVDEVAYHEKYPTIYHLRKKLVDSTDKADLRLIYLALAHMIKFRGHFLIEGDLNPDNSDVDKLFIQLVQTYNQLFEENPINASGVDAKAILSARLSKSRRLENLIAQLPGEKKNGLFGNLIALSLGLTPNFKSNFDLAEDAKLQLSKDTYDDDLDNLLAQIGDQYADLFLAAKNLSDAILLSDILRVNTEITKAPLSASMIKRYDEHHQDLTLLKALVRQQLPEKYKEIFFDQSKNGYAGYIDGGASQEEFYKFIKPILEKMDGTEELLVKLNREDLLRKQRTFDNGSIPHQIHLGELHAILRRQEDFYPFLKDNREKIEKILTFRIPYYVGPLARGNSRFAWMTRKSEETITPWNFEEVVDKGASAQSFIERMTNFDKNLPNEKVLPKHSLLYEYFTVYNELTKVKYVTEGMRKPAFLSGEQKKAIVDLLFKTNRKVTVKQLKEDYFKKIECFDSVEISGVEDRFNASLGTYHDLLKIIKDKDFLDNEENEDILEDIVLTLTLFEDREMIEERLKTYAHLFDDKVMKQLKRRRYTGWGRLSRKLINGIRDKQSGKTILDFLKSDGFANRNFMQLIHDDSLTFKEDIQKAQVSGQGDSLHEHIANLAGSPAIKKGILQTVKVVDELVKVMGRHKPENIVIEMARENQTTQKGQKNSRERMKRIEEGIKELGSQILKEHPVENTQLQNEKLYLYYLQNGRDMYVDQELDINRLSDYDVDHIVPQSFLKDDSIDNKVLTRSDKARGKSDNVPSEEVVKKMKNYWRQLLNAKLITQRKFDNLTKAERGGLSELDKAGFIKRQLVETRQITKHVAQILDSRMNTKYDENDKLIREVKVITLKSKLVSDFRKDFQFYKVREINNYHHAHDAYLNAVVGTALIKKYPKLESEFVYGDYKVYDVRKMIAKSEQEIGKATAKYFFYSNIMNFFKTEITLANGEIRKRPLIETNGETGEIVWDKGRDFATVRKVLSMPQVNIVKKTEVQTGGFSKESILPKRNSDKLIARKKDWDPKKYGGFDSPTVAYSVLVVAKVEKGKSKKLKSVKELLGITIMERSSFEKNPIDFLEAKGYKEVKKDLIIKLPKYSLFELENGRKRMLASAGELQKGNELALPSKYVNFLYLASHYEKLKGSPEDNEQKQLFVEQHKHYLDEIIEQISEFSKRVILADANLDKVLSAYNKHRDKPIREQAENIIHLFTLTNLGAPAAFKYFDTTIDRKRYTSTKEVLDATLIHQSITGLYETRIDLSQLGGDGGGGSGGSGGSGGTLGIEDEYRLHETSTEPDVSLGSTWLSDFPQAWAETGGMGLAVRQAPLIIPLKATSTPVSIQQYPMSHEARLGIKPHIQRLLDQGILVPCQSPWNTPLLPVKKPGTNDYRPVQDLREVNKRVEDIHPTVPNPYNLLSGLPPSHQWYTVLDLKDAFFCLRLHPTSQPLFAFEWRDPGMGISGQLTWTRLPQGFKNSPTLFNEALHRDLADFRIQHPDLILLQYVDDILLAATSELDCQQGTRALLQTLGDLGYRASAKKAQICQKQVKYLGYLLREGQRWLTEARKETVMGQPVPKTPRQLREFLGTAGFCRLWIPGFAEMAAPLYPLTKPGTLFSWGPDQQKAYQEIKQALLTAPALGLPDLTKPFELFVDEKQGYAKGVLTQKLGPWRRPVAYLSKKLDPVAAGWPPCLRMVAAIAVLTKDAGKLTMGQPLVILAPHAVEALVKQPPDRWLSNARMTHYQAMLLDTDRVQFGPVVALNPATLLPLPEEGAPHDCLEILAETHGTRPDLTDQPIPDADHTWYTDGSSFLQEGQRKAGAAVTTETEVIWAGALPAGTSAQRAELIALTQALKMAEGKRLNVYTDSRYAFATAHIHGEIYRRRGWLTSEGREIKNKSEILALLKALFLPKRLSIIHCLGHQKGDSAEARGNRLADQAAREAAIKTPPDTSTLLAGKRTADGSEFEKRTADGSEFESPKKKAKVE

SEQ ID NO: 6036 - protein, 2094 aa, synthetic construct; identical to SEQ ID NO: 6034

SEQ ID NO: 6037 - protein, 2094 aa, synthetic construct
MPAAKRVKLDGGDKKYSIGLDIGTNSVGWAVITDEYKVPSKKFKVLGNTDRHSIKKNLIGALLFDSGETAEATRLKRTARRRYTRRKNRICYLQEIFSNEMAKVDDSFFHRLEESFLVEEDKKHERHPIFGNIVDEVAYHEKYPTIYHLRKKLVDSTDKADLRLIYLALAHMIKFRGHFLIEGDLNPDNSDVDKLFIQLVQTYNQLFEENPINASGVDAKAILSARLSKSRRLENLIAQLPGEKKNGLFGNLIALSLGLTPNFKSNFDLAEDAKLQLSKDTYDDDLDNLLAQIGDQYADLFLAAKNLSDAILLSDILRVNTEITKAPLSASMIKRYDEHHQDLTLLKALVRQQLPEKYKEIFFDQSKNGYAGYIDGGASQEEFYKFIKPILEKMDGTEELLVKLNREDLLRKQRTFDNGSIPHQIHLGELHAILRRQEDFYPFLKDNREKIEKILTFRIPYYVGPLARGNSRFAWMTRKSEETITPWNFEEVVDKGASAQSFIERMTNFDKNLPNEKVLPKHSLLYEYFTVYNELTKVKYVTEGMRKPAFLSGEQKKAIVDLLFKTNRKVTVKQLKEDYFKKIECFDSVEISGVEDRFNASLGTYHDLLKIIKDKDFLDNEENEDILEDIVLTLTLFEDREMIEERLKTYAHLFDDKVMKQLKRRRYTGWGRLSRKLINGIRDKQSGKTILDFLKSDGFANRNFMQLIHDDSLTFKEDIQKAQVSGQGDSLHEHIANLAGSPAIKKGILQTVKVVDELVKVMGRHKPENIVIEMARENQTTQKGQKNSRERMKRIEEGIKELGSQILKEHPVENTQLQNEKLYLYYLQNGRDMYVDQELDINRLSDYDVDHIVPQSFLKDDSIDNKVLTRSDKARGKSDNVPSEEVVKKMKNYWRQLLNAKLITQRKFDNLTKAERGGLSELDKAGFIKRQLVETRQITKHVAQILDSRMNTKYDENDKLIREVKVITLKSKLVSDFRKDFQFYKVREINNYHHAHDAYLNAVVGTALIKKYPKLESEFVYGDYKVYDVRKMIAKSEQEIGKATAKYFFYSNIMNFFKTEITLANGEIRKRPLIETNGETGEIVWDKGRDFATVRKVLSMPQVNIVKKTEVQTGGFSKESILPKRNSDKLIARKKDWDPKKYGGFDSPTVAYSVLVVAKVEKGKSKKLKSVKELLGITIMERSSFEKNPIDFLEAKGYKEVKKDLIIKLPKYSLFELENGRKRMLASAGELQKGNELALPSKYVNFLYLASHYEKLKGSPEDNEQKQLFVEQHKHYLDEIIEQISEFSKRVILADANLDKVLSAYNKHRDKPIREQAENIIHLFTLTNLGAPAAFKYFDTTIDRKRYTSTKEVLDATLIHQSITGLYETRIDLSQLGGDGGGGSGGSGGSGGTLGIEDEYRLHETSTEPDVSLGSTWLSDFPQAWAETGGMGLAVRQAPLIIPLKATSTPVSIQQYPMSHEARLGIKPHIQRLLDQGILVPCQSPWNTPLLPVKKPGTNDYRPVQDLREVNKRVEDIHPTVPNPYNLLSGLPPSHQWYTVLDLKDAFFCLRLHPTSQPLFAFEWRDPGMGISGQLTWTRLPQGFKNSPTLFDEALHRDLADFRIQHPDLILLQYVDDILLAATSELDCQQGTRALLQTLGDLGYRASAKKAQICQKQVKYLGYLLREGQRWLTEARKETVMGQPVPKTPRQLREFLGTAGFCRLWIPGFAEMAAPLYPLTKTGTLFSWGPDQQKAYQEIKQALLTAPALGLPDLTKPFELFVDEKQGYAKGVLTQKLGPWRRPVAYLSKKLDPVAAGWPPCLRMVAAIAVLTKDAGKLTMGQPLVILAPHAVEALVKQPPDRWLSNARMTHYQAMLLDTDRVQFGPVVALNPATLLPLPEEGAPHDCLEILAETHGTRPDLTDQPIPDADHTWYTDGSSFLQEGQRKAGAAVTTETEVIWAGALPAGTSAQRAELIALTQALKMAEGKRLNVYTDSRYAFATAHIHGEIYRRRGLLTSEGREIKNKSEILALLKALFLPKRLSIIHCLGHQKGDSAEARGNRLADQAAREAAIKTPPDTSTLLAGKRTADGSEFEKRTADGSEFESPKKKAKVE

SEQ ID NO: 6038 - protein, 2094 aa, synthetic construct; identical to SEQ ID NO: 6035

SEQ ID NO: 6039 - protein, 2094 aa, synthetic construct
MPAAKRVKLDGGDKKYSIGLDIGTNSVGWAVITDEYKVPSKKFKVLGNTDRHSIKKNLIGALLFDSGETAEATRLKRTARRRYTRRKNRICYLQEIFSNEMAKVDDSFFHRLEESFLVEEDKKHERHPIFGNIVDEVAYHEKYPTIYHLRKKLVDSTDKADLRLIYLALAHMIKFRGHFLIEGDLNPDNSDVDKLFIQLVQTYNQLFEENPINASGVDAKAILSARLSKSRRLENLIAQLPGEKKNGLFGNLIALSLGLTPNFKSNFDLAEDAKLQLSKDTYDDDLDNLLAQIGDQYADLFLAAKNLSDAILLSDILRVNTEITKAPLSASMIKRYDEHHQDLTLLKALVRQQLPEKYKEIFFDQSKNGYAGYIDGGASQEEFYKFIKPILEKMDGTEELLVKLNREDLLRKQRTFDNGSIPHQIHLGELHAILRRQEDFYPFLKDNREKIEKILTFRIPYYVGPLARGNSRFAWMTRKSEETITPWNFEEVVDKGASAQSFIERMTNFDKNLPNEKVLPKHSLLYEYFTVYNELTKVKYVTEGMRKPAFLSGEQKKAIVDLLFKTNRKVTVKQLKEDYFKKIECFDSVEISGVEDRFNASLGTYHDLLKIIKDKDFLDNEENEDILEDIVLTLTLFEDREMIEERLKTYAHLFDDKVMKQLKRRRYTGWGRLSRKLINGIRDKQSGKTILDFLKSDGFANRNFMQLIHDDSLTFKEDIQKAQVSGQGDSLHEHIANLAGSPAIKKGILQTVKVVDELVKVMGRHKPENIVIEMARENQTTQKGQKNSRERMKRIEEGIKELGSQILKEHPVENTQLQNEKLYLYYLQNGRDMYVDQELDINRLSDYDVDHIVPQSFLKDDSIDNKVLTRSDKARGKSDNVPSEEVVKKMKNYWRQLLNAKLITQRKFDNLTKAERGGLSELDKAGFIKRQLVETRQITKHVAQILDSRMNTKYDENDKLIREVKVITLKSKLVSDFRKDFQFYKVREINNYHHAHDAYLNAVVGTALIKKYPKLESEFVYGDYKVYDVRKMIAKSEQEIGKATAKYFFYSNIMNFFKTEITLANGEIRKRPLIETNGETGEIVWDKGRDFATVRKVLSMPQVNIVKKTEVQTGGFSKESILPKRNSDKLIARKKDWDPKKYGGFDSPTVAYSVLVVAKVEKGKSKKLKSVKELLGITIMERSSFEKNPIDFLEAKGYKEVKKDLIIKLPKYSLFELENGRKRMLASAGELQKGNELALPSKYVNFLYLASHYEKLKGSPEDNEQKQLFVEQHKHYLDEIIEQISEFSKRVILADANLDKVLSAYNKHRDKPIREQAENIIHLFTLTNLGAPAAFKYFDTTIDRKRYTSTKEVLDATLIHQSITGLYETRIDLSQLGGDGGGGSGGSGGSGGTLNIEDEYRLHETSKGPDVPLGSTWLSDFPQAWAETGGMGLAFRQAPLIISLKATSTPVSIKQYPMSQEARLGIKPHIQRLLDQGILVPCQSPWNTPLLPVKKPGTNDYRPVQDLREVNKRVEDIHPTVPNPYNLLSGLPPSHQWYTVLDLKDAFFCLRLHPTSQSLFAFEWKDPEMGISGQLTWTRLPQGFKNSPTLFNEALHRDLADFRIQHPDLILLQYVDDLLLAATSELDCQQGTRALLQTLGDLGYRASAKKAQICQKQVKYLGYLLKEGQRWLTEARKETVMGQPTPKTPRQLREFLGKAGLCRLFIPGFAEMAAPLYPLTKPGTLFKWGPDQQKAYQEIKQALLTAPALGLPDLTKPFELFVDEKQGYAKGVLTQKLGPWRRPVAYLSKKLDPVAAGWPPCLRMVAAIAVLTKDVGKLTMGQPLVILAPHAVEALVKQPPDRWLSNARMTHYQALLLDTDRVQFGPIVALNPATLLPLPEEGLQHDCLDILAEAHGTRPDLTDQPLPDADHTWYTDGSSFLQEGQRRAGAAVTTETEVIWAKALPAGTSAQRAELIALTQALKMAAGKKLNVYTDSRYAFATAHIHGEIYRRRGWLTSEGKEIKNKDEILALLKALFLPKRLSIIHCPGHQKGNHAEARGNRMADQAAREVATRETPETSTLLAGKRTADGSEFEKRTADGSEFESPKKKAKVE

SEQ ID NO: 6040 - protein, 2094 aa, synthetic construct
MPAAKRVKLDGGDKKYSIGLDIGTNSVGWAVITDEYKVPSKKFKVLGNTDRHSIKKNLIGALLFDSGETAEATRLKRTARRRYTRRKNRICYLQEIFSNEMAKVDDSFFHRLEESFLVEEDKKHERHPIFGNIVDEVAYHEKYPTIYHLRKKLVDSTDKADLRLIYLALAHMIKFRGHFLIEGDLNPDNSDVDKLFIQLVQTYNQLFEENPINASGVDAKAILSARLSKSRRLENLIAQLPGEKKNGLFGNLIALSLGLTPNFKSNFDLAEDAKLQLSKDTYDDDLDNLLAQIGDQYADLFLAAKNLSDAILLSDILRVNTEITKAPLSASMIKRYDEHHQDLTLLKALVRQQLPEKYKEIFFDQSKNGYAGYIDGGASQEEFYKFIKPILEKMDGTEELLVKLNREDLLRKQRTFDNGSIPHQIHLGELHAILRRQEDFYPFLKDNREKIEKILTFRIPYYVGPLARGNSRFAWMTRKSEETITPWNFEEVVDKGASAQSFIERMTNFDKNLPNEKVLPKHSLLYEYFTVYNELTKVKYVTEGMRKPAFLSGEQKKAIVDLLFKTNRKVTVKQLKEDYFKKIECFDSVEISGVEDRFNASLGTYHDLLKIIKDKDFLDNEENEDILEDIVLTLTLFEDREMIEERLKTYAHLFDDKVMKQLKRRRYTGWGRLSRKLINGIRDKQSGKTILDFLKSDGFANRNFMQLIHDDSLTFKEDIQKAQVSGQGDSLHEHIANLAGSPAIKKGILQTVKVVDELVKVMGRHKPENIVIEMARENQTTQKGQKNSRERMKRIEEGIKELGSQILKEHPVENTQLQNEKLYLYYLQNGRDMYVDQELDINRLSDYDVDHIVPQSFLKDDSIDNKVLTRSDKARGKSDNVPSEEVVKKMKNYWRQLLNAKLITQRKFDNLTKAERGGLSELDKAGFIKRQLVETRQITKHVAQILDSRMNTKYDENDKLIREVKVITLKSKLVSDFRKDFQFYKVREINNYHHAHDAYLNAVVGTALIKKYPKLESEFVYGDYKVYDVRKMIAKSEQEIGKATAKYFFYSNIMNFFKTEITLANGEIRKRPLIETNGETGEIVWDKGRDFATVRKVLSMPQVNIVKKTEVQTGGFSKESILPKRNSDKLIARKKDWDPKKYGGFDSPTVAYSVLVVAKVEKGKSKKLKSVKELLGITIMERSSFEKNPIDFLEAKGYKEVKKDLIIKLPKYSLFELENGRKRMLASAGELQKGNELALPSKYVNFLYLASHYEKLKGSPEDNEQKQLFVEQHKHYLDEIIEQISEFSKRVILADANLDKVLSAYNKHRDKPIREQAENIIHLFTLTNLGAPAAFKYFDTTIDRKRYTSTKEVLDATLIHQSITGLYETRIDLSQLGGDGGGGSGGSGGSGGTLNIEDEYRLHETSKGPDVPLGSTWLSDFPQAWAETGGMGLAVRQAPLIIPLKATSTPVSIKQYPMSQEARLGIKPHIQRLLDQGILVPCQSPWNTPLLPVKKPGTNDYRPVQDLREVNKRVEDIHPTVPNPYNLLSGLPPSHQWYTVLDLKDAFFCLRLHPTSQSLFAFEWRDPEMGISGQLTWTRLPQGFKNSPTLFDEALHRDLADFRIQHPDLILLQYVDDLLLAATSELDCQQGTRALLQTLGDLGYRASAKKAQICQKQVKYLGYLLKEGQRWLTEARKETVMGQPTPKTPRQLREFLGTAGFCRLWIPGFAEMAAPLYPLTKTGTLFEWGPDQQKAYQEIKQALLTAPALGLPDLTKPFELFVDEKQGYAKGVLTQKLGPWRRPVAYLSKKLDPVAAGWPPCLRMVAAIAVLTKDAGKLTMGQPLVILAPHAVEALVKQPPDRWLSNARMTHYQALLLDTDRVQFGPIVALNPATLLPLPEEGLQHDCLDILAEAHGTRPDLTDQPLPDADHTWYTDGSSFLQEGQRKAGAAVTTETEVVWAKALPAGTSAQRAELIALTQALKMAEGKKLNVYTDSRYAFATAHIHGEIYRRRGLLTSEGKEIKNKDEILALLKALFLPKRLSIIHCPGHQKGNRAEARGNRMADQAAREVATRETPETSTLLAGKRTADGSEFEKRTADGSEFESPKKKAKVE

SEQ ID NO: 6041 - protein, 2094 aa, synthetic construct
MPAAKRVKLDGGDKKYSIGLDIGTNSVGWAVITDEYKVPSKKFKVLGNTDRHSIKKNLIGALLFDSGETAEATRLKRTARRRYTRRKNRICYLQEIFSNEMAKVDDSFFHRLEESFLVEEDKKHERHPIFGNIVDEVAYHEKYPTIYHLRKKLVDSTDKADLRLIYLALAHMIKFRGHFLIEGDLNPDNSDVDKLFIQLVQTYNQLFEENPINASGVDAKAILSARLSKSRRLENLIAQLPGEKKNGLFGNLIALSLGLTPNFKSNFDLAEDAKLQLSKDTYDDDLDNLLAQIGDQYADLFLAAKNLSDAILLSDILRVNTEITKAPLSASMIKRYDEHHQDLTLLKALVRQQLPEKYKEIFFDQSKNGYAGYIDGGASQEEFYKFIKPILEKMDGTEELLVKLNREDLLRKQRTFDNGSIPHQIHLGELHAILRRQEDFYPFLKDNREKIEKILTFRIPYYVGPLARGNSRFAWMTRKSEETITPWNFEEVVDKGASAQSFIERMTNFDKNLPNEKVLPKHSLLYEYFTVYNELTKVKYVTEGMRKPAFLSGEQKKAIVDLLFKTNRKVTVKQLKEDYFKKIECFDSVEISGVEDRFNASLGTYHDLLKIIKDKDFLDNEENEDILEDIVLTLTLFEDREMIEERLKTYAHLFDDKVMKQLKRRRYTGWGRLSRKLINGIRDKQSGKTILDFLKSDGFANRNFMQLIHDDSLTFKEDIQKAQVSGQGDSLHEHIANLAGSPAIKKGILQTVKVVDELVKVMGRHKPENIVIEMARENQTTQKGQKNSRERMKRIEEGIKELGSQILKEHPVENTQLQNEKLYLYYLQNGRDMYVDQELDINRLSDYDVDHIVPQSFLKDDSIDNKVLTRSDKARGKSDNVPSEEVVKKMKNYWRQLLNAKLITQRKFDNLTKAERGGLSELDKAGFIKRQLVETRQITKHVAQILDSRMNTKYDENDKLIREVKVITLKSKLVSDFRKDFQFYKVREINNYHHAHDAYLNAVVGTALIKKYPKLESEFVYGDYKVYDVRKMIAKSEQEIGKATAKYFFYSNIMNFFKTEITLANGEIRKRPLIETNGETGEIVWDKGRDFATVRKVLSMPQVNIVKKTEVQTGGFSKESILPKRNSDKLIARKKDWDPKKYGGFDSPTVAYSVLVVAKVEKGKSKKLKSVKELLGITIMERSSFEKNPIDFLEAKGYKEVKKDLIIKLPKYSLFELENGRKRMLASAGELQKGNELALPSKYVNFLYLASHYEKLKGSPEDNEQKQLFVEQHKHYLDEIIEQISEFSKRVILADANLDKVLSAYNKHRDKPIREQAENIIHLFTLTNLGAPAAFKYFDTTIDRKRYTSTKEVLDATLIHQSITGLYETRIDLSQLGGDGGGGSGGSGGSGGTLNIEDEHRLHETSKEPDVSLGSTWLSDFPQAWAETGGMGLAVRQAPLIIPLKATSTPVSIKQYPMSQEARLGIKPHIQRLLDQGILVPCQSPWNTPLLPVKKPGTNDYRPVQDLREVNKRVEDIHPTVPNPYNLLSGLPPSHQWYTVLDLKDAFFCLRLHPTSQPLFAFEWRDPEMGISGQLTWTRLPQGFKNSPTLFNEALHRDLADFRIQHPDLILLQYVDDLLLAATSELDCQQGTRALLQTLGNLGYRASAKKAQICQKQVKYLGYLLKEGQRWLTEARKETVMGQPTPKTPRQLREFLGTAGFCRLWIPGFAEMAAPLYPLTKPGTLFNWGPDQQKAYQEIKQALLTAPALGLPDLTKPFELFVDEKQGYAKGVLTQKLGPWRRPVAYLSKKLDPVAAGWPPCLRMVAAIAVLTKDAGKLTMGQPLVILAPHAVEALVKQPPDRWLSNARMTHYQALLLDTDRVQFGPVVALNPATLLPLPEEGLQHNCLDILAEAHGTRPDLTDQPLPDADHTWYTDGSSLLQEGQRKAGAAVTTETEVIWAKALPAGTSAQRAELIALTQALKMAEGKKLNVYTDSRYAFATAHIHGEIYRRRGWLTSEGKEIKNKDEILALLKALFLPKRLSIIHCPGHQKGHSAEARGNRMADQAARKAAITETPDTSTLLAGKRTADGSEFEKRTADGSEFESPKKKAKVE

SEQ ID NO: 6042 - protein, 2094 aa, synthetic construct
MPAAKRVKLDGGDKKYSIGLDIGTNSVGWAVITDEYKVPSKKFKVLGNTDRHSIKKNLIGALLFDSGETAEATRLKRTARRRYTRRKNRICYLQEIFSNEMAKVDDSFFHRLEESFLVEEDKKHERHPIFGNIVDEVAYHEKYPTIYHLRKKLVDSTDKADLRLIYLALAHMIKFRGHFLIEGDLNPDNSDVDKLFIQLVQTYNQLFEENPINASGVDAKAILSARLSKSRRLENLIAQLPGEKKNGLFGNLIALSLGLTPNFKSNFDLAEDAKLQLSKDTYDDDLDNLLAQIGDQYADLFLAAKNLSDAILLSDILRVNTEITKAPLSASMIKRYDEHHQDLTLLKALVRQQLPEKYKEIFFDQSKNGYAGYIDGGASQEEFYKFIKPILEKMDGTEELLVKLNREDLLRKQRTFDNGSIPHQIHLGELHAILRRQEDFYPFLKDNREKIEKILTFRIPYYVGPLARGNSRFAWMTRKSEETITPWNFEEVVDKGASAQSFIERMTNFDKNLPNEKVLPKHSLLYEYFTVYNELTKVKYVTEGMRKPAFLSGEQKKAIVDLLFKTNRKVTVKQLKEDYFKKIECFDSVEISGVEDRFNASLGTYHDLLKIIKDKDFLDNEENEDILEDIVLTLTLFEDREMIEERLKTYAHLFDDKVMKQLKRRRYTGWGRLSRKLINGIRDKQSGKTILDFLKSDGFANRNFMQLIHDDSLTFKEDIQKAQVSGQGDSLHEHIANLAGSPAIKKGILQTVKVVDELVKVMGRHKPENIVIEMARENQTTQKGQKNSRERMKRIEEGIKELGSQILKEHPVENTQLQNEKLYLYYLQNGRDMYVDQELDINRLSDYDVDHIVPQSFLKDDSIDNKVLTRSDKARGKSDNVPSEEVVKKMKNYWRQLLNAKLITQRKFDNLTKAERGGLSELDKAGFIKRQLVETRQITKHVAQILDSRMNTKYDENDKLIREVKVITLKSKLVSDFRKDFQFYKVREINNYHHAHDAYLNAVVGTALIKKYPKLESEFVYGDYKVYDVRKMIAKSEQEIGKATAKYFFYSNIMNFFKTEITLANGEIRKRPLIETNGETGEIVWDKGRDFATVRKVLSMPQVNIVKKTEVQTGGFSKESILPKRNSDKLIARKKDWDPKKYGGFDSPTVAYSVLVVAKVEKGKSKKLKSVKELLGITIMERSSFEKNPIDFLEAKGYKEVKKDLIIKLPKYSLFELENGRKRMLASAGELQKGNELALPSKYVNFLYLASHYEKLKGSPEDNEQKQLFVEQHKHYLDEIIEQISEFSKRVILADANLDKVLSAYNKHRDKPIREQAENIIHLFTLTNLGAPAAFKYFDTTIDRKRYTSTKEVLDATLIHQSITGLYETRIDLSQLGGDGGGGSGGSGGSGGTLNIEDEHRLHETSKEPDVSLGSTWLSDFPQAWAETGGMGLAVRQAPLIIPLKATSTPVSIKQYPMSQEARLGIKPHIQRLLDQGILVPCQSPWNTPLLPVKKPGTNDYRPVQDLREVNKRVEDIHPTVPNPYNLLSGLPPSHQWYTVLDLKDAFFCLRLHPTSQPLFAFEWRDPEMGISGQLTWTRLPQGFKNSPTLFDEALHRDLADFRIQHPDLILLQYVDDLLLAATSELDCQQGTRALLQTLGNLGYRASAKKAQICQKQVKYLGYLLKEGQRWLTEARKETVMGQPTPKTPRQLREFLGTAGFCRLWIPGFAEMAAPLYPLTKTGTLFNWGPDQQKAYQEIKQALLTAPALGLPDLTKPFELFVDEKQGYAKGVLTQKLGPWRRPVAYLSKKLDPVAAGWPPCLRMVAAIAVLTKDAGKLTMGQPLVILAPHAVEALVKQPPDRWLSNARMTHYQALLLDTDRVQFGPVVALNPATLLPLPEEGLQHNCLDILAEAHGTRPDLTDQPLPDADHTWYTDGSSLLQEGQRKAGAAVTTETEVIWAKALPAGTSAQRAELIALTQALKMAEGKKLNVYTDSRYAFATAHIHGEIYRRRGLLTSEGKEIKNKDEILALLKALFLPKRLSIIHCPGHQKGHSAEARGNRMADQAARKAAITETPDTSTLLAGKRTADGSEFEKRTADGSEFESPKKKAKVE

SEQ ID NO: 6043 - protein, 2094 aa, synthetic construct; identical to SEQ ID NO: 6041

SEQ ID NO: 6044 - protein, 2092 aa, synthetic construct
MPAAKRVKLDGGDKKYSIGLDIGTNSVGWAVITDEYKVPSKKFKVLGNTDRHSIKKNLIGALLFDSGETAEATRLKRTARRRYTRRKNRICYLQEIFSNEMAKVDDSFFHRLEESFLVEEDKKHERHPIFGNIVDEVAYHEKYPTIYHLRKKLVDSTDKADLRLIYLALAHMIKFRGHFLIEGDLNPDNSDVDKLFIQLVQTYNQLFEENPINASGVDAKAILSARLSKSRRLENLIAQLPGEKKNGLFGNLIALSLGLTPNFKSNFDLAEDAKLQLSKDTYDDDLDNLLAQIGDQYADLFLAAKNLSDAILLSDILRVNTEITKAPLSASMIKRYDEHHQDLTLLKALVRQQLPEKYKEIFFDQSKNGYAGYIDGGASQEEFYKFIKPILEKMDGTEELLVKLNREDLLRKQRTFDNGSIPHQIHLGELHAILRRQEDFYPFLKDNREKIEKILTFRIPYYVGPLARGNSRFAWMTRKSEETITPWNFEEVVDKGASAQSFIERMTNFDKNLPNEKVLPKHSLLYEYFTVYNELTKVKYVTEGMRKPAFLSGEQKKAIVDLLFKTNRKVTVKQLKEDYFKKIECFDSVEISGVEDRFNASLGTYHDLLKIIKDKDFLDNEENEDILEDIVLTLTLFEDREMIEERLKTYAHLFDDKVMKQLKRRRYTGWGRLSRKLINGIRDKQSGKTILDFLKSDGFANRNFMQLIHDDSLTFKEDIQKAQVSGQGDSLHEHIANLAGSPAIKKGILQTVKVVDELVKVMGRHKPENIVIEMARENQTTQKGQKNSRERMKRIEEGIKELGSQILKEHPVENTQLQNEKLYLYYLQNGRDMYVDQELDINRLSDYDVDHIVPQSFLKDDSIDNKVLTRSDKARGKSDNVPSEEVVKKMKNYWRQLLNAKLITQRKFDNLTKAERGGLSELDKAGFIKRQLVETRQITKHVAQILDSRMNTKYDENDKLIREVKVITLKSKLVSDFRKDFQFYKVREINNYHHAHDAYLNAVVGTALIKKYPKLESEFVYGDYKVYDVRKMIAKSEQEIGKATAKYFFYSNIMNFFKTEITLANGEIRKRPLIETNGETGEIVWDKGRDFATVRKVLSMPQVNIVKKTEVQTGGFSKESILPKRNSDKLIARKKDWDPKKYGGFDSPTVAYSVLVVAKVEKGKSKKLKSVKELLGITIMERSSFEKNPIDFLEAKGYKEVKKDLIIKLPKYSLFELENGRKRMLASAGELQKGNELALPSKYVNFLYLASHYEKLKGSPEDNEQKQLFVEQHKHYLDEIIEQISEFSKRVILADANLDKVLSAYNKHRDKPIREQAENIIHLFTLTNLGAPAAFKYFDTTIDRKRYTSTKEVLDATLIHQSITGLYETRIDLSQLGGDGGGGSGGSGGSGGVLNLEEEYRLHEKPVPSSIDPSWLQLFPTVWAERAGMGLANQVPPVVVELRSGASPVAVRQYPMSKEAREGIRPHIQRFLDLGVLVPCQSPWNTPLLPVKKPGTNDYRPVQDLREINKRVQDIHPTVPNPYNLLSSLPPSHTWYSVLDLKDAFFCLKLHPNSQPLFAFEWRDPEKGNTGQLTWTRLPQGFKNSPTLFDEALHRDLAPFRALNPQVVLLQYVDDLLVAAPTYRDCKEGTQKLLQELSKLGYRVSAKKAQLCQKEVTYLGYLLKEGKRWLTPARKATVMKIPPPTTPRQVREFLGTAGFCRLWIPGFASLAAPLYPLTKESIPFIWTEEHQKAFDRIKEALLSAPALALPDLTKPFTLYVDERAGVARGVLTQTLGPWRRPVAYLSKKLDPVASGWPTCLKAVAAVALLLKDADKLTLGQNVTVIASHSLESIVRQPPDRWMTNARMTHYQSLLLNERVSFAPPAVLNPATLLPVESEATPVHRCSEILAEETGTRRDLKDQPLPGVPAWYTDGSSFIAEGKRRAGAAIVDGKRTVWASSLPEGTSAQKAELVALTQALRLAEGKDINIYTDSRYAFATAHIHGAIYKQRGLLTSAGKDIKNKEEILALLEAIHLPKRVAIIHCPGHQKGNDPVATGNRRADEAAKQAALSTRVLAETTKPAGKRTADGSEFEKRTADGSEFESPKKKAKVE

SEQ ID NO: 6045 - protein, 2099 aa, synthetic construct
MPAAKRVKLDGGDKKYSIGLDIGTNSVGWAVITDEYKVPSKKFKVLGNTDRHSIKKNLIGALLFDSGETAEATRLKRTARRRYTRRKNRICYLQEIFSNEMAKVDDSFFHRLEESFLVEEDKKHERHPIFGNIVDEVAYHEKYPTIYHLRKKLVDSTDKADLRLIYLALAHMIKFRGHFLIEGDLNPDNSDVDKLFIQLVQTYNQLFEENPINASGVDAKAILSARLSKSRRLENLIAQLPGEKKNGLFGNLIALSLGLTPNFKSNFDLAEDAKLQLSKDTYDDDLDNLLAQIGDQYADLFLAAKNLSDAILLSDILRVNTEITKAPLSASMIKRYDEHHQDLTLLKALVRQQLPEKYKEIFFDQSKNGYAGYIDGGASQEEFYKFIKPILEKMDGTEELLVKLNREDLLRKQRTFDNGSIPHQIHLGELHAILRRQEDFYPFLKDNREKIEKILTFRIPYYVGPLARGNSRFAWMTRKSEETITPWNFEEVVDKGASAQSFIERMTNFDKNLPNEKVLPKHSLLYEYFTVYNELTKVKYVTEGMRKPAFLSGEQKKAIVDLLFKTNRKVTVKQLKEDYFKKIECFDSVEISGVEDRFNASLGTYHDLLKIIKDKDFLDNEENEDILEDIVLTLTLFEDREMIEERLKTYAHLFDDKVMKQLKRRRYTGWGRLSRKLINGIRDKQSGKTILDFLKSDGFANRNFMQLIHDDSLTFKEDIQKAQVSGQGDSLHEHIANLAGSPAIKKGILQTVKVVDELVKVMGRHKPENIVIEMARENQTTQKGQKNSRERMKRIEEGIKELGSQILKEHPVENTQLQNEKLYLYYLQNGRDMYVDQELDINRLSDYDVDHIVPQSFLKDDSIDNKVLTRSDKARGKSDNVPSEEVVKKMKNYWRQLLNAKLITQRKFDNLTKAERGGLSELDKAGFIKRQLVETRQITKHVAQILDSRMNTKYDENDKLIREVKVITLKSKLVSDFRKDFQFYKVREINNYHHAHDAYLNAVVGTALIKKYPKLESEFVYGDYKVYDVRKMIAKSEQEIGKATAKYFFYSNIMNFFKTEITLANGEIRKRPLIETNGETGEIVWDKGRDFATVRKVLSMPQVNIVKKTEVQTGGFSKESILPKRNSDKLIARKKDWDPKKYGGFDSPTVAYSVLVVAKVEKGKSKKLKSVKELLGITIMERSSFEKNPIDFLEAKGYKEVKKDLIIKLPKYSLFELENGRKRMLASAGELQKGNELALPSKYVNFLYLASHYEKLKGSPEDNEQKQLFVEQHKHYLDEIIEQISEFSKRVILADANLDKVLSAYNKHRDKPIREQAENIIHLFTLTNLGAPAAFKYFDTTIDRKRYTSTKEVLDATLIHQSITGLYETRIDLSQLGGDGGGGSGGSGGSGGSGGTAPLEEEYRLFLEAPIQNVTLLEQWKREIPKVWAEINPPGLASTQAPIHVQLLSTALPVRVRQYPITLEAKRSLRETIRKFRAAGILRPVHSPWNTPLLPVRKSGTSEYRMVQDLREVNKRVETIHPTVPNPYTLLSLLPPDRIWYSVLDLKDAFFCIPLAPESQLIFAFEWADAEEGESGQLTWTRLPQGFKNSPTLFNEALNRDLQGFRLDHPSVSLLQYVDDLLIAADTQAACLSATRDLLMTLAELGYRVSGKKAQLCQEEVTYLGFKIHKGSRSLSNSRTQAILQIPVPKTKRQVREFLGTIGYCRLWIPGFAELAQPLYAATRPGNDPLVWGEKEEEAFQSLKLALTQPPALALPSLDKPFQLFVEETSGAAKGVLTQALGPWKRPVAYLSKRLDPVAAGWPRCLRAIAAAALLTREASKLTFGQDIEITSSHNLESLLRSPPDKWLTNARITQYQVLLLDPPRVRFKQTAALNPATLLPETDDTLPIHHCLDTLDSLTSTRPDLTDQPLAQAEATLFTDGSSYIRDGKRYAGAAVVTLDSVIWAEPLPIGTSAQKAELIALTKALEWSKDKSVNIYTDSRYAFATLHVHGMIYRERGWLTAGGKAIKNAPEILALLTAVWLPKRVAVMHCKGHQKDDAPTSTGNRRADEVAREVAIRPLSTQATISAGKRTADGSEFEKRTADGSEFESPKKKAKVE

SEQ ID NO: 6046 - protein, 2103 aa, synthetic construct
MPAAKRVKLDGGDKKYSIGLDIGTNSVGWAVITDEYKVPSKKFKVLGNTDRHSIKKNLIGALLFDSGETAEATRLKRTARRRYTRRKNRICYLQEIFSNEMAKVDDSFFHRLEESFLVEEDKKHERHPIFGNIVDEVAYHEKYPTIYHLRKKLVDSTDKADLRLIYLALAHMIKFRGHFLIEGDLNPDNSDVDKLFIQLVQTYNQLFEENPINASGVDAKAILSARLSKSRRLENLIAQLPGEKKNGLFGNLIALSLGLTPNFKSNFDLAEDAKLQLSKDTYDDDLDNLLAQIGDQYADLFLAAKNLSDAILLSDILRVNTEITKAPLSASMIKRYDEHHQDLTLLKALVRQQLPEKYKEIFFDQSKNGYAGYIDGGASQEEFYKFIKPILEKMDGTEELLVKLNREDLLRKQRTFDNGSIPHQIHLGELHAILRRQEDFYPFLKDNREKIEKILTFRIPYYVGPLARGNSRFAWMTRKSEETITPWNFEEVVDKGASAQSFIERMTNFDKNLPNEKVLPKHSLLYEYFTVYNELTKVKYVTEGMRKPAFLSGEQKKAIVDLLFKTNRKVTVKQLKEDYFKKIECFDSVEISGVEDRFNASLGTYHDLLKIIKDKDFLDNEENEDILEDIVLTLTLFEDREMIEERLKTYAHLFDDKVMKQLKRRRYTGWGRLSRKLINGIRDKQSGKTILDFLKSDGFANRNFMQLIHDDSLTFKEDIQKAQVSGQGDSLHEHIANLAGSPAIKKGILQTVKVVDELVKVMGRHKPENIVIEMARENQTTQKGQKNSRERMKRIEEGIKELGSQILKEHPVENTQLQNEKLYLYYLQNGRDMYVDQELDINRLSDYDVDHIVPQSFLKDDSIDNKVLTRSDKARGKSDNVPSEEVVKKMKNYWRQLLNAKLITQRKFDNLTKAERGGLSELDKAGFIKRQLVETRQITKHVAQILDSRMNTKYDENDKLIREVKVITLKSKLVSDFRKDFQFYKVREINNYHHAHDAYLNAVVGTALIKKYPKLESEFVYGDYKVYDVRKMIAKSEQEIGKATAKYFFYSNIMNFFKTEITLANGEIRKRPLIETNGETGEIVWDKGRDFATVRKVLSMPQVNIVKKTEVQTGGFSKESILPKRNSDKLIARKKDWDPKKYGGFDSPTVAYSVLVVAKVEKGKSKKLKSVKELLGITIMERSSFEKNPIDFLEAKGYKEVKKDLIIKLPKYSLFELENGRKRMLASAGELQKGNELALPSKYVNFLYLASHYEKLKGSPEDNEQKQLFVEQHKHYLDEIIEQISEFSKRVILADANLDKVLSAYNKHRDKPIREQAENIIHLFTLTNLGAPAAFKYFDTTIDRKRYTSTKEVLDATLIHQSITGLYETRIDLSQLGGDGGGGSGGSGGSGGSGGTVSLQDEHRLFDIPVTTSLPDVWLQDFPQAWAETGGLGRAKCQAPIIIDLKPTAVPVSIKQYPMSLEAHMGIRQHIIKFLELGVLRPCRSPWNTPLLPVKKPGTQDYRPVQDLREINKRTVDIHPTVPNPYNLLSTLKPDYSWYTVLDLKDAFFCLPLAPQSQELFAFEWKDPERGISGQLTWTRLPQGFKNSPTLFNEALHRDLTDFRTQHPEVTLLQYVDDLLLAAPTKKACTQGTRHLLQELGEKGYRASAKKAQICQTKVTYLGYILSEGKRWLTPGRIETVARIPPPRNPREVREFLGTAGFCRLWIPGFAELAAPLYALTKPSTPFTWQTEHQLAFEALKKALLSAPALGLPDTSKPFTLFLDERQGIAKGVLTQKLGPWKRPVAYLSKKLDPVAAGWPPCLRIMAATAMLVKDSAKLTLGQPLTVITPHTLEAIVRQPPDRWITNARLTHYQALLLDTDRVQFGPPVTLNPATLLPVPENQPSPHDCRQVLAETHGTREDLKDQELPDADHTWYTDGSSYLDSGTRRAGAAVVDGHNTIWAQSLPPGTSAQKAELIALTKALELSKGKKANIYTDSRYAFATAHTHGSIYERRGWLTSEGKEIKNKAEIIALLKALFLPQEVAIIHCPGHQKGQDPVAVGNRQADRVARQAAMAEVLTLATEPDNTSHITAGKRTADGSEFEKRTADGSEFESPKKKAKVE

SEQ ID NO: 6047 - protein, 2088 aa, synthetic construct
MPAAKRVKLDGGDKKYSIGLDIGTNSVGWAVITDEYKVPSKKFKVLGNTDRHSIKKNLIGALLFDSGETAEATRLKRTARRRYTRRKNRICYLQEIFSNEMAKVDDSFFHRLEESFLVEEDKKHERHPIFGNIVDEVAYHEKYPTIYHLRKKLVDSTDKADLRLIYLALAHMIKFRGHFLIEGDLNPDNSDVDKLFIQLVQTYNQLFEENPINASGVDAKAILSARLSKSRRLENLIAQLPGEKKNGLFGNLIALSLGLTPNFKSNFDLAEDAKLQLSKDTYDDDLDNLLAQIGDQYADLFLAAKNLSDAILLSDILRVNTEITKAPLSASMIKRYDEHHQDLTLLKALVRQQLPEKYKEIFFDQSKNGYAGYIDGGASQEEFYKFIKPILEKMDGTEELLVKLNREDLLRKQRTFDNGSIPHQIHLGELHAILRRQEDFYPFLKDNREKIEKILTFRIPYYVGPLARGNSRFAWMTRKSEETITPWNFEEVVDKGASAQSFIERMTNFDKNLPNEKVLPKHSLLYEYFTVYNELTKVKYVTEGMRKPAFLSGEQKKAIVDLLFKTNRKVTVKQLKEDYFKKIECFDSVEISGVEDRFNASLGTYHDLLKIIKDKDFLDNEENEDILEDIVLTLTLFEDREMIEERLKTYAHLFDDKVMKQLKRRRYTGWGRLSRKLINGIRDKQSGKTILDFLKSDGFANRNFMQLIHDDSLTFKEDIQKAQVSGQGDSLHEHIANLAGSPAIKKGILQTVKVVDELVKVMGRHKPENIVIEMARENQTTQKGQKNSRERMKRIEEGIKELGSQILKEHPVENTQLQNEKLYLYYLQNGRDMYVDQELDINRLSDYDVDHIVPQSFLKDDSIDNKVLTRSDKARGKSDNVPSEEVVKKMKNYWRQLLNAKLITQRKFDNLTKAERGGLSELDKAGFIKRQLVETRQITKHVAQILDSRMNTKYDENDKLIREVKVITLKSKLVSDFRKDFQFYKVREINNYHHAHDAYLNAVVGTALIKKYPKLESEFVYGDYKVYDVRKMIAKSEQEIGKATAKYFFYSNIMNFFKTEITLANGEIRKRPLIETNGETGEIVWDKGRDFATVRKVLSMPQVNIVKKTEVQTGGFSKESILPKRNSDKLIARKKDWDPKKYGGFDSPTVAYSVLVVAKVEKGKSKKLKSVKELLGITIMERSSFEKNPIDFLEAKGYKEVKKDLIIKLPKYSLFELENGRKRMLASAGELQKGNELALPSKYVNFLYLASHYEKLKGSPEDNEQKQLFVEQHKHYLDEIIEQISEFSKRVILADANLDKVLSAYNKHRDKPIREQAENIIHLFTLTNLGAPAAFKYFDTTIDRKRYTSTKEVLDATLIHQSITGLYETRIDLSQLGGDGGGGSGGSGGSGGSGGVPWLTQQPLQLTILVPLQEYQEKILSKTALPEDQKQQLKTLFVKYDNLWQHWENQVGHRKIRPHNIATGDYPPRPQKQYPINPKAKPSIQIVIDDLLKQGVLTPQNSTMNTPVYPVPKPDGRWRMVLDYREVNKTIPLTAAQNQHSAGILATIVRQKYKTTLDLANGFWAHPITPESYWLTAFTWQGKQYCWTRLPQGFLNSPALFTADVVDLLKEIPNVQVYVDDIYLSHDDPKEHVQQLEKVFQILLQAGYVVSLKKSEIGQKTVEFLGFNITKEGRGLTDTFKTKLLNITPPKDLKQLQSILGLLNFARNFIPNFAELVQPLYNLIASAKGKYIEWSEENTKQLNMVIEALNTASNLEERLPEQRLVIKVNTSPSAGYVRYYNETGKKPIMYLNYVFSKAELKFSMLEKLLTTMHKALIKAMDLAMGQEILVYSPIVSMTKIQKTPLPERKALPIRWITWMTYLEDPRIQFHYDKTLPELKHIPDVYTSSQSPVKHPSQYEGVFYTDGSAIKSPDPTKSNNAGMGIVHATYKPEYQVLNQWSIPLGNHTAQMAEIAAVEFACKKALKIPGPVLVITDSFYVAESANKELPYWKSNGFVNNKKKPLKHISKWKSIAECLSMKPDITIQHEKGISLQIPVFILKGNALADKLATQGSYVVNAGKRTADGSEFEKRTADGSEFESPKKKAKVE

SEQ ID NO: 6048 - protein, 2128 aa, synthetic construct
MPAAKRVKLDGGDKKYSIGLDIGTNSVGWAVITDEYKVPSKKFKVLGNTDRHSIKKNLIGALLFDSGETAEATRLKRTARRRYTRRKNRICYLQEIFSNEMAKVDDSFFHRLEESFLVEEDKKHERHPIFGNIVDEVAYHEKYPTIYHLRKKLVDSTDKADLRLIYLALAHMIKFRGHFLIEGDLNPDNSDVDKLFIQLVQTYNQLFEENPINASGVDAKAILSARLSKSRRLENLIAQLPGEKKNGLFGNLIALSLGLTPNFKSNFDLAEDAKLQLSKDTYDDDLDNLLAQIGDQYADLFLAAKNLSDAILLSDILRVNTEITKAPLSASMIKRYDEHHQDLTLLKALVRQQLPEKYKEIFFDQSKNGYAGYIDGGASQEEFYKFIKPILEKMDGTEELLVKLNREDLLRKQRTFDNGSIPHQIHLGELHAILRRQEDFYPFLKDNREKIEKILTFRIPYYVGPLARGNSRFAWMTRKSEETITPWNFEEVVDKGASAQSFIERMTNFDKNLPNEKVLPKHSLLYEYFTVYNELTKVKYVTEGMRKPAFLSGEQKKAIVDLLFKTNRKVTVKQLKEDYFKKIECFDSVEISGVEDRFNASLGTYHDLLKIIKDKDFLDNEENEDILEDIVLTLTLFEDREMIEERLKTYAHLFDDKVMKQLKRRRYTGWGRLSRKLINGIRDKQSGKTILDFLKSDGFANRNFMQLIHDDSLTFKEDIQKAQVSGQGDSLHEHIANLAGSPAIKKGILQTVKVVDELVKVMGRHKPENIVIEMARENQTTQKGQKNSRERMKRIEEGIKELGSQILKEHPVENTQLQNEKLYLYYLQNGRDMYVDQELDINRLSDYDVDHIVPQSFLKDDSIDNKVLTRSDKARGKSDNVPSEEVVKKMKNYWRQLLNAKLITQRKFDNLTKAERGGLSELDKAGFIKRQLVETRQITKHVAQILDSRMNTKYDENDKLIREVKVITLKSKLVSDFRKDFQFYKVREINNYHHAHDAYLNAVVGTALIKKYPKLESEFVYGDYKVYDVRKMIAKSEQEIGKATAKYFFYSNIMNFFKTEITLANGEIRKRPLIETNGETGEIVWDKGRDFATVRKVLSMPQVNIVKKTEVQTGGFSKESILPKRNSDKLIARKKDWDPKKYGGFDSPTVAYSVLVVAKVEKGKSKKLKSVKELLGITIMERSSFEKNPIDFLEAKGYKEVKKDLIIKLPKYSLFELENGRKRMLASAGELQKGNELALPSKYVNFLYLASHYEKLKGSPEDNEQKQLFVEQHKHYLDEIIEQISEFSKRVILADANLDKVLSAYNKHRDKPIREQAENIIHLFTLTNLGAPAAFKYFDTTIDRKRYTSTKEVLDATLIHQSITGLYETRIDLSQLGGDGGGGSGGSGGSGGSGGLLGRDLLTKLKAQIQFSTEGPQVTWEDRPAMCLVLNLEEEYRLHEKPVPPSIDPSWLQLFPMVWAEKAGMGLANQVPPVVVELKSDASPVAVRQYPMSKEAREGIRPHIQRFLDLGILVPCQSPWNTPLLPVKKPGTNDYRPVQDLREVNKRVQDIHPTVPNPYNLLSSLPPSHTWYSVLDLKDAFFCLKLHPNSQPLFAFEWRDPEKGNTGQLTWTRLPQGFKNSPTLFNEALHRDLASFRALNPQVVMLQYVDDLLVAAPTYRDCKEGTRRLLQELSKLGYRVSAKKAQLCREEVTYLGYLLKGGKRWLTPARKATVMKIPTPTTPRQVREFLGTAGFCRLWIPGFASLAAPLYPLTRPKVPFTWTEAHQEAFGRIKEALLSAPALALPDLTKPFALYVDEKEGVARGVLTQTLGPWRRPVAYLSKKLDPVASGWPTCLKAIAAVALLLKDADKLTLGQNVLVIAPHNLESIVRQPPDRWMTNARMTHYQSLLLNERVSFAPPAILNPATLLPVESDDTPIHICSEILAEETGTRPDLRDQPLPGVPAWYTDGSSFIMDGRRQAGAAIVDNKRTVWASNLPEGTSAQKAELIALTQALRLAEGKSINIYTDSRYAFATAHVHGAIYKQRGWLTSAGKDIKNKEEILALLEAIHLPKRVAIIHCPGHQRGTDPVATGNRKADEAAKQAAQSTRILTETTKNAGKRTADGSEFEKRTADGSEFESPKKKAKVE

SEQ ID NO: 6049 - protein, 2219 aa, synthetic construct
MPAAKRVKLDGGDKKYSIGLDIGTNSVGWAVITDEYKVPSKKFKVLGNTDRHSIKKNLIGALLFDSGETAEATRLKRTARRRYTRRKNRICYLQEIFSNEMAKVDDSFFHRLEESFLVEEDKKHERHPIFGNIVDEVAYHEKYPTIYHLRKKLVDSTDKADLRLIYLALAHMIKFRGHFLIEGDLNPDNSDVDKLFIQLVQTYNQLFEENPINASGVDAKAILSARLSKSRRLENLIAQLPGEKKNGLFGNLIALSLGLTPNFKSNFDLAEDAKLQLSKDTYDDDLDNLLAQIGDQYADLFLAAKNLSDAILLSDILRVNTEITKAPLSASMIKRYDEHHQDLTLLKALVRQQLPEKYKEIFFDQSKNGYAGYIDGGASQEEFYKFIKPILEKMDGTEELLVKLNREDLLRKQRTFDNGSIPHQIHLGELHAILRRQEDFYPFLKDNREKIEKILTFRIPYYVGPLARGNSRFAWMTRKSEETITPWNFEEVVDKGASAQSFIERMTNFDKNLPNEKVLPKHSLLYEYFTVYNELTKVKYVTEGMRKPAFLSGEQKKAIVDLLFKTNRKVTVKQLKEDYFKKIECFDSVEISGVEDRFNASLGTYHDLLKIIKDKDFLDNEENEDILEDIVLTLTLFEDREMIEERLKTYAHLFDDKVMKQLKRRRYTGWGRLSRKLINGIRDKQSGKTILDFLKSDGFANRNFMQLIHDDSLTFKEDIQKAQVSGQGDSLHEHIANLAGSPAIKKGILQTVKVVDELVKVMGRHKPENIVIEMARENQTTQKGQKNSRERMKRIEEGIKELGSQILKEHPVENTQLQNEKLYLYYLQNGRDMYVDQELDINRLSDYDVDHIVPQSFLKDDSIDNKVLTRSDKARGKSDNVPSEEVVKKMKNYWRQLLNAKLITQRKFDNLTKAERGGLSELDKAGFIKRQLVETRQITKHVAQILDSRMNTKYDENDKLIREVKVITLKSKLVSDFRKDFQFYKVREINNYHHAHDAYLNAVVGTALIKKYPKLESEFVYGDYKVYDVRKMIAKSEQEIGKATAKYFFYSNIMNFFKTEITLANGEIRKRPLIETNGETGEIVWDKGRDFATVRKVLSMPQVNIVKKTEVQTGGFSKESILPKRNSDKLIARKKDWDPKKYGGFDSPTVAYSVLVVAKVEKGKSKKLKSVKELLGITIMERSSFEKNPIDFLEAKGYKEVKKDLIIKLPKYSLFELENGRKRMLASAGELQKGNELALPSKYVNFLYLASHYEKLKGSPEDNEQKQLFVEQHKHYLDEIIEQISEFSKRVILADANLDKVLSAYNKHRDKPIREQAENIIHLFTLTNLGAPAAFKYFDTTIDRKRYTSTKEVLDATLIHQSITGLYETRIDLSQLGGDGGGGSGGSGGSGGSGGTLGDQGSRGSDPLPEPRVTLTVEGIPTEFLVNTGAEHSVLTKPMGKMGSKRTVVAGATGSKVYPWTTKRLLKIGQKQVTHSFLVIPECPAPLLGRDLLTKLKAQIQFSTEGPQVTWEDRPAMCLVLNLEEEYRLHEKPVPPSIDPSWLQLFPMVWAEKAGMGLANQVPPVVVELKSDASPVAVRQYPMSKEAREGIRPHIQRFLDLGILVPCQSPWNTPLLPVKKPGTNDYRPVQDLREVNKRVQDIHPTVPNPYNLLSSLPPSHTWYSVLDLKDAFFCLKLHPNSQPLFAFEWRDPEKGNTGQLTWTRLPQGFKNSPTLFNEALHRDLASFRALNPQVVMLQYVDDLLVAAPTYRDCKEGTRRLLQELSKLGYRVSAKKAQLCREEVTYLGYLLKGGKRWLTPARKATVMKIPTPTTPRQVREFLGKAGFCRLFIPGFASLAAPLYPLTRPKVPFTWTEAHQEAFGRIKEALLSAPALALPDLTKPFALYVDEKEGVARGVLTQTLGPWRRPVAYLSKKLDPVASGWPTCLKAIAAVALLLKDADKLTLGQNVLVIAPHNLESIVRQPPDRWMTNARMTHYQSLLLNERVSFAPPAILNPATLLPVESDDTPIHICSEILAEETGTRPDLRDQPLPGVPAWYTDGSSFIMDGRRQAGAAIVDNKRTVWASNLPEGTSAQKAELIALTQALRLAEGKSINIYTDSRYAFATAHVHGAIYKQRGWLTSAGKDIKNKEEILALLEAIHLPKRVAIIHCPGHQRGTDPVATGNRKADEAAKQAAQSTRILTETTKNAGKRTADGSEFEKRTADGSEFESPKKKAKVE

SEQ ID NO: 6050 - protein, 2097 aa, synthetic construct
MPAAKRVKLDGGDKKYSIGLDIGTNSVGWAVITDEYKVPSKKFKVLGNTDRHSIKKNLIGALLFDSGETAEATRLKRTARRRYTRRKNRICYLQEIFSNEMAKVDDSFFHRLEESFLVEEDKKHERHPIFGNIVDEVAYHEKYPTIYHLRKKLVDSTDKADLRLIYLALAHMIKFRGHFLIEGDLNPDNSDVDKLFIQLVQTYNQLFEENPINASGVDAKAILSARLSKSRRLENLIAQLPGEKKNGLFGNLIALSLGLTPNFKSNFDLAEDAKLQLSKDTYDDDLDNLLAQIGDQYADLFLAAKNLSDAILLSDILRVNTEITKAPLSASMIKRYDEHHQDLTLLKALVRQQLPEKYKEIFFDQSKNGYAGYIDGGASQEEFYKFIKPILEKMDGTEELLVKLNREDLLRKQRTFDNGSIPHQIHLGELHAILRRQEDFYPFLKDNREKIEKILTFRIPYYVGPLARGNSRFAWMTRKSEETITPWNFEEVVDKGASAQSFIERMTNFDKNLPNEKVLPKHSLLYEYFTVYNELTKVKYVTEGMRKPAFLSGEQKKAIVDLLFKTNRKVTVKQLKEDYFKKIECFDSVEISGVEDRFNASLGTYHDLLKIIKDKDFLDNEENEDILEDIVLTLTLFEDREMIEERLKTYAHLFDDKVMKQLKRRRYTGWGRLSRKLINGIRDKQSGKTILDFLKSDGFANRNFMQLIHDDSLTFKEDIQKAQVSGQGDSLHEHIANLAGSPAIKKGILQTVKVVDELVKVMGRHKPENIVIEMARENQTTQKGQKNSRERMKRIEEGIKELGSQILKEHPVENTQLQNEKLYLYYLQNGRDMYVDQELDINRLSDYDVDHIVPQSFLKDDSIDNKVLTRSDKARGKSDNVPSEEVVKKMKNYWRQLLNAKLITQRKFDNLTKAERGGLSELDKAGFIKRQLVETRQITKHVAQILDSRMNTKYDENDKLIREVKVITLKSKLVSDFRKDFQFYKVREINNYHHAHDAYLNAVVGTALIKKYPKLESEFVYGDYKVYDVRKMIAKSEQEIGKATAKYFFYSNIMNFFKTEITLANGEIRKRPLIETNGETGEIVWDKGRDFATVRKVLSMPQVNIVKKTEVQTGGFSKESILPKRNSDKLIARKKDWDPKKYGGFDSPTVAYSVLVVAKVEKGKSKKLKSVKELLGITIMERSSFEKNPIDFLEAKGYKEVKKDLIIKLPKYSLFELENGRKRMLASAGELQKGNELALPSKYVNFLYLASHYEKLKGSPEDNEQKQLFVEQHKHYLDEIIEQISEFSKRVILADANLDKVLSAYNKHRDKPIREQAENIIHLFTLTNLGAPAAFKYFDTTIDRKRYTSTKEVLDATLIHQSITGLYETRIDLSQLGGDGGGGSGGSGGSGGSGGTLNIEDEYRLHETSKGPDVPLGSTWLSDFPQAWAETGGMGLAVRQAPLIIPLKATSTPVSIKQYPMSQEARLGIKPHIQRLLDQGILVPCQSPWNTPLLPVKKPGTNDYRPVQDLREVNKRVEDIHPTVPNPYNLLSGLPPSHQWYTVLDLKDAFFCLRLHPTSQSLFAFEWRDPEMGISGQLTWTRLPQGFKNSPTLFNEALHRDLADFRIQHPDLILLQYVDDLLLAATSELDCQQGTRALLQTLGDLGYRASAKKAQICQKQVKYLGYLLKEGQRWLTEARKETVMGQPTPKTPRQLREFLGTAGFCRLWIPGFAEMAAPLYPLTKPGTLFEWGPDQQKAYQEIKQALLTAPALGLPDLTKPFELFVDEKQGYAKGVLTQKLGPWRRPVAYLSKKLDPVAAGWPPCLRMVAAIAVLTKDAGKLTMGQPLVILAPHAVEALVKQPPDRWLSNARMTHYQALLLDTDRVQFGPIVALNPATLLPLPEEGLQHDCLDILAEAHGTRPDLTDQPLPDADHTWYTDGSSFLQEGQRKAGAAVTTETEVVWAKALPAGTSAQRAELIALTQALKMAEGKKLNVYTDSRYAFATAHIHGEIYRRRGWLTSEGKEIKNKDEILALLKALFLPKRLSIIHCPGHQKGNRAEARGNRMADQAAREVATRETPETSTLLAGKRTADGSEFEKRTADGSEFESPKKKAKVE

SEQ ID NO: 6051 - protein, 2088 aa, synthetic construct
MPAAKRVKLDGGDKKYSIGLDIGTNSVGWAVITDEYKVPSKKFKVLGNTDRHSIKKNLIGALLFDSGETAEATRLKRTARRRYTRRKNRICYLQEIFSNEMAKVDDSFFHRLEESFLVEEDKKHERHPIFGNIVDEVAYHEKYPTIYHLRKKLVDSTDKADLRLIYLALAHMIKFRGHFLIEGDLNPDNSDVDKLFIQLVQTYNQLFEENPINASGVDAKAILSARLSKSRRLENLIAQLPGEKKNGLFGNLIALSLGLTPNFKSNFDLAEDAKLQLSKDTYDDDLDNLLAQIGDQYADLFLAAKNLSDAILLSDILRVNTEITKAPLSASMIKRYDEHHQDLTLLKALVRQQLPEKYKEIFFDQSKNGYAGYIDGGASQEEFYKFIKPILEKMDGTEELLVKLNREDLLRKQRTFDNGSIPHQIHLGELHAILRRQEDFYPFLKDNREKIEKILTFRIPYYVGPLARGNSRFAWMTRKSEETITPWNFEEVVDKGASAQSFIERMTNFDKNLPNEKVLPKHSLLYEYFTVYNELTKVKYVTEGMRKPAFLSGEQKKAIVDLLFKTNRKVTVKQLKEDYFKKIECFDSVEISGVEDRFNASLGTYHDLLKIIKDKDFLDNEENEDILEDIVLTLTLFEDREMIEERLKTYAHLFDDKVMKQLKRRRYTGWGRLSRKLINGIRDKQSGKTILDFLKSDGFANRNFMQLIHDDSLTFKEDIQKAQVSGQGDSLHEHIANLAGSPAIKKGILQTVKVVDELVKVMGRHKPENIVIEMARENQTTQKGQKNSRERMKRIEEGIKELGSQILKEHPVENTQLQNEKLYLYYLQNGRDMYVDQELDINRLSDYDVDHIVPQSFLKDDSIDNKVLTRSDKARGKSDNVPSEEVVKKMKNYWRQLLNAKLITQRKFDNLTKAERGGLSELDKAGFIKRQLVETRQITKHVAQILDSRMNTKYDENDKLIREVKVITLKSKLVSDFRKDFQFYKVREINNYHHAHDAYLNAVVGTALIKKYPKLESEFVYGDYKVYDVRKMIAKSEQEIGKATAKYFFYSNIMNFFKTEITLANGEIRKRPLIETNGETGEIVWDKGRDFATVRKVLSMPQVNIVKKTEVQTGGFSKESILPKRNSDKLIARKKDWDPKKYGGFDSPTVAYSVLVVAKVEKGKSKKLKSVKELLGITIMERSSFEKNPIDFLEAKGYKEVKKDLIIKLPKYSLFELENGRKRMLASAGELQKGNELALPSKYVNFLYLASHYEKLKGSPEDNEQKQLFVEQHKHYLDEIIEQISEFSKRVILADANLDKVLSAYNKHRDKPIREQAENIIHLFTLTNLGAPAAFKYFDTTIDRKRYTSTKEVLDATLIHQSITGLYETRIDLSQLGGDGGGGSGGSGGSGGSGGIPWLMKKPLQLTTLVPLQEYEERLLKQTMLTGSYKEKLQSLFLKYDALWQHWENQVGHRRIKPHHIATGTVNPRPQKQYPINPKAKASIQTVINDLLKQGVLIQQNSIMNTPVYPVPKPDGKWRMVLDYREVNKTIPLIAAQNQHSAGILSSIFRGKYKTTLDLSNGFWAHSITPESYWLTAFTWLGQQYCWTRLPQGFLNSPALFNADVVDLLKEVPNVQVYVDDIYISHDDPREHLEQLEKVFSLLLNAGYVVSLKKSEIAQHEVEFLGFNITKEGRGLTETFKQKLLNITPPRDLKQLQSILGKLNFARNFIPNFSELVKPLYNIIATAPGKYITWTTDNSQQLQNIISMLNSAENLEERNPEVRLIMKVNTSPSAGYIRFYNEFAKRPIMYLNYVYTKAEVKFTNTEKLLTTIHKGLIKALDLGMGQEILVYSPIVSMTKIQKTPLPERKALPIRWITWMSYLEDPRIQFHYDKTLPELQQVPTVTDDIIAKIKHPSEFSMVFYTDGSAIKHPNVNKSHNAGMGIAQVQFKPEFTVINTWSIPLGDHTAQLAEVAAVEFACKKALKIDGPVLIVTDSFYVAESVNKELPYWQSNGFFNNKKKPLKHVSKWKSIADCIQLKPDIIIIHEKGHQPTASTFHTEGNNLADKLATQGSYVVNAGKRTADGSEFEKRTADGSEFESPKKKAKVE

SEQ ID NO: 6052 - protein, 2177 aa, synthetic construct
MPAAKRVKLDGGDKKYSIGLDIGTNSVGWAVITDEYKVPSKKFKVLGNTDRHSIKKNLIGALLFDSGETAEATRLKRTARRRYTRRKNRICYLQEIFSNEMAKVDDSFFHRLEESFLVEEDKKHERHPIFGNIVDEVAYHEKYPTIYHLRKKLVDSTDKADLRLIYLALAHMIKFRGHFLIEGDLNPDNSDVDKLFIQLVQTYNQLFEENPINASGVDAKAILSARLSKSRRLENLIAQLPGEKKNGLFGNLIALSLGLTPNFKSNFDLAEDAKLQLSKDTYDDDLDNLLAQIGDQYADLFLAAKNLSDAILLSDILRVNTEITKAPLSASMIKRYDEHHQDLTLLKALVRQQLPEKYKEIFFDQSKNGYAGYIDGGASQEEFYKFIKPILEKMDGTEELLVKLNREDLLRKQRTFDNGSIPHQIHLGELHAILRRQEDFYPFLKDNREKIEKILTFRIPYYVGPLARGNSRFAWMTRKSEETITPWNFEEVVDKGASAQSFIERMTNFDKNLPNEKVLPKHSLLYEYFTVYNELTKVKYVTEGMRKPAFLSGEQKKAIVDLLFKTNRKVTVKQLKEDYFKKIECFDSVEISGVEDRFNASLGTYHDLLKIIKDKDFLDNEENEDILEDIVLTLTLFEDREMIEERLKTYAHLFDDKVMKQLKRRRYTGWGRLSRKLINGIRDKQSGKTILDFLKSDGFANRNFMQLIHDDSLTFKEDIQKAQVSGQGDSLHEHIANLAGSPAIKKGILQTVKVVDELVKVMGRHKPENIVIEMARENQTTQKGQKNSRERMKRIEEGIKELGSQILKEHPVENTQLQNEKLYLYYLQNGRDMYVDQELDINRLSDYDVDHIVPQSFLKDDSIDNKVLTRSDKARGKSDNVPSEEVVKKMKNYWRQLLNAKLITQRKFDNLTKAERGGLSELDKAGFIKRQLVETRQITKHVAQILDSRMNTKYDENDKLIREVKVITLKSKLVSDFRKDFQFYKVREINNYHHAHDAYLNAVVGTALIKKYPKLESEFVYGDYKVYDVRKMIAKSEQEIGKATAKYFFYSNIMNFFKTEITLANGEIRKRPLIETNGETGEIVWDKGRDFATVRKVLSMPQVNIVKKTEVQTGGFSKESILPKRNSDKLIARKKDWDPKKYGGFDSPTVAYSVLVVAKVEKGKSKKLKSVKELLGITIMERSSFEKNPIDFLEAKGYKEVKKDLIIKLPKYSLFELENGRKRMLASAGELQKGNELALPSKYVNFLYLASHYEKLKGSPEDNEQKQLFVEQHKHYLDEIIEQISEFSKRVILADANLDKVLSAYNKHRDKPIREQAENIIHLFTLTNLGAPAAFKYFDTTIDRKRYTSTKEVLDATLIHQSITGLYETRIDLSQLGGDGGGGSGGSGGSGGSGGMDPLQLLQPLEAEIKGTKLKAHWNSGATITCVPQAFLEEEVPIKNIWIKTIHGEKEQPVYYLTFKIQGRKVEAEVISSPYDYILVSPSDIPWLMKKPLQLTTLVPLQEYEERLLKQTMLTGSYKEKLQSLFLKYDALWQHWENQVGHRRIKPHHIATGTVNPRPQKQYPINPKAKASIQTVINDLLKQGVLIQQNSIMNTPVYPVPKPDGKWRMVLDYREVNKTIPLIAAQNQHSAGILSSIFRGKYKTTLDLSNGFWAHSITPESYWLTAFTWLGQQYCWTRLPQGFLNSPALFNADVVDLLKEVPNVQVYVDDIYISHDDPREHLEQLEKVFSLLLNAGYVVSLKKSEIAQHEVEFLGFNITKEGRGLTETFKQKLLNITPPRDLKQLQSILGKLNFARNFIPNFSELVKPLYNIIATAPGKYITWTTDNSQQLQNIISMLNSAENLEERNPEVRLIMKVNTSPSAGYIRFYNEFAKRPIMYLNYVYTKAEVKFTNTEKLLTTIHKGLIKALDLGMGQEILVYSPIVSMTKIQKTPLPERKALPIRWITWMSYLEDPRIQFHYDKTLPELQQVPTVTDDIIAKIKHPSEFSMVFYTDGSAIKHPNVNKSHNAGMGIAQVQFKPEFTVINTWSIPLGDHTAQLAEVAAVEFACKKALKIDGPVLIVTDSFYVAESVNKELPYWQSNGFFNNKKKPLKHVSKWKSIADCIQLKPDIIIIHEKGHQPTASTFHTEGNNLADKLATQGSYVVNAGKRTADGSEFEKRTADGSEFESPKKKAKVE

SEQ ID NO: 6053 - protein, 2095 aa, synthetic construct
MPAAKRVKLDGGDKKYSIGLDIGTNSVGWAVITDEYKVPSKKFKVLGNTDRHSIKKNLIGALLFDSGETAEATRLKRTARRRYTRRKNRICYLQEIFSNEMAKVDDSFFHRLEESFLVEEDKKHERHPIFGNIVDEVAYHEKYPTIYHLRKKLVDSTDKADLRLIYLALAHMIKFRGHFLIEGDLNPDNSDVDKLFIQLVQTYNQLFEENPINASGVDAKAILSARLSKSRRLENLIAQLPGEKKNGLFGNLIALSLGLTPNFKSNFDLAEDAKLQLSKDTYDDDLDNLLAQIGDQYADLFLAAKNLSDAILLSDILRVNTEITKAPLSASMIKRYDEHHQDLTLLKALVRQQLPEKYKEIFFDQSKNGYAGYIDGGASQEEFYKFIKPILEKMDGTEELLVKLNREDLLRKQRTFDNGSIPHQIHLGELHAILRRQEDFYPFLKDNREKIEKILTFRIPYYVGPLARGNSRFAWMTRKSEETITPWNFEEVVDKGASAQSFIERMTNFDKNLPNEKVLPKHSLLYEYFTVYNELTKVKYVTEGMRKPAFLSGEQKKAIVDLLFKTNRKVTVKQLKEDYFKKIECFDSVEISGVEDRFNASLGTYHDLLKIIKDKDFLDNEENEDILEDIVLTLTLFEDREMIEERLKTYAHLFDDKVMKQLKRRRYTGWGRLSRKLINGIRDKQSGKTILDFLKSDGFANRNFMQLIHDDSLTFKEDIQKAQVSGQGDSLHEHIANLAGSPAIKKGILQTVKVVDELVKVMGRHKPENIVIEMARENQTTQKGQKNSRERMKRIEEGIKELGSQILKEHPVENTQLQNEKLYLYYLQNGRDMYVDQELDINRLSDYDVDHIVPQSFLKDDSIDNKVLTRSDKARGKSDNVPSEEVVKKMKNYWRQLLNAKLITQRKFDNLTKAERGGLSELDKAGFIKRQLVETRQITKHVAQILDSRMNTKYDENDKLIREVKVITLKSKLVSDFRKDFQFYKVREINNYHHAHDAYLNAVVGTALIKKYPKLESEFVYGDYKVYDVRKMIAKSEQEIGKATAKYFFYSNIMNFFKTEITLANGEIRKRPLIETNGETGEIVWDKGRDFATVRKVLSMPQVNIVKKTEVQTGGFSKESILPKRNSDKLIARKKDWDPKKYGGFDSPTVAYSVLVVAKVEKGKSKKLKSVKELLGITIMERSSFEKNPIDFLEAKGYKEVKKDLIIKLPKYSLFELENGRKRMLASAGELQKGNELALPSKYVNFLYLASHYEKLKGSPEDNEQKQLFVEQHKHYLDEIIEQISEFSKRVILADANLDKVLSAYNKHRDKPIREQAENIIHLFTLTNLGAPAAFKYFDTTIDRKRYTSTKEVLDATLIHQSITGLYETRIDLSQLGGDGGGGSGGSGGSGGSGGVLNLEEEYRLHEKPVPSSIDPSWLQLFPTVWAERAGMGLANQVPPVVVELRSGASPVAVRQYPMSKEAREGIRPHIQRFLDLGVLVPCQSPWNTPLLPVKKPGTNDYRPVQDLREINKRVQDIHPTVPNPYNLLSSLPPSHTWYSVLDLKDAFFCLKLHPNSQPLFAFEWRDPEKGNTGQLTWTRLPQGFKNSPTLFDEALHRDLAPFRALNPQVVLLQYVDDLLVAAPTYRDCKEGTQKLLQELSKLGYRVSAKKAQLCQKEVTYLGYLLKEGKRWLTPARKATVMKIPPPTTPRQVREFLGTAGFCRLWIPGFASLAAPLYPLTKESIPFIWTEEHQKAFDRIKEALLSAPALALPDLTKPFTLYVDERAGVARGVLTQTLGPWRRPVAYLSKKLDPVASGWPTCLKAVAAVALLLKDADKLTLGQNVTVIASHSLESIVRQPPDRWMTNARMTHYQSLLLNERVSFAPPAVLNPATLLPVESEATPVHRCSEILAEETGTRRDLKDQPLPGVPAWYTDGSSFIAEGKRRAGAAIVDGKRTVWASSLPEGTSAQKAELVALTQALRLAEGKDINIYTDSRYAFATAHIHGAIYKQRGLLTSAGKDIKNKEEILALLEAIHLPKRVAIIHCPGHQKGNDPVATGNRRADEAAKQAALSTRVLAETTKPAGKRTADGSEFEKRTADGSEFESPKKKAKVE

SEQ ID NO: 6054 - protein, 2097 aa, synthetic construct
MPAAKRVKLDGGDKKYSIGLDIGTNSVGWAVITDEYKVPSKKFKVLGNTDRHSIKKNLIGALLFDSGETAEATRLKRTARRRYTRRKNRICYLQEIFSNEMAKVDDSFFHRLEESFLVEEDKKHERHPIFGNIVDEVAYHEKYPTIYHLRKKLVDSTDKADLRLIYLALAHMIKFRGHFLIEGDLNPDNSDVDKLFIQLVQTYNQLFEENPINASGVDAKAILSARLSKSRRLENLIAQLPGEKKNGLFGNLIALSLGLTPNFKSNFDLAEDAKLQLSKDTYDDDLDNLLAQIGDQYADLFLAAKNLSDAILLSDILRVNTEITKAPLSASMIKRYDEHHQDLTLLKALVRQQLPEKYKEIFFDQSKNGYAGYIDGGASQEEFYKFIKPILEKMDGTEELLVKLNREDLLRKQRTFDNGSIPHQIHLGELHAILRRQEDFYPFLKDNREKIEKILTFRIPYYVGPLARGNSRFAWMTRKSEETITPWNFEEVVDKGASAQSFIERMTNFDKNLPNEKVLPKHSLLYEYFTVYNELTKVKYVTEGMRKPAFLSGEQKKAIVDLLFKTNRKVTVKQLKEDYFKKIECFDSVEISGVEDRFNASLGTYHDLLKIIKDKDFLDNEENEDILEDIVLTLTLFEDREMIEERLKTYAHLFDDKVMKQLKRRRYTGWGRLSRKLINGIRDKQSGKTILDFLKSDGFANRNFMQLIHDDSLTFKEDIQKAQVSGQGDSLHEHIANLAGSPAIKKGILQTVKVVDELVKVMGRHKPENIVIEMARENQTTQKGQKNSRERMKRIEEGIKELGSQILKEHPVENTQLQNEKLYLYYLQNGRDMYVDQELDINRLSDYDVDHIVPQSFLKDDSIDNKVLTRSDKARGKSDNVPSEEVVKKMKNYWRQLLNAKLITQRKFDNLTKAERGGLSELDKAGFIKRQLVETRQITKHVAQILDSRMNTKYDENDKLIREVKVITLKSKLVSDFRKDFQFYKVREINNYHHAHDAYLNAVVGTALIKKYPKLESEFVYGDYKVYDVRKMIAKSEQEIGKATAKYFFYSNIMNFFKTEITLANGEIRKRPLIETNGETGEIVWDKGRDFATVRKVLSMPQVNIVKKTEVQTGGFSKESILPKRNSDKLIARKKDWDPKKYGGFDSPTVAYSVLVVAKVEKGKSKKLKSVKELLGITIMERSSFEKNPIDFLEAKGYKEVKKDLIIKLPKYSLFELENGRKRMLASAGELQKGNELALPSKYVNFLYLASHYEKLKGSPEDNEQKQLFVEQHKHYLDEIIEQISEFSKRVILADANLDKVLSAYNKHRDKPIREQAENIIHLFTLTNLGAPAAFKYFDTTIDRKRYTSTKEVLDATLIHQSITGLYETRIDLSQLGGDGGGGSGGSGGSGGSGGTLNIEDEYRLHETSKEPDVPLGSTWLSDFPQAWAETGGMGLAVRQAPLIIPLKATSTPVSIKQYPMSQEARLGIKPHIQRLLDQGILVPCQSPWNTPLLPVKKPGTNDYRPVQDLREVNKRVEDIHPTVPNPYNLLSGLPPSHQWYTVLDLKDAFFCLRLHPTSQPLFAFEWRDPEMGISGQLTWTRLPQGFKNSPTLFNEALHRDLADFRIQHPDLILLQYVDDLLLAATSEQDCQRGTRALLQTLGNLGYRASAKKAQICQKQVKYLGYLLKEGQRWLTEARKETVMGQPTPKTPRQLREFLGTAGFCRLWIPGFAEMAAPLYPLTKPGTLFNWGPDQQKAYQEIKQALLTAPALGLPDLTKPFELFVDEKQGYAKGVLTQKLGPWRRPVAYLSKKLDPVAAGWPPCLRMVAAIAVLTKDAGKLTMGQPLVILAPHAVEALVKQPPDRWLSNARMTHYQAMLLDTDRVQFGPVVALNPATLLPLPEKEAPHDCLEILAETHGTRPDLTDQPIPDADYTWYTDGSSFLQEGQRRAGAAVTTETEVIWARALPAGTSAQRAELIALTQALKMAEGKKLNVYTDSRYAFATAHVHGEIYRRRGWLTSEGREIKNKNEILALLKALFLPKRLSIIHCPGHQKGNSAEARGNRMADQAAREAAMKAVLETSTLLAGKRTADGSEFEKRTADGSEFESPKKKAKVE

SEQ ID NO: 6055 - protein, 2005 aa, synthetic construct
MPAAKRVKLDGGDKKYSIGLDIGTNSVGWAVITDEYKVPSKKFKVLGNTDRHSIKKNLIGALLFDSGETAEATRLKRTARRRYTRRKNRICYLQEIFSNEMAKVDDSFFHRLEESFLVEEDKKHERHPIFGNIVDEVAYHEKYPTIYHLRKKLVDSTDKADLRLIYLALAHMIKFRGHFLIEGDLNPDNSDVDKLFIQLVQTYNQLFEENPINASGVDAKAILSARLSKSRRLENLIAQLPGEKKNGLFGNLIALSLGLTPNFKSNFDLAEDAKLQLSKDTYDDDLDNLLAQIGDQYADLFLAAKNLSDAILLSDILRVNTEITKAPLSASMIKRYDEHHQDLTLLKALVRQQLPEKYKEIFFDQSKNGYAGYIDGGASQEEFYKFIKPILEKMDGTEELLVKLNREDLLRKQRTFDNGSIPHQIHLGELHAILRRQEDFYPFLKDNREKIEKILTFRIPYYVGPLARGNSRFAWMTRKSEETITPWNFEEVVDKGASAQSFIERMTNFDKNLPNEKVLPKHSLLYEYFTVYNELTKVKYVTEGMRKPAFLSGEQKKAIVDLLFKTNRKVTVKQLKEDYFKKIECFDSVEISGVEDRFNASLGTYHDLLKIIKDKDFLDNEENEDILEDIVLTLTLFEDREMIEERLKTYAHLFDDKVMKQLKRRRYTGWGRLSRKLINGIRDKQSGKTILDFLKSDGFANRNFMQLIHDDSLTFKEDIQKAQVSGQGDSLHEHIANLAGSPAIKKGILQTVKVVDELVKVMGRHKPENIVIEMARENQTTQKGQKNSRERMKRIEEGIKELGSQILKEHPVENTQLQNEKLYLYYLQNGRDMYVDQELDINRLSDYDVDHIVPQSFLKDDSIDNKVLTRSDKARGKSDNVPSEEVVKKMKNYWRQLLNAKLITQRKFDNLTKAERGGLSELDKAGFIKRQLVETRQITKHVAQILDSRMNTKYDENDKLIREVKVITLKSKLVSDFRKDFQFYKVREINNYHHAHDAYLNAVVGTALIKKYPKLESEFVYGDYKVYDVRKMIAKSEQEIGKATAKYFFYSNIMNFFKTEITLANGEIRKRPLIETNGETGEIVWDKGRDFATVRKVLSMPQVNIVKKTEVQTGGFSKESILPKRNSDKLIARKKDWDPKKYGGFDSPTVAYSVLVVAKVEKGKSKKLKSVKELLGITIMERSSFEKNPIDFLEAKGYKEVKKDLIIKLPKYSLFELENGRKRMLASAGELQKGNELALPSKYVNFLYLASHYEKLKGSPEDNEQKQLFVEQHKHYLDEIIEQISEFSKRVILADANLDKVLSAYNKHRDKPIREQAENIIHLFTLTNLGAPAAFKYFDTTIDRKRYTSTKEVLDATLIHQSITGLYETRIDLSQLGGDGGGGSGGSGGSGGSGGSGGGVLDTPPSHIGLEHLPPPPEVPQFPLNLERLQALQDLVHRSLEAGYISPWDGPGNNPVFPVRKPNGAWRFVHDLRATNALTKPIPALSPGPPDLTAPPTHPPHIICLDLKDAFFQIPVEDRFRFYLSFTLPSPGGLQPHRRFAWRVLPQGFINSPALFQRALQEPLRQVSAAFSQSLLVSYMDDILYASPTEEQRSQCYQALAARLRDLGFQVASEKTSQTPSPVPFLGQMVHEQIVTYQSLPTLQISSPISLHQLQAVLGDLQWVSRGTPTTRRPLQLLYSSLKRHHDPRAIIQLSPEQLQGIAELRQALSHNARSRYNEQEPLLAYVHLTRAGSTLVLFQKGAQFPLAYFQTPLTDNQASPWGLLLLLGCQYLQTQALSSYAKPILKYYHNLPKTSLDNWIQSSEDPRVQELLQLWPQISSQGIQPPGPWKTLITRAEVFLTPQFSPDPIPAALCLFSDGATGRGAYCLWKDHLLDFQAVPAPESAQKGELAGLLAGLAAAPPEPVNIWVDSKYLYSLLRTWVLGAWLQPDPVPSYALLYKSLLRHPAIVVGHVRSHSSASHPIASLNNYVDQLAGKRTADGSEFEKRTADGSEFESPKKKAKVE

SEQ ID NO: 6056 - protein, 2177 aa, synthetic construct
MPAAKRVKLDGGDKKYSIGLDIGTNSVGWAVITDEYKVPSKKFKVLGNTDRHSIKKNLIGALLFDSGETAEATRLKRTARRRYTRRKNRICYLQEIFSNEMAKVDDSFFHRLEESFLVEEDKKHERHPIFGNIVDEVAYHEKYPTIYHLRKKLVDSTDKADLRLIYLALAHMIKFRGHFLIEGDLNPDNSDVDKLFIQLVQTYNQLFEENPINASGVDAKAILSARLSKSRRLENLIAQLPGEKKNGLFGNLIALSLGLTPNFKSNFDLAEDAKLQLSKDTYDDDLDNLLAQIGDQYADLFLAAKNLSDAILLSDILRVNTEITKAPLSASMIKRYDEHHQDLTLLKALVRQQLPEKYKEIFFDQSKNGYAGYIDGGASQEEFYKFIKPILEKMDGTEELLVKLNREDLLRKQRTFDNGSIPHQIHLGELHAILRRQEDFYPFLKDNREKIEKILTFRIPYYVGPLARGNSRFAWMTRKSEETITPWNFEEVVDKGASAQSFIERMTNFDKNLPNEKVLPKHSLLYEYFTVYNELTKVKYVTEGMRKPAFLSGEQKKAIVDLLFKTNRKVTVKQLKEDYFKKIECFDSVEISGVEDRFNASLGTYHDLLKIIKDKDFLDNEENEDILEDIVLTLTLFEDREMIEERLKTYAHLFDDKVMKQLKRRRYTGWGRLSRKLINGIRDKQSGKTILDFLKSDGFANRNFMQLIHDDSLTFKEDIQKAQVSGQGDSLHEHIANLAGSPAIKKGILQTVKVVDELVKVMGRHKPENIVIEMARENQTTQKGQKNSRERMKRIEEGIKELGSQILKEHPVENTQLQNEKLYLYYLQNGRDMYVDQELDINRLSDYDVDHIVPQSFLKDDSIDNKVLTRSDKARGKSDNVPSEEVVKKMKNYWRQLLNAKLITQRKFDNLTKAERGGLSELDKAGFIKRQLVETRQITKHVAQILDSRMNTKYDENDKLIREVKVITLKSKLVSDFRKDFQFYKVREINNYHHAHDAYLNAVVGTALIKKYPKLESEFVYGDYKVYDVRKMIAKSEQEIGKATAKYFFYSNIMNFFKTEITLANGEIRKRPLIETNGETGEIVWDKGRDFATVRKVLSMPQVNIVKKTEVQTGGFSKESILPKRNSDKLIARKKDWDPKKYGGFDSPTVAYSVLVVAKVEKGKSKKLKSVKELLGITIMERSSFEKNPIDFLEAKGYKEVKKDLIIKLPKYSLFELENGRKRMLASAGELQKGNELALPSKYVNFLYLASHYEKLKGSPEDNEQKQLFVEQHKHYLDEIIEQISEFSKRVILADANLDKVLSAYNKHRDKPIREQAENIIHLFTLTNLGAPAAFKYFDTTIDRKRYTSTKEVLDATLIHQSITGLYETRIDLSQLGGDGGGGSGGSGGSGGSGGSGGMDLLKPLTVERKGVKIKGYWNSQADITCVPKDLLQGEEPVRQQNVTTIHGTQEGDVYYVNLKIDGRRINTEVIGTTLDYAIITPGDVPWILKKPLELTIKLDLEEQQGTLLNNSILSKKGKEELKQLFEKYSALWQSWENQVGHRRIRPHKIATGTVKPTPQKQYHINPKAKPDIQIVINDLLKQGVLIQKESTMNTPVYPVPKPNGRWRMVLDYRAVNKVTPLIAVQNQHSYGILGSLFKGRYKTTIDLSNGFWAHPIVPEDYWITAFTWQGKQYCWTVLPQGFLNSPGLFTGDVVDLLQGIPNVEVYVDDVYISHDSEKEHLEYLDILFNRLKEAGYIISLKKSNIANSIVDFLGFQITNEGRGLTDTFKEKLENITAPTTLKQLQSILGLLNFARNFIPDFTELIAPLYALIPKSTKNYVPWQIEHSTTLETLITKLNGAEYLQGRKGDKTLIMKVNASYTTGYIRYYNEGEKKPISYVSIVFSKTELKFTELEKLLTTVHKGLLKALDLSMGQNIHVYSPIVSMQNIQKTPQTAKKALASRWLSWLSYLEDPRIRFFYDPQMPALKDLPAVDTGKDNKKHPSNFQHIFYTDGSAITSPTKEGHLNAGMGIVYFINKDGNLQKQQEWSISLGNHTAQFAEIAAFEFALKKCLPLGGNILVVTDSNYVAKAYNEELDVWASNGFVNNRKKPLKHISKWKSVADLKRLRPDVVVTHEPGHQKLDSSPHAYGNNLADQLATQASFKVHAGKRTADGSEFEKRTADGSEFESPKKKAKVE

SEQ ID NO: 6057 - protein, 2177 aa, synthetic construct
MPAAKRVKLDGGDKKYSIGLDIGTNSVGWAVITDEYKVPSKKFKVLGNTDRHSIKKNLIGALLFDSGETAEATRLKRTARRRYTRRKNRICYLQEIFSNEMAKVDDSFFHRLEESFLVEEDKKHERHPIFGNIVDEVAYHEKYPTIYHLRKKLVDSTDKADLRLIYLALAHMIKFRGHFLIEGDLNPDNSDVDKLFIQLVQTYNQLFEENPINASGVDAKAILSARLSKSRRLENLIAQLPGEKKNGLFGNLIALSLGLTPNFKSNFDLAEDAKLQLSKDTYDDDLDNLLAQIGDQYADLFLAAKNLSDAILLSDILRVNTEITKAPLSASMIKRYDEHHQDLTLLKALVRQQLPEKYKEIFFDQSKNGYAGYIDGGASQEEFYKFIKPILEKMDGTEELLVKLNREDLLRKQRTFDNGSIPHQIHLGELHAILRRQEDFYPFLKDNREKIEKILTFRIPYYVGPLARGNSRFAWMTRKSEETITPWNFEEVVDKGASAQSFIERMTNFDKNLPNEKVLPKHSLLYEYFTVYNELTKVKYVTEGMRKPAFLSGEQKKAIVDLLFKTNRKVTVKQLKEDYFKKIECFDSVEISGVEDRFNASLGTYHDLLKIIKDKDFLDNEENEDILEDIVLTLTLFEDREMIEERLKTYAHLFDDKVMKQLKRRRYTGWGRLSRKLINGIRDKQSGKTILDFLKSDGFANRNFMQLIHDDSLTFKEDIQKAQVSGQGDSLHEHIANLAGSPAIKKGILQTVKVVDELVKVMGRHKPENIVIEMARENQTTQKGQKNSRERMKRIEEGIKELGSQILKEHPVENTQLQNEKLYLYYLQNGRDMYVDQELDINRLSDYDVDHIVPQSFLKDDSIDNKVLTRSDKARGKSDNVPSEEVVKKMKNYWRQLLNAKLITQRKFDNLTKAERGGLSELDKAGFIKRQLVETRQITKHVAQILDSRMNTKYDENDKLIREVKVITLKSKLVSDFRKDFQFYKVREINNYHHAHDAYLNAVVGTALIKKYPKLESEFVYGDYKVYDVRKMIAKSEQEIGKATAKYFFYSNIMNFFKTEITLANGEIRKRPLIETNGETGEIVWDKGRDFATVRKVLSMPQVNIVKKTEVQTGGFSKESILPKRNSDKLIARKKDWDPKKYGGFDSPTVAYSVLVVAKVEKGKSKKLKSVKELLGITIMERSSFEKNPIDFLEAKGYKEVKKDLIIKLPKYSLFELENGRKRMLASAGELQKGNELALPSKYVNFLYLASHYEKLKGSPEDNEQKQLFVEQHKHYLDEIIEQISEFSKRVILADANLDKVLSAYNKHRDKPIREQAENIIHLFTLTNLGAPAAFKYFDTTIDRKRYTSTKEVLDATLIHQSITGLYETRIDLSQLGGDGGGGSGGSGGSGGSGGSGGMDLLKPLTVERKGVKIKGYWNSQADITCVPKDLLQGEEPVRQQNVTTIHGTQEGDVYYVNLKIDGRRINTEVIGTTLDYAIITPGDVPWILKKPLELTIKLDLEEQQGTLLNNSILSKKGKEELKQLFEKYSALWQSWENQVGHRRIRPHKIATGTVKPTPQKQYHINPKAKPDIQIVINDLLKQGVLIQKESTMNTPVYPVPKPNGRWRMVLDYRAVNKVTPLIAVQNQHSYGILGSLFKGRYKTTIDLSNGFWAHPIVPEDYWITAFTWQGKQYCWTVLPQGFLNSPGLFNGDVVDLLQGIPNVEVYVDDVYISHDSEKEHLEYLDILFNRLKEAGYIISLKKSNIANSIVDFLGFQITNEGRGLTDTFKEKLENITAPTTLKQLQSILGLLNFARNFIPDFTELIAPLYALIPKSPKNYVPWQIEHSTTLETLITKLNGAEYLQGRKGDKTLIMKVNASYTTGYIRYYNEGEKKPISYVSIVFSKTELKFTELEKLLTTVHKGLLKALDLSMGQNIHVYSPIVSMQNIQKTPQTAKKALASRWLSWLSYLEDPRIRFFYDPQMPALKDLPAVDTGKDNKKHPSNFQHIFYTDGSAITSPTKEGHLNAGMGIVYFINKDGNLQKQQEWSISLGNHTAQFAEIAAFEFALKKCLPLGGNILVVTDSNYVAKAYNEELDVWASNGFVNNRKKPLKHISKWKSVADLKRLRPDVVVTHEPGHQKLDSSPHAYGNNLADQLATQASFKVHAGKRTADGSEFEKRTADGSEFESPKKKAKVE

SEQ ID NO: 6058 - protein, 2099 aa, synthetic construct
MPAAKRVKLDGGDKKYSIGLDIGTNSVGWAVITDEYKVPSKKFKVLGNTDRHSIKKNLIGALLFDSGETAEATRLKRTARRRYTRRKNRICYLQEIFSNEMAKVDDSFFHRLEESFLVEEDKKHERHPIFGNIVDEVAYHEKYPTIYHLRKKLVDSTDKADLRLIYLALAHMIKFRGHFLIEGDLNPDNSDVDKLFIQLVQTYNQLFEENPINASGVDAKAILSARLSKSRRLENLIAQLPGEKKNGLFGNLIALSLGLTPNFKSNFDLAEDAKLQLSKDTYDDDLDNLLAQIGDQYADLFLAAKNLSDAILLSDILRVNTEITKAPLSASMIKRYDEHHQDLTLLKALVRQQLPEKYKEIFFDQSKNGYAGYIDGGASQEEFYKFIKPILEKMDGTEELLVKLNREDLLRKQRTFDNGSIPHQIHLGELHAILRRQEDFYPFLKDNREKIEKILTFRIPYYVGPLARGNSRFAWMTRKSEETITPWNFEEVVDKGASAQSFIERMTNFDKNLPNEKVLPKHSLLYEYFTVYNELTKVKYVTEGMRKPAFLSGEQKKAIVDLLFKTNRKVTVKQLKEDYFKKIECFDSVEISGVEDRFNASLGTYHDLLKIIKDKDFLDNEENEDILEDIVLTLTLFEDREMIEERLKTYAHLFDDKVMKQLKRRRYTGWGRLSRKLINGIRDKQSGKTILDFLKSDGFANRNFMQLIHDDSLTFKEDIQKAQVSGQGDSLHEHIANLAGSPAIKKGILQTVKVVDELVKVMGRHKPENIVIEMARENQTTQKGQKNSRERMKRIEEGIKELGSQILKEHPVENTQLQNEKLYLYYLQNGRDMYVDQELDINRLSDYDVDHIVPQSFLKDDSIDNKVLTRSDKARGKSDNVPSEEVVKKMKNYWRQLLNAKLITQRKFDNLTKAERGGLSELDKAGFIKRQLVETRQITKHVAQILDSRMNTKYDENDKLIREVKVITLKSKLVSDFRKDFQFYKVREINNYHHAHDAYLNAVVGTALIKKYPKLESEFVYGDYKVYDVRKMIAKSEQEIGKATAKYFFYSNIMNFFKTEITLANGEIRKRPLIETNGETGEIVWDKGRDFATVRKVLSMPQVNIVKKTEVQTGGFSKESILPKRNSDKLIARKKDWDPKKYGGFDSPTVAYSVLVVAKVEKGKSKKLKSVKELLGITIMERSSFEKNPIDFLEAKGYKEVKKDLIIKLPKYSLFELENGRKRMLASAGELQKGNELALPSKYVNFLYLASHYEKLKGSPEDNEQKQLFVEQHKHYLDEIIEQISEFSKRVILADANLDKVLSAYNKHRDKPIREQAENIIHLFTLTNLGAPAAFKYFDTTIDRKRYTSTKEVLDATLIHQSITGLYETRIDLSQLGGDGGGGSGGSGGSGGSGGSGGTLQLEEEYRLFEPESTQKQEMDIWLKNFPQAWAETGGMGTAHCQAPVLIQLKATATPISIRQYPMPHEAYQGIKPHIRRMLDQGILKPCQSPWNTPLLPVKKPGTEDYRPVQDLREVNKRVEDIHPTVPNPYNLLSTLPPSHPWYTVLDLKDAFFCLRLHSESQLLFAFEWRDPEIGLSGQLTWTRLPQGFKNSPTLFNEALHSDLADFRVRYPALVLLQYVDDLLLAAATRTECLEGTKALLETLGNKGYRASAKKAQICLQEVTYLGYSLKDGQRWLTKARKEAILSIPVPKNSRQVREFLGTAGYCRLWIPGFAELAAPLYPLTRPGTLFQWGTEQQLAFEDIKKALLSSPALGLPDITKPFELFIDENSGFAKGVLVQKLGPWKRPVAYLSKKLDTVASGWPPCLRMVAAIAILVKDAGKLTLGQPLTILTSHPVEALVRQPPNKWLSNARMTHYQAMLLDAERVHFGPTVSLNPATLLPLPSGGNHHDCLQILAETHGTRPDLTDQPLPDADLTWYTDGSSFIRNGEREAGAAVTTESEVIWAAPLPPGTSAQRAELIALTQALKMAEGKKLTVYTDSRYAFATTHVHGEIYRRRGWLTSEGKEIKNKNEILALLEALFLPKRLSIIHCPGHQKGDSPQAKGNRLADDTAKKAATETHSSLTVLPAGKRTADGSEFEKRTADGSEFESPKKKAKVE

SEQ ID NO: 6059 - protein, 2099 aa, synthetic construct
MPAAKRVKLDGGDKKYSIGLDIGTNSVGWAVITDEYKVPSKKFKVLGNTDRHSIKKNLIGALLFDSGETAEATRLKRTARRRYTRRKNRICYLQEIFSNEMAKVDDSFFHRLEESFLVEEDKKHERHPIFGNIVDEVAYHEKYPTIYHLRKKLVDSTDKADLRLIYLALAHMIKFRGHFLIEGDLNPDNSDVDKLFIQLVQTYNQLFEENPINASGVDAKAILSARLSKSRRLENLIAQLPGEKKNGLFGNLIALSLGLTPNFKSNFDLAEDAKLQLSKDTYDDDLDNLLAQIGDQYADLFLAAKNLSDAILLSDILRVNTEITKAPLSASMIKRYDEHHQDLTLLKALVRQQLPEKYKEIFFDQSKNGYAGYIDGGASQEEFYKFIKPILEKMDGTEELLVKLNREDLLRKQRTFDNGSIPHQIHLGELHAILRRQEDFYPFLKDNREKIEKILTFRIPYYVGPLARGNSRFAWMTRKSEETITPWNFEEVVDKGASAQSFIERMTNFDKNLPNEKVLPKHSLLYEYFTVYNELTKVKYVTEGMRKPAFLSGEQKKAIVDLLFKTNRKVTVKQLKEDYFKKIECFDSVEISGVEDRFNASLGTYHDLLKIIKDKDFLDNEENEDILEDIVLTLTLFEDREMIEERLKTYAHLFDDKVMKQLKRRRYTGWGRLSRKLINGIRDKQSGKTILDFLKSDGFANRNFMQLIHDDSLTFKEDIQKAQVSGQGDSLHEHIANLAGSPAIKKGILQTVKVVDELVKVMGRHKPENIVIEMARENQTTQKGQKNSRERMKRIEEGIKELGSQILKEHPVENTQLQNEKLYLYYLQNGRDMYVDQELDINRLSDYDVDHIVPQSFLKDDSIDNKVLTRSDKARGKSDNVPSEEVVKKMKNYWRQLLNAKLITQRKFDNLTKAERGGLSELDKAGFIKRQLVETRQITKHVAQILDSRMNTKYDENDKLIREVKVITLKSKLVSDFRKDFQFYKVREINNYHHAHDAYLNAVVGTALIKKYPKLESEFVYGDYKVYDVRKMIAKSEQEIGKATAKYFFYSNIMNFFKTEITLANGEIRKRPLIETNGETGEIVWDKGRDFATVRKVLSMPQVNIVKKTEVQTGGFSKESILPKRNSDKLIARKKDWDPKKYGGFDSPTVAYSVLVVAKVEKGKSKKLKSVKELLGITIMERSSFEKNPIDFLEAKGYKEVKKDLIIKLPKYSLFELENGRKRMLASAGELQKGNELALPSKYVNFLYLASHYEKLKGSPEDNEQKQLFVEQHKHYLDEIIEQISEFSKRVILADANLDKVLSAYNKHRDKPIREQAENIIHLFTLTNLGAPAAFKYFDTTIDRKRYTSTKEVLDATLIHQSITGLYETRIDLSQLGGDGGGGSGGSGGSGGSGGSGGTLQLEEEYRLFEPESTQKQEMDIWLKNFPQAWAETGGMGTAHCQAPVLIQLKATATPISIRQYPMPHEAYQGIKPHIRRMLDQGILKPCQSPWNTPLLPVKKPGTEDYRPVQDLREVNKRVEDIHPTVPNPYNLLSTLPPSHPWYTVLDLKDAFFCLRLHSESQLLFAFEWRDPEIGLSGQLTWTRLPQGFKNSPTLFNEALHSDLADFRVRYPALVLLQYVDDLLLAAATRTECLEGTKALLETLGNKGYRASAKKAQICLQEVTYLGYSLKDGQRWLTKARKEAILSIPVPKNSRQVREFLGKAGYCRLFIPGFAELAAPLYPLTRPGTLFQWGTEQQLAFEDIKKALLSSPALGLPDITKPFELFIDENSGFAKGVLVQKLGPWKRPVAYLSKKLDTVASGWPPCLRMVAAIAILVKDAGKLTLGQPLTILTSHPVEALVRQPPNKWLSNARMTHYQAMLLDAERVHFGPTVSLNPATLLPLPSGGNHHDCLQILAETHGTRPDLTDQPLPDADLTWYTDGSSFIRNGEREAGAAVTTESEVIWAAPLPPGTSAQRAELIALTQALKMAEGKKLTVYTDSRYAFATTHVHGEIYRRRGWLTSEGKEIKNKNEILALLEALFLPKRLSIIHCPGHQKGDSPQAKGNRLADDTAKKAATETHSSLTVLPAGKRTADGSEFEKRTADGSEFESPKKKAKVE

SEQ ID NO: 6060 - protein, 2180 aa, synthetic construct
MPAAKRVKLDGGDKKYSIGLDIGTNSVGWAVITDEYKVPSKKFKVLGNTDRHSIKKNLIGALLFDSGETAEATRLKRTARRRYTRRKNRICYLQEIFSNEMAKVDDSFFHRLEESFLVEEDKKHERHPIFGNIVDEVAYHEKYPTIYHLRKKLVDSTDKADLRLIYLALAHMIKFRGHFLIEGDLNPDNSDVDKLFIQLVQTYNQLFEENPINASGVDAKAILSARLSKSRRLENLIAQLPGEKKNGLFGNLIALSLGLTPNFKSNFDLAEDAKLQLSKDTYDDDLDNLLAQIGDQYADLFLAAKNLSDAILLSDILRVNTEITKAPLSASMIKRYDEHHQDLTLLKALVRQQLPEKYKEIFFDQSKNGYAGYIDGGASQEEFYKFIKPILEKMDGTEELLVKLNREDLLRKQRTFDNGSIPHQIHLGELHAILRRQEDFYPFLKDNREKIEKILTFRIPYYVGPLARGNSRFAWMTRKSEETITPWNFEEVVDKGASAQSFIERMTNFDKNLPNEKVLPKHSLLYEYFTVYNELTKVKYVTEGMRKPAFLSGEQKKAIVDLLFKTNRKVTVKQLKEDYFKKIECFDSVEISGVEDRFNASLGTYHDLLKIIKDKDFLDNEENEDILEDIVLTLTLFEDREMIEERLKTYAHLFDDKVMKQLKRRRYTGWGRLSRKLINGIRDKQSGKTILDFLKSDGFANRNFMQLIHDDSLTFKEDIQKAQVSGQGDSLHEHIANLAGSPAIKKGILQTVKVVDELVKVMGRHKPENIVIEMARENQTTQKGQKNSRERMKRIEEGIKELGSQILKEHPVENTQLQNEKLYLYYLQNGRDMYVDQELDINRLSDYDVDHIVPQSFLKDDSIDNKVLTRSDKARGKSDNVPSEEVVKKMKNYWRQLLNAKLITQRKFDNLTKAERGGLSELDKAGFIKRQLVETRQITKHVAQILDSRMNTKYDENDKLIREVKVITLKSKLVSDFRKDFQFYKVREINNYHHAHDAYLNAVVGTALIKKYPKLESEFVYGDYKVYDVRKMIAKSEQEIGKATAKYFFYSNIMNFFKTEITLANGEIRKRPLIETNGETGEIVWDKGRDFATVRKVLSMPQVNIVKKTEVQTGGFSKESILPKRNSDKLIARKKDWDPKKYGGFDSPTVAYSVLVVAKVEKGKSKKLKSVKELLGITIMERSSFEKNPIDFLEAKGYKEVKKDLIIKLPKYSLFELENGRKRMLASAGELQKGNELALPSKYVNFLYLASHYEKLKGSPEDNEQKQLFVEQHKHYLDEIIEQISEFSKRVILADANLDKVLSAYNKHRDKPIREQAENIIHLFTLTNLGAPAAFKYFDTTIDRKRYTSTKEVLDATLIHQSITGLYETRIDLSQLGGDGGGGSGGSGGSGGSGGSGGMNPLQLLQPLPAEIKGTKLLAHWNSGATITCIPESFLEDEQPIKKTLIKTIHGEKQQNVYYVTFKVKGRKVEAEVIASPYEYILLSPTDVPWLTQQPLQLTILVPLQEYQEKILSKTALPEDQKQQLKTLFVKYDNLWQHWENQVGHRKIRPHNIATGDYPPRPQKQYPINPKAKPSIQIVIDDLLKQGVLTPQNSTMNTPVYPVPKPDGRWRMVLDYREVNKTIPLTAAQNQHSAGILATIVRQKYKTTLDLANGFWAHPITPESYWLTAFTWQGKQYCWTRLPQGFLNSPALFNADVVDLLKEIPNVQVYVDDIYLSHDDPKEHVQQLEKVFQILLQAGYVVSLKKSEIGQKTVEFLGFNITKEGRGLTDTFKTKLLNITPPKDLKQLQSILGKLNFARNFIPNFAELVQPLYNLIAPAKGKYIEWSEENTKQLNMVIEALNTASNLEERLPEQRLVIKVNTSPSAGYVRYYNETGKKPIMYLNYVFSKAELKFSMLEKLLTTMHKALIKAMDLAMGQEILVYSPIVSMTKIQKTPLPERKALPIRWITWMTYLEDPRIQFHYDKTLPELKHIPDVYTSSQSPVKHPSQYEGVFYTDGSAIKSPDPTKSNNAGMGIVHATYKPEYQVLNQWSIPLGNHTAQMAEIAAVEFACKKALKIPGPVLVITDSFYVAESANKELPYWKSNGFVNNKKKPLKHISKWKSIAECLSMKPDITIQHEKGISLQIPVFILKGNALADKLATQGSYVVNAGKRTADGSEFEKRTADGSEFESPKKKAKVE

SEQ ID NO: 6061 - protein, 2098 aa, synthetic construct
MPAAKRVKLDGGDKKYSIGLDIGTNSVGWAVITDEYKVPSKKFKVLGNTDRHSIKKNLIGALLFDSGETAEATRLKRTARRRYTRRKNRICYLQEIFSNEMAKVDDSFFHRLEESFLVEEDKKHERHPIFGNIVDEVAYHEKYPTIYHLRKKLVDSTDKADLRLIYLALAHMIKFRGHFLIEGDLNPDNSDVDKLFIQLVQTYNQLFEENPINASGVDAKAILSARLSKSRRLENLIAQLPGEKKNGLFGNLIALSLGLTPNFKSNFDLAEDAKLQLSKDTYDDDLDNLLAQIGDQYADLFLAAKNLSDAILLSDILRVNTEITKAPLSASMIKRYDEHHQDLTLLKALVRQQLPEKYKEIFFDQSKNGYAGYIDGGASQEEFYKFIKPILEKMDGTEELLVKLNREDLLRKQRTFDNGSIPHQIHLGELHAILRRQEDFYPFLKDNREKIEKILTFRIPYYVGPLARGNSRFAWMTRKSEETITPWNFEEVVDKGASAQSFIERMTNFDKNLPNEKVLPKHSLLYEYFTVYNELTKVKYVTEGMRKPAFLSGEQKKAIVDLLFKTNRKVTVKQLKEDYFKKIECFDSVEISGVEDRFNASLGTYHDLLKIIKDKDFLDNEENEDILEDIVLTLTLFEDREMIEERLKTYAHLFDDKVMKQLKRRRYTGWGRLSRKLINGIRDKQSGKTILDFLKSDGFANRNFMQLIHDDSLTFKEDIQKAQVSGQGDSLHEHIANLAGSPAIKKGILQTVKVVDELVKVMGRHKPENIVIEMARENQTTQKGQKNSRERMKRIEEGIKELGSQILKEHPVENTQLQNEKLYLYYLQNGRDMYVDQELDINRLSDYDVDHIVPQSFLKDDSIDNKVLTRSDKARGKSDNVPSEEVVKKMKNYWRQLLNAKLITQRKFDNLTKAERGGLSELDKAGFIKRQLVETRQITKHVAQILDSRMNTKYDENDKLIREVKVITLKSKLVSDFRKDFQFYKVREINNYHHAHDAYLNAVVGTALIKKYPKLESEFVYGDYKVYDVRKMIAKSEQEIGKATAKYFFYSNIMNFFKTEITLANGEIRKRPLIETNGETGEIVWDKGRDFATVRKVLSMPQVNIVKKTEVQTGGFSKESILPKRNSDKLIARKKDWDPKKYGGFDSPTVAYSVLVVAKVEKGKSKKLKSVKELLGITIMERSSFEKNPIDFLEAKGYKEVKKDLIIKLPKYSLFELENGRKRMLASAGELQKGNELALPSKYVNFLYLASHYEKLKGSPEDNEQKQLFVEQHKHYLDEIIEQISEFSKRVILADANLDKVLSAYNKHRDKPIREQAENIIHLFTLTNLGAPAAFKYFDTTIDRKRYTSTKEVLDATLIHQSITGLYETRIDLSQLGGDGGGGSGGSGGSGGSGGSGGVLNLEEEYRLHEKPVPSSIDPSWLQLFPTVWAERAGMGLANQVPPVVVELRSGASPVAVRQYPMSKEAREGIRPHIQKFLDLGVLVPCRSPWNTPLLPVKKPGTNDYRPVQDLREINKRVQDIHPTVPNPYNLLSSLPPSYTWYSVLDLKDAFFCLRLHPNSQPLFAFEWKDPEKGNTGQLTWTRLPQGFKNSPTLFNEALHRDLAPFRALNPQVVLLQYVDDLLVAAPTYEDCKKGTQKLLQELSKLGYRVSAKKAQLCQREVTYLGYLLKEGKRWLTPARKATVMKIPVPTTPRQVREFLGKAGFCRLFIPGFASLAAPLYPLTKPSIPFIWTEEHQQAFDHIKKALLSAPALALPDLTKPFTLYIDERAGVARGVLTQTLGPWRRPVAYLSKKLDPVASGWPTCLKAVAAVALLLKDADKLTLGQNVTVIASHSLESIVRQPPDRWMTNARMTHYQSLLLNERVSFAPPAVLNPATLLPVESEATPVHRCSEILAEETGTRRDLEDQPLPGVPTWYTDGSSFITEGKRRAGAPIVDGKRTVWASSLPEGTSAQKAELVALTQALRLAEGKNINIYTDSRYAFATAHIHGAIYKQRGWLTSAGKDIKNKEEILALLEAIHLPRRVAIIHCPGHQRGSNPVATGNRRADEAAKQAALSTRVLAGTTKPAGKRTADGSEFEKRTADGSEFESPKKKAKVE

SEQ ID NO: 6062 - protein, 2010 aa, synthetic construct
MPAAKRVKLDGGDKKYSIGLDIGTNSVGWAVITDEYKVPSKKFKVLGNTDRHSIKKNLIGALLFDSGETAEATRLKRTARRRYTRRKNRICYLQEIFSNEMAKVDDSFFHRLEESFLVEEDKKHERHPIFGNIVDEVAYHEKYPTIYHLRKKLVDSTDKADLRLIYLALAHMIKFRGHFLIEGDLNPDNSDVDKLFIQLVQTYNQLFEENPINASGVDAKAILSARLSKSRRLENLIAQLPGEKKNGLFGNLIALSLGLTPNFKSNFDLAEDAKLQLSKDTYDDDLDNLLAQIGDQYADLFLAAKNLSDAILLSDILRVNTEITKAPLSASMIKRYDEHHQDLTLLKALVRQQLPEKYKEIFFDQSKNGYAGYIDGGASQEEFYKFIKPILEKMDGTEELLVKLNREDLLRKQRTFDNGSIPHQIHLGELHAILRRQEDFYPFLKDNREKIEKILTFRIPYYVGPLARGNSRFAWMTRKSEETITPWNFEEVVDKGASAQSFIERMTNFDKNLPNEKVLPKHSLLYEYFTVYNELTKVKYVTEGMRKPAFLSGEQKKAIVDLLFKTNRKVTVKQLKEDYFKKIECFDSVEISGVEDRFNASLGTYHDLLKIIKDKDFLDNEENEDILEDIVLTLTLFEDREMIEERLKTYAHLFDDKVMKQLKRRRYTGWGRLSRKLINGIRDKQSGKTILDFLKSDGFANRNFMQLIHDDSLTFKEDIQKAQVSGQGDSLHEHIANLAGSPAIKKGILQTVKVVDELVKVMGRHKPENIVIEMARENQTTQKGQKNSRERMKRIEEGIKELGSQILKEHPVENTQLQNEKLYLYYLQNGRDMYVDQELDINRLSDYDVDHIVPQSFLKDDSIDNKVLTRSDKARGKSDNVPSEEVVKKMKNYWRQLLNAKLITQRKFDNLTKAERGGLSELDKAGFIKRQLVETRQITKHVAQILDSRMNTKYDENDKLIREVKVITLKSKLVSDFRKDFQFYKVREINNYHHAHDAYLNAVVGTALIKKYPKLESEFVYGDYKVYDVRKMIAKSEQEIGKATAKYFFYSNIMNFFKTEITLANGEIRKRPLIETNGETGEIVWDKGRDFATVRKVLSMPQVNIVKKTEVQTGGFSKESILPKRNSDKLIARKKDWDPKKYGGFDSPTVAYSVLVVAKVEKGKSKKLKSVKELLGITIMERSSFEKNPIDFLEAKGYKEVKKDLIIKLPKYSLFELENGRKRMLASAGELQKGNELALPSKYVNFLYLASHYEKLKGSPEDNEQKQLFVEQHKHYLDEIIEQISEFSKRVILADANLDKVLSAYNKHRDKPIREQAENIIHLFTLTNLGAPAAFKYFDTTIDRKRYTSTKEVLDATLIHQSITGLYETRIDLSQLGGDGGGGSGGSGGSGGSGGSGGPLGTSDSPVTHADPIDWKSEEPVWVDQWPLTQEKLSAAQQLVQEQLRLGHIEPSTSAWNSPIFVIKKKSGKWRLLQDLRKVNETMMHMGALQPGLPTPSAIPDKSYIIVIDLKDCFYTIPLAPQDCKRFAFSLPSVNFKEPMQRYQWRVLPQGMTNSPTLCQKFVATAIAPVRQRFPQLYLVHYMDDILLAHTDEHLLYQAFSILKQHLSLNGLVIADEKIQTHFPYNYLGFSLYPRVYNTQLVKLQTDHLKTLNDFQKLLGDINWIRPYLKLPTYTLQPLFDILKGDSDPASPRTLSLEGRTALQSIEEAIRQQQITYCDYQRSWGLYILPTPRAPTGVLYQDKPLRWIYLSATPTKHLLPYYELVAKIIAKGRHEAIQYFGMEPPFICVPYALEQQDWLFQFSDNWSIAFANYPGQITHHYPSDKLLQFASSHAFIFPKIVRRQPIPEATLIFTDGSSNGTAALIINHQTYYAQTSFSSAQVVELFAVHQALLTVPTSFNLFTDSSYVVGALQMIETVPIIGTTSPEVLNLFTLIQQVLHCRQHPCFFGHIRAHSTLPGALVQGNHTADVLTKQVFFQSAGKRTADGSEFEKRTADGSEFESPKKKAKVE

SEQ ID NO: 6063 - protein, 2131 aa, synthetic construct
MPAAKRVKLDGGDKKYSIGLDIGTNSVGWAVITDEYKVPSKKFKVLGNTDRHSIKKNLIGALLFDSGETAEATRLKRTARRRYTRRKNRICYLQEIFSNEMAKVDDSFFHRLEESFLVEEDKKHERHPIFGNIVDEVAYHEKYPTIYHLRKKLVDSTDKADLRLIYLALAHMIKFRGHFLIEGDLNPDNSDVDKLFIQLVQTYNQLFEENPINASGVDAKAILSARLSKSRRLENLIAQLPGEKKNGLFGNLIALSLGLTPNFKSNFDLAEDAKLQLSKDTYDDDLDNLLAQIGDQYADLFLAAKNLSDAILLSDILRVNTEITKAPLSASMIKRYDEHHQDLTLLKALVRQQLPEKYKEIFFDQSKNGYAGYIDGGASQEEFYKFIKPILEKMDGTEELLVKLNREDLLRKQRTFDNGSIPHQIHLGELHAILRRQEDFYPFLKDNREKIEKILTFRIPYYVGPLARGNSRFAWMTRKSEETITPWNFEEVVDKGASAQSFIERMTNFDKNLPNEKVLPKHSLLYEYFTVYNELTKVKYVTEGMRKPAFLSGEQKKAIVDLLFKTNRKVTVKQLKEDYFKKIECFDSVEISGVEDRFNASLGTYHDLLKIIKDKDFLDNEENEDILEDIVLTLTLFEDREMIEERLKTYAHLFDDKVMKQLKRRRYTGWGRLSRKLINGIRDKQSGKTILDFLKSDGFANRNFMQLIHDDSLTFKEDIQKAQVSGQGDSLHEHIANLAGSPAIKKGILQTVKVVDELVKVMGRHKPENIVIEMARENQTTQKGQKNSRERMKRIEEGIKELGSQILKEHPVENTQLQNEKLYLYYLQNGRDMYVDQELDINRLSDYDVDHIVPQSFLKDDSIDNKVLTRSDKARGKSDNVPSEEVVKKMKNYWRQLLNAKLITQRKFDNLTKAERGGLSELDKAGFIKRQLVETRQITKHVAQILDSRMNTKYDENDKLIREVKVITLKSKLVSDFRKDFQFYKVREINNYHHAHDAYLNAVVGTALIKKYPKLESEFVYGDYKVYDVRKMIAKSEQEIGKATAKYFFYSNIMNFFKTEITLANGEIRKRPLIETNGETGEIVWDKGRDFATVRKVLSMPQVNIVKKTEVQTGGFSKESILPKRNSDKLIARKKDWDPKKYGGFDSPTVAYSVLVVAKVEKGKSKKLKSVKELLGITIMERSSFEKNPIDFLEAKGYKEVKKDLIIKLPKYSLFELENGRKRMLASAGELQKGNELALPSKYVNFLYLASHYEKLKGSPEDNEQKQLFVEQHKHYLDEIIEQISEFSKRVILADANLDKVLSAYNKHRDKPIREQAENIIHLFTLTNLGAPAAFKYFDTTIDRKRYTSTKEVLDATLIHQSITGLYETRIDLSQLGGDGGGGSGGSGGSGGSGGSGGLLGRDLLTKLKAQIQFSTEGPQVTWEDRPAMCLVLNLEEEYRLHEKPVPPSIDPSWLQLFPMVWAEKAGMGLANQVPPVVVELKSDASPVAVRQYPMSKEAREGIRPHIQRFLDLGILVPCQSPWNTPLLPVKKPGTNDYRPVQDLREVNKRVQDIHPTVPNPYNLLSSLPPSHTWYSVLDLKDAFFCLKLHPNSQPLFAFEWRDPEKGNTGQLTWTRLPQGFKNSPTLFNEALHRDLASFRALNPQVVMLQYVDDLLVAAPTYRDCKEGTRRLLQELSKLGYRVSAKKAQLCREEVTYLGYLLKGGKRWLTPARKATVMKIPTPTTPRQVREFLGTAGFCRLWIPGFASLAAPLYPLTRPKVPFTWTEAHQEAFGRIKEALLSAPALALPDLTKPFALYVDEKEGVARGVLTQTLGPWRRPVAYLSKKLDPVASGWPTCLKAIAAVALLLKDADKLTLGQNVLVIAPHNLESIVRQPPDRWMTNARMTHYQSLLLNERVSFAPPAILNPATLLPVESDDTPIHICSEILAEETGTRPDLRDQPLPGVPAWYTDGSSFIMDGRRQAGAAIVDNKRTVWASNLPEGTSAQKAELIALTQALRLAEGKSINIYTDSRYAFATAHVHGAIYKQRGWLTSAGKDIKNKEEILALLEAIHLPKRVAIIHCPGHQRGTDPVATGNRKADEAAKQAAQSTRILTETTKNAGKRTADGSEFEKRTADGSEFESPKKKAKVE

SEQ ID NO: 6064 - protein, 2222 aa, synthetic construct
MPAAKRVKLDGGDKKYSIGLDIGTNSVGWAVITDEYKVPSKKFKVLGNTDRHSIKKNLIGALLFDSGETAEATRLKRTARRRYTRRKNRICYLQEIFSNEMAKVDDSFFHRLEESFLVEEDKKHERHPIFGNIVDEVAYHEKYPTIYHLRKKLVDSTDKADLRLIYLALAHMIKFRGHFLIEGDLNPDNSDVDKLFIQLVQTYNQLFEENPINASGVDAKAILSARLSKSRRLENLIAQLPGEKKNGLFGNLIALSLGLTPNFKSNFDLAEDAKLQLSKDTYDDDLDNLLAQIGDQYADLFLAAKNLSDAILLSDILRVNTEITKAPLSASMIKRYDEHHQDLTLLKALVRQQLPEKYKEIFFDQSKNGYAGYIDGGASQEEFYKFIKPILEKMDGTEELLVKLNREDLLRKQRTFDNGSIPHQIHLGELHAILRRQEDFYPFLKDNREKIEKILTFRIPYYVGPLARGNSRFAWMTRKSEETITPWNFEEVVDKGASAQSFIERMTNFDKNLPNEKVLPKHSLLYEYFTVYNELTKVKYVTEGMRKPAFLSGEQKKAIVDLLFKTNRKVTVKQLKEDYFKKIECFDSVEISGVEDRFNASLGTYHDLLKIIKDKDFLDNEENEDILEDIVLTLTLFEDREMIEERLKTYAHLFDDKVMKQLKRRRYTGWGRLSRKLINGIRDKQSGKTILDFLKSDGFANRNFMQLIHDDSLTFKEDIQKAQVSGQGDSLHEHIANLAGSPAIKKGILQTVKVVDELVKVMGRHKPENIVIEMARENQTTQKGQKNSRERMKRIEEGIKELGSQILKEHPVENTQLQNEKLYLYYLQNGRDMYVDQELDINRLSDYDVDHIVPQSFLKDDSIDNKVLTRSDKARGKSDNVPSEEVVKKMKNYWRQLLNAKLITQRKFDNLTKAERGGLSELDKAGFIKRQLVETRQITKHVAQILDSRMNTKYDENDKLIREVKVITLKSKLVSDFRKDFQFYKVREINNYHHAHDAYLNAVVGTALIKKYPKLESEFVYGDYKVYDVRKMIAKSEQEIGKATAKYFFYSNIMNFFKTEITLANGEIRKRPLIETNGETGEIVWDKGRDFATVRKVLSMPQVNIVKKTEVQTGGFSKESILPKRNSDKLIARKKDWDPKKYGGFDSPTVAYSVLVVAKVEKGKSKKLKSVKELLGITIMERSSFEKNPIDFLEAKGYKEVKKDLIIKLPKYSLFELENGRKRMLASAGELQKGNELALPSKYVNFLYLASHYEKLKGSPEDNEQKQLFVEQHKHYLDEIIEQISEFSKRVILADANLDKVLSAYNKHRDKPIREQAENIIHLFTLTNLGAPAAFKYFDTTIDRKRYTSTKEVLDATLIHQSITGLYETRIDLSQLGGDGGGGSGGSGGSGGSGGSGGTLGDQGSRGSDPLPEPRVTLTVEGIPTEFLVNTGAEHSVLTKPMGKMGSKRTVVAGATGSKVYPWTTKRLLKIGQKQVTHSFLVIPECPAPLLGRDLLTKLKAQIQFSTEGPQVTWEDRPAMCLVLNLEEEYRLHEKPVPPSIDPSWLQLFPMVWAEKAGMGLANQVPPVVVELKSDASPVAVRQYPMSKEAREGIRPHIQRFLDLGILVPCQSPWNTPLLPVKKPGTNDYRPVQDLREVNKRVQDIHPTVPNPYNLLSSLPPSHTWYSVLDLKDAFFCLKLHPNSQPLFAFEWRDPEKGNTGQLTWTRLPQGFKNSPTLFNEALHRDLASFRALNPQVVMLQYVDDLLVAAPTYRDCKEGTRRLLQELSKLGYRVSAKKAQLCREEVTYLGYLLKGGKRWLTPARKATVMKIPTPTTPRQVREFLGTAGFCRLWIPGFASLAAPLYPLTRPKVPFTWTEAHQEAFGRIKEALLSAPALALPDLTKPFALYVDEKEGVARGVLTQTLGPWRRPVAYLSKKLDPVASGWPTCLKAIAAVALLLKDADKLTLGQNVLVIAPHNLESIVRQPPDRWMTNARMTHYQSLLLNERVSFAPPAILNPATLLPVESDDTPIHICSEILAEETGTRPDLRDQPLPGVPAWYTDGSSFIMDGRRQAGAAIVDNKRTVWASNLPEGTSAQKAELIALTQALRLAEGKSINIYTDSRYAFATAHVHGAIYKQRGWLTSAGKDIKNKEEILALLEAIHLPKRVAIIHCPGHQRGTDPVATGNRKADEAAKQAAQSTRILTETTKNAGKRTADGSEFEKRTADGSEFESPKKKAKVE

SEQ ID NO: 6065 - protein, 2222 aa, synthetic construct
MPAAKRVKLDGGDKKYSIGLDIGTNSVGWAVITDEYKVPSKKFKVLGNTDRHSIKKNLIGALLFDSGETAEATRLKRTARRRYTRRKNRICYLQEIFSNEMAKVDDSFFHRLEESFLVEEDKKHERHPIFGNIVDEVAYHEKYPTIYHLRKKLVDSTDKADLRLIYLALAHMIKFRGHFLIEGDLNPDNSDVDKLFIQLVQTYNQLFEENPINASGVDAKAILSARLSKSRRLENLIAQLPGEKKNGLFGNLIALSLGLTPNFKSNFDLAEDAKLQLSKDTYDDDLDNLLAQIGDQYADLFLAAKNLSDAILLSDILRVNTEITKAPLSASMIKRYDEHHQDLTLLKALVRQQLPEKYKEIFFDQSKNGYAGYIDGGASQEEFYKFIKPILEKMDGTEELLVKLNREDLLRKQRTFDNGSIPHQIHLGELHAILRRQEDFYPFLKDNREKIEKILTFRIPYYVGPLARGNSRFAWMTRKSEETITPWNFEEVVDKGASAQSFIERMTNFDKNLPNEKVLPKHSLLYEYFTVYNELTKVKYVTEGMRKPAFLSGEQKKAIVDLLFKTNRKVTVKQLKEDYFKKIECFDSVEISGVEDRFNASLGTYHDLLKIIKDKDFLDNEENEDILEDIVLTLTLFEDREMIEERLKTYAHLFDDKVMKQLKRRRYTGWGRLSRKLINGIRDKQSGKTILDFLKSDGFANRNFMQLIHDDSLTFKEDIQKAQVSGQGDSLHEHIANLAGSPAIKKGILQTVKVVDELVKVMGRHKPENIVIEMARENQTTQKGQKNSRERMKRIEEGIKELGSQILKEHPVENTQLQNEKLYLYYLQNGRDMYVDQELDINRLSDYDVDHIVPQSFLKDDSIDNKVLTRSDKARGKSDNVPSEEVVKKMKNYWRQLLNAKLITQRKFDNLTKAERGGLSELDKAGFIKRQLVETRQITKHVAQILDSRMNTKYDENDKLIREVKVITLKSKLVSDFRKDFQFYKVREINNYHHAHDAYLNAVVGTALIKKYPKLESEFVYGDYKVYDVRKMIAKSEQEIGKATAKYFFYSNIMNFFKTEITLANGEIRKRPLIETNGETGEIVWDKGRDFATVRKVLSMPQVNIVKKTEVQTGGFSKESILPKRNSDKLIARKKDWDPKKYGGFDSPTVAYSVLVVAKVEKGKSKKLKSVKELLGITIMERSSFEKNPIDFLEAKGYKEVKKDLIIKLPKYSLFELENGRKRMLASAGELQKGNELALPSKYVNFLYLASHYEKLKGSPEDNEQKQLFVEQHKHYLDEIIEQISEFSKRVILADANLDKVLSAYNKHRDKPIREQAENIIHLFTLTNLGAPAAFKYFDTTIDRKRYTSTKEVLDATLIHQSITGLYETRIDLSQLGGDGGGGSGGSGGSGGSGGSGGTLGDQGSRGSDPLPEPRVTLTVEGIPTEFLVNTGAEHSVLTKPMGKMGSKRTVVAGATGSKVYPWTTKRLLKIGQKQVTHSFLVIPECPAPLLGRDLLTKLKAQIQFSTEGPQVTWEDRPAMCLVLNLEEEYRLHEKPVPPSIDPSWLQLFPMVWAEKAGMGLANQVPPVVVELKSDASPVAVRQYPMSKEAREGIRPHIQRFLDLGILVPCQSPWNTPLLPVKKPGTNDYRPVQDLREVNKRVQDIHPTVPNPYNLLSSLPPSHTWYSVLDLKDAFFCLKLHPNSQPLFAFEWRDPEKGNTGQLTWTRLPQGFKNSPTLFNEALHRDLASFRALNPQVVMLQYVDDLLVAAPTYRDCKEGTRRLLQELSKLGYRVSAKKAQLCREEVTYLGYLLKGGKRWLTPARKATVMKIPTPTTPRQVREFLGKAGFCRLFIPGFASLAAPLYPLTRPKVPFTWTEAHQEAFGRIKEALLSAPALALPDLTKPFALYVDEKEGVARGVLTQTLGPWRRPVAYLSKKLDPVASGWPTCLKAIAAVALLLKDADKLTLGQNVLVIAPHNLESIVRQPPDRWMTNARMTHYQSLLLNERVSFAPPAILNPATLLPVESDDTPIHICSEILAEETGTRPDLRDQPLPGVPAWYTDGSSFIMDGRRQAGAAIVDNKRTVWASNLPEGTSAQKAELIALTQALRLAEGKSINIYTDSRYAFATAHVHGAIYKQRGWLTSAGKDIKNKEEILALLEAIHLPKRVAIIHCPGHQRGTDPVATGNRKADEAAKQAAQSTRILTETTKNAGKRTADGSEFEKRTADGSEFESPKKKAKVE

SEQ ID NO: 6066 - protein, 2100 aa, synthetic construct
MPAAKRVKLDGGDKKYSIGLDIGTNSVGWAVITDEYKVPSKKFKVLGNTDRHSIKKNLIGALLFDSGETAEATRLKRTARRRYTRRKNRICYLQEIFSNEMAKVDDSFFHRLEESFLVEEDKKHERHPIFGNIVDEVAYHEKYPTIYHLRKKLVDSTDKADLRLIYLALAHMIKFRGHFLIEGDLNPDNSDVDKLFIQLVQTYNQLFEENPINASGVDAKAILSARLSKSRRLENLIAQLPGEKKNGLFGNLIALSLGLTPNFKSNFDLAEDAKLQLSKDTYDDDLDNLLAQIGDQYADLFLAAKNLSDAILLSDILRVNTEITKAPLSASMIKRYDEHHQDLTLLKALVRQQLPEKYKEIFFDQSKNGYAGYIDGGASQEEFYKFIKPILEKMDGTEELLVKLNREDLLRKQRTFDNGSIPHQIHLGELHAILRRQEDFYPFLKDNREKIEKILTFRIPYYVGPLARGNSRFAWMTRKSEETITPWNFEEVVDKGASAQSFIERMTNFDKNLPNEKVLPKHSLLYEYFTVYNELTKVKYVTEGMRKPAFLSGEQKKAIVDLLFKTNRKVTVKQLKEDYFKKIECFDSVEISGVEDRFNASLGTYHDLLKIIKDKDFLDNEENEDILEDIVLTLTLFEDREMIEERLKTYAHLFDDKVMKQLKRRRYTGWGRLSRKLINGIRDKQSGKTILDFLKSDGFANRNFMQLIHDDSLTFKEDIQKAQVSGQGDSLHEHIANLAGSPAIKKGILQTVKVVDELVKVMGRHKPENIVIEMARENQTTQKGQKNSRERMKRIEEGIKELGSQILKEHPVENTQLQNEKLYLYYLQNGRDMYVDQELDINRLSDYDVDHIVPQSFLKDDSIDNKVLTRSDKARGKSDNVPSEEVVKKMKNYWRQLLNAKLITQRKFDNLTKAERGGLSELDKAGFIKRQLVETRQITKHVAQILDSRMNTKYDENDKLIREVKVITLKSKLVSDFRKDFQFYKVREINNYHHAHDAYLNAVVGTALIKKYPKLESEFVYGDYKVYDVRKMIAKSEQEIGKATAKYFFYSNIMNFFKTEITLANGEIRKRPLIETNGETGEIVWDKGRDFATVRKVLSMPQVNIVKKTEVQTGGFSKESILPKRNSDKLIARKKDWDPKKYGGFDSPTVAYSVLVVAKVEKGKSKKLKSVKELLGITIMERSSFEKNPIDFLEAKGYKEVKKDLIIKLPKYSLFELENGRKRMLASAGELQKGNELALPSKYVNFLYLASHYEKLKGSPEDNEQKQLFVEQHKHYLDEIIEQISEFSKRVILADANLDKVLSAYNKHRDKPIREQAENIIHLFTLTNLGAPAAFKYFDTTIDRKRYTSTKEVLDATLIHQSITGLYETRIDLSQLGGDGGGGSGGSGGSGGSGGSGGTLGIEDEYRLHETSTEPDVSLGSTWLSDFPQAWAETGGMGLAVRQAPLIIPLKATSTPVSIQQYPMSHEARLGIKPHIQRLLDQGILVPCQSPWNTPLLPVKKPGTNDYRPVQDLREVNKRVEDIHPTVPNPYNLLSGLPPSHQWYTVLDLKDAFFCLRLHPTSQPLFAFEWRDPGMGISGQLTWTRLPQGFKNSPTLFNEALHRDLADFRIQHPDLILLQYVDDILLAATSELDCQQGTRALLQTLGDLGYRASAKKAQICQKQVKYLGYLLREGQRWLTEARKETVMGQPVPKTPRQLREFLGTAGFCRLWIPGFAEMAAPLYPLTKPGTLFSWGPDQQKAYQEIKQALLTAPALGLPDLTKPFELFVDEKQGYAKGVLTQKLGPWRRPVAYLSKKLDPVAAGWPPCLRMVAAIAVLTKDAGKLTMGQPLVILAPHAVEALVKQPPDRWLSNARMTHYQAMLLDTDRVQFGPVVALNPATLLPLPEEGAPHDCLEILAETHGTRPDLTDQPIPDADHTWYTDGSSFLQEGQRKAGAAVTTETEVIWAGALPAGTSAQRAELIALTQALKMAEGKRLNVYTDSRYAFATAHIHGEIYRRRGWLTSEGREIKNKSEILALLKALFLPKRLSIIHCLGHQKGDSAEARGNRLADQAAREAAIKTPPDTSTLLAGKRTADGSEFEKRTADGSEFESPKKKAKVE

SEQ ID NO: 6067 - protein, 2100 aa, synthetic construct
MPAAKRVKLDGGDKKYSIGLDIGTNSVGWAVITDEYKVPSKKFKVLGNTDRHSIKKNLIGALLFDSGETAEATRLKRTARRRYTRRKNRICYLQEIFSNEMAKVDDSFFHRLEESFLVEEDKKHERHPIFGNIVDEVAYHEKYPTIYHLRKKLVDSTDKADLRLIYLALAHMIKFRGHFLIEGDLNPDNSDVDKLFIQLVQTYNQLFEENPINASGVDAKAILSARLSKSRRLENLIAQLPGEKKNGLFGNLIALSLGLTPNFKSNFDLAEDAKLQLSKDTYDDDLDNLLAQIGDQYADLFLAAKNLSDAILLSDILRVNTEITKAPLSASMIKRYDEHHQDLTLLKALVRQQLPEKYKEIFFDQSKNGYAGYIDGGASQEEFYKFIKPILEKMDGTEELLVKLNREDLLRKQRTFDNGSIPHQIHLGELHAILRRQEDFYPFLKDNREKIEKILTFRIPYYVGPLARGNSRFAWMTRKSEETITPWNFEEVVDKGASAQSFIERMTNFDKNLPNEKVLPKHSLLYEYFTVYNELTKVKYVTEGMRKPAFLSGEQKKAIVDLLFKTNRKVTVKQLKEDYFKKIECFDSVEISGVEDRFNASLGTYHDLLKIIKDKDFLDNEENEDILEDIVLTLTLFEDREMIEERLKTYAHLFDDKVMKQLKRRRYTGWGRLSRKLINGIRDKQSGKTILDFLKSDGFANRNFMQLIHDDSLTFKEDIQKAQVSGQGDSLHEHIANLAGSPAIKKGILQTVKVVDELVKVMGRHKPENIVIEMARENQTTQKGQKNSRERMKRIEEGIKELGSQILKEHPVENTQLQNEKLYLYYLQNGRDMYVDQELDINRLSDYDVDHIVPQSFLKDDSIDNKVLTRSDKARGKSDNVPSEEVVKKMKNYWRQLLNAKLITQRKFDNLTKAERGGLSELDKAGFIKRQLVETRQITKHVAQILDSRMNTKYDENDKLIREVKVITLKSKLVSDFRKDFQFYKVREINNYHHAHDAYLNAVVGTALIKKYPKLESEFVYGDYKVYDVRKMIAKSEQEIGKATAKYFFYSNIMNFFKTEITLANGEIRKRPLIETNGETGEIVWDKGRDFATVRKVLSMPQVNIVKKTEVQTGGFSKESILPKRNSDKLIARKKDWDPKKYGGFDSPTVAYSVLVVAKVEKGKSKKLKSVKELLGITIMERSSFEKNPIDFLEAKGYKEVKKDLIIKLPKYSLFELENGRKRMLASAGELQKGNELALPSKYVNFLYLASHYEKLKGSPEDNEQKQLFVEQHKHYLDEIIEQISEFSKRVILADANLDKVLSAYNKHRDKPIREQAENIIHLFTLTNLGAPAAFKYFDTTIDRKRYTSTKEVLDATLIHQSITGLYETRIDLSQLGGDGGGGSGGSGGSGGSGGSGGTLNIEDEYRLHETSKEPDVSLGSTWLSDFPQAWAETGGMGLAVRQAPLIIPLKATSTPVSIKQYPMSQEARLGIKPHIQRLLDQGILVPCQSPWNTPLLPVKKPGTNDYRPVQDLREVNKRVEDIHPTVPNPYNLLSGLPPSHQWYTVLDLKDAFFCLRLHPTSQPLFAFEWRDPEMGISGQLTWTRLPQGFKNSPTLFNEALHRDLAGFRIQHPDLILLQYVDDLLLAATSELDCQQGTRALLQTLGDLGYRASAKKAQICQKQVKYLGYLLKEGQRWLTEARKETVMGQPIPKTPRQLREFLGTAGFCRLWIPGFAEMAAPLYPLTKPGTLFNWGPDQQKAFQEIKQALLTAPALGLPDLTKPFELFVDEKQGYAKGVLTQKLGPWRRPVAYLSKKLDPVAAGWPPCLRMVAAIAVLTKDAGKLTMGQPLVILAPHAVEALVKQPPDRWLSNARMTHYQALLLDTDRVQFGPVVALNPATLLPLPEEGLQHDCLDILAEAHGTRSDLMDQPLPDADHTWYTDGSSFLQEGQRKAGAAVTTETEVIWARALPAGTSAQRAELIALTQALKMAEGKKLNVYTDSRYAFATAHIHGEIYRRRGWLTSEGKEIKNKDEILALLKALFLPKRLSIIHCPGHQKGNSAEARGNRMADQAAREVATRETPETSTLLAGKRTADGSEFEKRTADGSEFESPKKKAKVE

SEQ ID NO: 6068 - protein, 2100 aa, synthetic construct
MPAAKRVKLDGGDKKYSIGLDIGTNSVGWAVITDEYKVPSKKFKVLGNTDRHSIKKNLIGALLFDSGETAEATRLKRTARRRYTRRKNRICYLQEIFSNEMAKVDDSFFHRLEESFLVEEDKKHERHPIFGNIVDEVAYHEKYPTIYHLRKKLVDSTDKADLRLIYLALAHMIKFRGHFLIEGDLNPDNSDVDKLFIQLVQTYNQLFEENPINASGVDAKAILSARLSKSRRLENLIAQLPGEKKNGLFGNLIALSLGLTPNFKSNFDLAEDAKLQLSKDTYDDDLDNLLAQIGDQYADLFLAAKNLSDAILLSDILRVNTEITKAPLSASMIKRYDEHHQDLTLLKALVRQQLPEKYKEIFFDQSKNGYAGYIDGGASQEEFYKFIKPILEKMDGTEELLVKLNREDLLRKQRTFDNGSIPHQIHLGELHAILRRQEDFYPFLKDNREKIEKILTFRIPYYVGPLARGNSRFAWMTRKSEETITPWNFEEVVDKGASAQSFIERMTNFDKNLPNEKVLPKHSLLYEYFTVYNELTKVKYVTEGMRKPAFLSGEQKKAIVDLLFKTNRKVTVKQLKEDYFKKIECFDSVEISGVEDRFNASLGTYHDLLKIIKDKDFLDNEENEDILEDIVLTLTLFEDREMIEERLKTYAHLFDDKVMKQLKRRRYTGWGRLSRKLINGIRDKQSGKTILDFLKSDGFANRNFMQLIHDDSLTFKEDIQKAQVSGQGDSLHEHIANLAGSPAIKKGILQTVKVVDELVKVMGRHKPENIVIEMARENQTTQKGQKNSRERMKRIEEGIKELGSQILKEHPVENTQLQNEKLYLYYLQNGRDMYVDQELDINRLSDYDVDHIVPQSFLKDDSIDNKVLTRSDKARGKSDNVPSEEVVKKMKNYWRQLLNAKLITQRKFDNLTKAERGGLSELDKAGFIKRQLVETRQITKHVAQILDSRMNTKYDENDKLIREVKVITLKSKLVSDFRKDFQFYKVREINNYHHAHDAYLNAVVGTALIKKYPKLESEFVYGDYKVYDVRKMIAKSEQEIGKATAKYFFYSNIMNFFKTEITLANGEIRKRPLIETNGETGEIVWDKGRDFATVRKVLSMPQVNIVKKTEVQTGGFSKESILPKRNSDKLIARKKDWDPKKYGGFDSPTVAYSVLVVAKVEKGKSKKLKSVKELLGITIMERSSFEKNPIDFLEAKGYKEVKKDLIIKLPKYSLFELENGRKRMLASAGELQKGNELALPSKYVNFLYLASHYEKLKGSPEDNEQKQLFVEQHKHYLDEIIEQISEFSKRVILADANLDKVLSAYNKHRDKPIREQAENIIHLFTLTNLGAPAAFKYFDTTIDRKRYTSTKEVLDATLIHQSITGLYETRIDLSQLGGDGGGGSGGSGGSGGSGGSGGTLNIEDEHRLHETSKEPDVSLGSTWLSDFPQAWAETGGMGLAVRQAPLIIPLKATSTPVSIKQYPMSQEARLGIKPHIQRLLDQGILVPCQSPWNTPLLPVKKPGTNDYRPVQDLREVNKRVEDIHPTVPNPYNLLSGLPPSHQWYTVLDLKDAFFCLRLHPTSQPLFAFEWRDPEMGISGQLTWTRLPQGFKNSPTLFDEALHRDLADFRIQHPDLILLQYVDDLLLAATSELDCQQGTRALLQTLGNLGYRASAKKAQICQKQVKYLGYLLKEGQRWLTEARKETVMGQPTPKTPRQLREFLGTAGFCRLWIPGFAEMAAPLYPLTKTGTLFNWGPDQQKAYQEIKQALLTAPALGLPDLTKPFELFVDEKQGYAKGVLTQKLGPWRRPVAYLSKKLDPVAAGWPPCLRMVAAIAVLTKDAGKLTMGQPLVILAPHAVEALVKQPPDRWLSNARMTHYQALLLDTDRVQFGPVVALNPATLLPLPEEGLQHNCLDILAEAHGTRPDLTDQPLPDADHTWYTDGSSLLQEGQRKAGAAVTTETEVIWAKALPAGTSAQRAELIALTQALKMAEGKKLNVYTDSRYAFATAHIHGEIYRRRGLLTSEGKEIKNKDEILALLKALFLPKRLSIIHCPGHQKGHSAEARGNRMADQAARKAAITETPDTSTLLAGKRTADGSEFEKRTADGSEFESPKKKAKVE

SEQ ID NO: 6069 - protein, 2094 aa, synthetic construct
MPAAKRVKLDGGDKKYSIGLDIGTNSVGWAVITDEYKVPSKKFKVLGNTDRHSIKKNLIGALLFDSGETAEATRLKRTARRRYTRRKNRICYLQEIFSNEMAKVDDSFFHRLEESFLVEEDKKHERHPIFGNIVDEVAYHEKYPTIYHLRKKLVDSTDKADLRLIYLALAHMIKFRGHFLIEGDLNPDNSDVDKLFIQLVQTYNQLFEENPINASGVDAKAILSARLSKSRRLENLIAQLPGEKKNGLFGNLIALSLGLTPNFKSNFDLAEDAKLQLSKDTYDDDLDNLLAQIGDQYADLFLAAKNLSDAILLSDILRVNTEITKAPLSASMIKRYDEHHQDLTLLKALVRQQLPEKYKEIFFDQSKNGYAGYIDGGASQEEFYKFIKPILEKMDGTEELLVKLNREDLLRKQRTFDNGSIPHQIHLGELHAILRRQEDFYPFLKDNREKIEKILTFRIPYYVGPLARGNSRFAWMTRKSEETITPWNFEEVVDKGASAQSFIERMTNFDKNLPNEKVLPKHSLLYEYFTVYNELTKVKYVTEGMRKPAFLSGEQKKAIVDLLFKTNRKVTVKQLKEDYFKKIECFDSVEISGVEDRFNASLGTYHDLLKIIKDKDFLDNEENEDILEDIVLTLTLFEDREMIEERLKTYAHLFDDKVMKQLKRRRYTGWGRLSRKLINGIRDKQSGKTILDFLKSDGFANRNFMQLIHDDSLTFKEDIQKAQVSGQGDSLHEHIANLAGSPAIKKGILQTVKVVDELVKVMGRHKPENIVIEMARENQTTQKGQKNSRERMKRIEEGIKELGSQILKEHPVENTQLQNEKLYLYYLQNGRDMYVDQELDINRLSDYDVDHIVPQSFLKDDSIDNKVLTRSDKARGKSDNVPSEEVVKKMKNYWRQLLNAKLITQRKFDNLTKAERGGLSELDKAGFIKRQLVETRQITKHVAQILDSRMNTKYDENDKLIREVKVITLKSKLVSDFRKDFQFYKVREINNYHHAHDAYLNAVVGTALIKKYPKLESEFVYGDYKVYDVRKMIAKSEQEIGKATAKYFFYSNIMNFFKTEITLANGEIRKRPLIETNGETGEIVWDKGRDFATVRKVLSMPQVNIVKKTEVQTGGFSKESILPKRNSDKLIARKKDWDPKKYGGFDSPTVAYSVLVVAKVEKGKSKKLKSVKELLGITIMERSSFEKNPIDFLEAKGYKEVKKDLIIKLPKYSLFELENGRKRMLASAGELQKGNELALPSKYVNFLYLASHYEKLKGSPEDNEQKQLFVEQHKHYLDEIIEQISEFSKRVILADANLDKVLSAYNKHRDKPIREQAENIIHLFTLTNLGAPAAFKYFDTTIDRKRYTSTKEVLDATLIHQSITGLYETRIDLSQLGGDGGGGSGGSGGSGGSGGSGGTLQLDDEYRLYSPLVKPDQNIQFWLEQFPQAWAETAGMGLAKQVPPQVIQLKASATPVSVRQYPLSKEAQEGIRPHVQRLIQQGILVPVQSPWNTPLLPVRKPGTNDYRPVQDLREVNKRVQDIHPTVPNPYNLLCALPPQRSWYTVLDLKDAFFCLRLHPTSQPLFAFEWRDPGTGRTGQLTWTRLPQGFKNSPTIFDEALHRDLANFRIQHPQVTLLQYVDDLLLAGATKQDCLEGTKALLLELSDLGYRASAKKAQICRREVTYLGYSLRDGQRWLTEARKKTVVQIPAPTTAKQVREFLGTAGFCRLWIPGFATLAAPLYPLTKEKGEFSWAPEHQKAFDAIKKALLSAPALALPDVTKPFTLYVDERKGVARGVLTQTLGPWRRPVAYLSKKLDPVASGWPVCLKAIAAVAILVKDADKLTLGQNITVIAPHALENIVRQPPDRWMTNARMTHYQSLLLTERVTFAPPAALNPATLLPEETDEPVTHDCHQLLIEETGVRKDLTDIPLTGEVLTWFTDGSSYVVEGKRMAGAAVVDGTRTIWASSLPEGTSAQKAELMALTQALRLAEGKSINIYTDSRYAFATAHVHGAIYKQRGLLTSAGREIKNKEEILSLLEALHLPKRLAIIHCPGHQKAKDPISRGNQMADRVAKQAAQGVNLLAGKRTADGSEFEKRTADGSEFESPKKKAKVE

SEQ ID NO: 6070 - protein, 2094 aa, synthetic construct; identical to SEQ ID NO: 6069

SEQ ID NO: 6071 - protein, 2180 aa, synthetic construct
MPAAKRVKLDGGDKKYSIGLDIGTNSVGWAVITDEYKVPSKKFKVLGNTDRHSIKKNLIGALLFDSGETAEATRLKRTARRRYTRRKNRICYLQEIFSNEMAKVDDSFFHRLEESFLVEEDKKHERHPIFGNIVDEVAYHEKYPTIYHLRKKLVDSTDKADLRLIYLALAHMIKFRGHFLIEGDLNPDNSDVDKLFIQLVQTYNQLFEENPINASGVDAKAILSARLSKSRRLENLIAQLPGEKKNGLFGNLIALSLGLTPNFKSNFDLAEDAKLQLSKDTYDDDLDNLLAQIGDQYADLFLAAKNLSDAILLSDILRVNTEITKAPLSASMIKRYDEHHQDLTLLKALVRQQLPEKYKEIFFDQSKNGYAGYIDGGASQEEFYKFIKPILEKMDGTEELLVKLNREDLLRKQRTFDNGSIPHQIHLGELHAILRRQEDFYPFLKDNREKIEKILTFRIPYYVGPLARGNSRFAWMTRKSEETITPWNFEEVVDKGASAQSFIERMTNFDKNLPNEKVLPKHSLLYEYFTVYNELTKVKYVTEGMRKPAFLSGEQKKAIVDLLFKTNRKVTVKQLKEDYFKKIECFDSVEISGVEDRFNASLGTYHDLLKIIKDKDFLDNEENEDILEDIVLTLTLFEDREMIEERLKTYAHLFDDKVMKQLKRRRYTGWGRLSRKLINGIRDKQSGKTILDFLKSDGFANRNFMQLIHDDSLTFKEDIQKAQVSGQGDSLHEHIANLAGSPAIKKGILQTVKVVDELVKVMGRHKPENIVIEMARENQTTQKGQKNSRERMKRIEEGIKELGSQILKEHPVENTQLQNEKLYLYYLQNGRDMYVDQELDINRLSDYDVDHIVPQSFLKDDSIDNKVLTRSDKARGKSDNVPSEEVVKKMKNYWRQLLNAKLITQRKFDNLTKAERGGLSELDKAGFIKRQLVETRQITKHVAQILDSRMNTKYDENDKLIREVKVITLKSKLVSDFRKDFQFYKVREINNYHHAHDAYLNAVVGTALIKKYPKLESEFVYGDYKVYDVRKMIAKSEQEIGKATAKYFFYSNIMNFFKTEITLANGEIRKRPLIETNGETGEIVWDKGRDFATVRKVLSMPQVNIVKKTEVQTGGFSKESILPKRNSDKLIARKKDWDPKKYGGFDSPTVAYSVLVVAKVEKGKSKKLKSVKELLGITIMERSSFEKNPIDFLEAKGYKEVKKDLIIKLPKYSLFELENGRKRMLASAGELQKGNELALPSKYVNFLYLASHYEKLKGSPEDNEQKQLFVEQHKHYLDEIIEQISEFSKRVILADANLDKVLSAYNKHRDKPIREQAENIIHLFTLTNLGAPAAFKYFDTTIDRKRYTSTKEVLDATLIHQSITGLYETRIDLSQLGGDGGGGSGGSGGSGGSGGSGGMDPLQLLQPLEAEIKGTKLKAHWNSGATITCVPQAFLEEEVPIKNIWIKTIHGEKEQPVYYLTFKIQGRKVEAEVISSPYDYILVSPSDIPWLMKKPLQLTTLVPLQEYEERLLKQTMLTGSYKEKLQSLFLKYDALWQHWENQVGHRRIKPHHIATGTVNPRPQKQYPINPKAKASIQTVINDLLKQGVLIQQNSIMNTPVYPVPKPDGKWRMVLDYREVNKTIPLIAAQNQHSAGILSSIFRGKYKTTLDLSNGFWAHSITPESYWLTAFTWLGQQYCWTRLPQGFLNSPALFNADVVDLLKEVPNVQVYVDDIYISHDDPREHLEQLEKVFSLLLNAGYVVSLKKSEIAQHEVEFLGFNITKEGRGLTETFKQKLLNITPPRDLKQLQSILGLLNFARNFIPNFSELVKPLYNIIATAPGKYITWTTDNSQQLQNIISMLNSAENLEERNPEVRLIMKVNTSPSAGYIRFYNEFAKRPIMYLNYVYTKAEVKFTNTEKLLTTIHKGLIKALDLGMGQEILVYSPIVSMTKIQKTPLPERKALPIRWITWMSYLEDPRIQFHYDKTLPELQQVPTVTDDIIAKIKHPSEFSMVFYTDGSAIKHPNVNKSHNAGMGIAQVQFKPEFTVINTWSIPLGDHTAQLAEVAAVEFACKKALKIDGPVLIVTDSFYVAESVNKELPYWQSNGFFNNKKKPLKHVSKWKSIADCIQLKPDIIIIHEKGHQPTASTFHTEGNNLADKLATQGSYVVNAGKRTADGSEFEKRTADGSEFESPKKKAKVE

SEQ ID NO: 6072 - protein, 2180 aa, synthetic construct
MPAAKRVKLDGGDKKYSIGLDIGTNSVGWAVITDEYKVPSKKFKVLGNTDRHSIKKNLIGALLFDSGETAEATRLKRTARRRYTRRKNRICYLQEIFSNEMAKVDDSFFHRLEESFLVEEDKKHERHPIFGNIVDEVAYHEKYPTIYHLRKKLVDSTDKADLRLIYLALAHMIKFRGHFLIEGDLNPDNSDVDKLFIQLVQTYNQLFEENPINASGVDAKAILSARLSKSRRLENLIAQLPGEKKNGLFGNLIALSLGLTPNFKSNFDLAEDAKLQLSKDTYDDDLDNLLAQIGDQYADLFLAAKNLSDAILLSDILRVNTEITKAPLSASMIKRYDEHHQDLTLLKALVRQQLPEKYKEIFFDQSKNGYAGYIDGGASQEEFYKFIKPILEKMDGTEELLVKLNREDLLRKQRTFDNGSIPHQIHLGELHAILRRQEDFYPFLKDNREKIEKILTFRIPYYVGPLARGNSRFAWMTRKSEETITPWNFEEVVDKGASAQSFIERMTNFDKNLPNEKVLPKHSLLYEYFTVYNELTKVKYVTEGMRKPAFLSGEQKKAIVDLLFKTNRKVTVKQLKEDYFKKIECFDSVEISGVEDRFNASLGTYHDLLKIIKDKDFLDNEENEDILEDIVLTLTLFEDREMIEERLKTYAHLFDDKVMKQLKRRRYTGWGRLSRKLINGIRDKQSGKTILDFLKSDGFANRNFMQLIHDDSLTFKEDIQKAQVSGQGDSLHEHIANLAGSPAIKKGILQTVKVVDELVKVMGRHKPENIVIEMARENQTTQKGQKNSRERMKRIEEGIKELGSQILKEHPVENTQLQNEKLYLYYLQNGRDMYVDQELDINRLSDYDVDHIVPQSFLKDDSIDNKVLTRSDKARGKSDNVPSEEVVKKMKNYWRQLLNAKLITQRKFDNLTKAERGGLSELDKAGFIKRQLVETRQITKHVAQILDSRMNTKYDENDKLIREVKVITLKSKLVSDFRKDFQFYKVREINNYHHAHDAYLNAVVGTALIKKYPKLESEFVYGDYKVYDVRKMIAKSEQEIGKATAKYFFYSNIMNFFKTEITLANGEIRKRPLIETNGETGEIVWDKGRDFATVRKVLSMPQVNIVKKTEVQTGGFSKESILPKRNSDKLIARKKDWDPKKYGGFDSPTVAYSVLVVAKVEKGKSKKLKSVKELLGITIMERSSFEKNPIDFLEAKGYKEVKKDLIIKLPKYSLFELENGRKRMLASAGELQKGNELALPSKYVNFLYLASHYEKLKGSPEDNEQKQLFVEQHKHYLDEIIEQISEFSKRVILADANLDKVLSAYNKHRDKPIREQAENIIHLFTLTNLGAPAAFKYFDTTIDRKRYTSTKEVLDATLIHQSITGLYETRIDLSQLGGDGGGGSGGSGGSGGSGGSGGMDPLQLLQPLEAEIKGTKLKAHWNSGATITCVPQAFLEEEVPIKNIWIKTIHGEKEQPVYYLTFKIQGRKVEAEVISSPYDYILVSPSDIPWLMKKPLQLTTLVPLQEYEERLLKQTMLTGSYKEKLQSLFLKYDALWQHWENQVGHRRIKPHHIATGTVNPRPQKQYPINPKAKASIQTVINDLLKQGVLIQQNSIMNTPVYPVPKPDGKWRMVLDYREVNKTIPLIAAQNQHSAGILSSIFRGKYKTTLDLSNGFWAHSITPESYWLTAFTWLGQQYCWTRLPQGFLNSPALFNADVVDLLKEVPNVQVYVDDIYISHDDPREHLEQLEKVFSLLLNAGYVVSLKKSEIAQHEVEFLGFNITKEGRGLTETFKQKLLNITPPRDLKQLQSILGKLNFARNFIPNFSELVKPLYNIIATAPGKYITWTTDNSQQLQNIISMLNSAENLEERNPEVRLIMKVNTSPSAGYIRFYNEFAKRPIMYLNYVYTKAEVKFTNTEKLLTTIHKGLIKALDLGMGQEILVYSPIVSMTKIQKTPLPERKALPIRWITWMSYLEDPRIQFHYDKTLPELQQVPTVTDDIIAKIKHPSEFSMVFYTDGSAIKHPNVNKSHNAGMGIAQVQFKPEFTVINTWSIPLGDHTAQLAEVAAVEFACKKALKIDGPVLIVTDSFYVAESVNKELPYWQSNGFFNNKKKPLKHVSKWKSIADCIQLKPDIIIIHEKGHQPTASTFHTEGNNLADKLATQGSYVVNAGKRTADGSEFEKRTADGSEFESPKKKAKVE

SEQ ID NO: 6073 - protein, 2098 aa, synthetic construct; identical to SEQ ID NO: 4502

SEQ ID NO: 6074 - protein, 2098 aa, synthetic construct
MPAAKRVKLDGGDKKYSIGLDIGTNSVGWAVITDEYKVPSKKFKVLGNTDRHSIKKNLIGALLFDSGETAEATRLKRTARRRYTRRKNRICYLQEIFSNEMAKVDDSFFHRLEESFLVEEDKKHERHPIFGNIVDEVAYHEKYPTIYHLRKKLVDSTDKADLRLIYLALAHMIKFRGHFLIEGDLNPDNSDVDKLFIQLVQTYNQLFEENPINASGVDAKAILSARLSKSRRLENLIAQLPGEKKNGLFGNLIALSLGLTPNFKSNFDLAEDAKLQLSKDTYDDDLDNLLAQIGDQYADLFLAAKNLSDAILLSDILRVNTEITKAPLSASMIKRYDEHHQDLTLLKALVRQQLPEKYKEIFFDQSKNGYAGYIDGGASQEEFYKFIKPILEKMDGTEELLVKLNREDLLRKQRTFDNGSIPHQIHLGELHAILRRQEDFYPFLKDNREKIEKILTFRIPYYVGPLARGNSRFAWMTRKSEETITPWNFEEVVDKGASAQSFIERMTNFDKNLPNEKVLPKHSLLYEYFTVYNELTKVKYVTEGMRKPAFLSGEQKKAIVDLLFKTNRKVTVKQLKEDYFKKIECFDSVEISGVEDRFNASLGTYHDLLKIIKDKDFLDNEENEDILEDIVLTLTLFEDREMIEERLKTYAHLFDDKVMKQLKRRRYTGWGRLSRKLINGIRDKQSGKTILDFLKSDGFANRNFMQLIHDDSLTFKEDIQKAQVSGQGDSLHEHIANLAGSPAIKKGILQTVKVVDELVKVMGRHKPENIVIEMARENQTTQKGQKNSRERMKRIEEGIKELGSQILKEHPVENTQLQNEKLYLYYLQNGRDMYVDQELDINRLSDYDVDHIVPQSFLKDDSIDNKVLTRSDKARGKSDNVPSEEVVKKMKNYWRQLLNAKLITQRKFDNLTKAERGGLSELDKAGFIKRQLVETRQITKHVAQILDSRMNTKYDENDKLIREVKVITLKSKLVSDFRKDFQFYKVREINNYHHAHDAYLNAVVGTALIKKYPKLESEFVYGDYKVYDVRKMIAKSEQEIGKATAKYFFYSNIMNFFKTEITLANGEIRKRPLIETNGETGEIVWDKGRDFATVRKVLSMPQVNIVKKTEVQTGGFSKESILPKRNSDKLIARKKDWDPKKYGGFDSPTVAYSVLVVAKVEKGKSKKLKSVKELLGITIMERSSFEKNPIDFLEAKGYKEVKKDLIIKLPKYSLFELENGRKRMLASAGELQKGNELALPSKYVNFLYLASHYEKLKGSPEDNEQKQLFVEQHKHYLDEIIEQISEFSKRVILADANLDKVLSAYNKHRDKPIREQAENIIHLFTLTNLGAPAAFKYFDTTIDRKRYTSTKEVLDATLIHQSITGLYETRIDLSQLGGDGGGGSGGSGGSGGSGGSGGVLNLEEEYRLHEKPVPSSIDPSWLQLFPTVWAERAGMGLANQVPPVVVELRSGASPVAVRQYPMSKEAREGIRPHIQRFLDLGVLVPCQSPWNTPLLPVKKPGTNDYRPVQDLREINKRVQDIHPTVPNPYNLLSSLPPSHTWYSVLDLKDAFFCLKLHPNSQPLFAFEWRDPEKGNTGQLTWTRLPQGFKNSPTLFNEALHRDLAPFRALNPQVVLLQYVDDLLVAAPTYRDCKEGTQKLLQELSKLGYRVSAKKAQLCQKEVTYLGYLLKEGKRWLTPARKATVMKIPPPTTPRQVREFLGKAGFCRLFIPGFASLAAPLYPLTKPSIPFIWTEEHQKAFDRIKEALLSAPALALPDLTKPFTLYVDERAGVARGVLTQTLGPWRRPVAYLSKKLDPVASGWPTCLKAVAAVALLLKDADKLTLGQNVTVIASHSLESIVRQPPDRWMTNARMTHYQSLLLNERVSFAPPAVLNPATLLPVESEATPVHRCSEILAEETGTRRDLKDQPLPGVPAWYTDGSSFIAEGKRRAGAAIVDGKRTVWASSLPEGTSAQKAELVALTQALRLAEGKDINIYTDSRYAFATAHIHGAIYKQRGWLTSAGKDIKNKEEILALLEAIHLPKRVAIIHCPGHQKGNDPVATGNRRADEAAKQAALSTRVLAETTKPAGKRTADGSEFEKRTADGSEFESPKKKAKVE

SEQ ID NO: 6075 - protein, 2100 aa, synthetic construct
MPAAKRVKLDGGDKKYSIGLDIGTNSVGWAVITDEYKVPSKKFKVLGNTDRHSIKKNLIGALLFDSGETAEATRLKRTARRRYTRRKNRICYLQEIFSNEMAKVDDSFFHRLEESFLVEEDKKHERHPIFGNIVDEVAYHEKYPTIYHLRKKLVDSTDKADLRLIYLALAHMIKFRGHFLIEGDLNPDNSDVDKLFIQLVQTYNQLFEENPINASGVDAKAILSARLSKSRRLENLIAQLPGEKKNGLFGNLIALSLGLTPNFKSNFDLAEDAKLQLSKDTYDDDLDNLLAQIGDQYADLFLAAKNLSDAILLSDILRVNTEITKAPLSASMIKRYDEHHQDLTLLKALVRQQLPEKYKEIFFDQSKNGYAGYIDGGASQEEFYKFIKPILEKMDGTEELLVKLNREDLLRKQRTFDNGSIPHQIHLGELHAILRRQEDFYPFLKDNREKIEKILTFRIPYYVGPLARGNSRFAWMTRKSEETITPWNFEEVVDKGASAQSFIERMTNFDKNLPNEKVLPKHSLLYEYFTVYNELTKVKYVTEGMRKPAFLSGEQKKAIVDLLFKTNRKVTVKQLKEDYFKKIECFDSVEISGVEDRFNASLGTYHDLLKIIKDKDFLDNEENEDILEDIVLTLTLFEDREMIEERLKTYAHLFDDKVMKQLKRRRYTGWGRLSRKLINGIRDKQSGKTILDFLKSDGFANRNFMQLIHDDSLTFKEDIQKAQVSGQGDSLHEHIANLAGSPAIKKGILQTVKVVDELVKVMGRHKPENIVIEMARENQTTQKGQKNSRERMKRIEEGIKELGSQILKEHPVENTQLQNEKLYLYYLQNGRDMYVDQELDINRLSDYDVDHIVPQSFLKDDSIDNKVLTRSDKARGKSDNVPSEEVVKKMKNYWRQLLNAKLITQRKFDNLTKAERGGLSELDKAGFIKRQLVETRQITKHVAQILDSRMNTKYDENDKLIREVKVITLKSKLVSDFRKDFQFYKVREINNYHHAHDAYLNAVVGTALIKKYPKLESEFVYGDYKVYDVRKMIAKSEQEIGKATAKYFFYSNIMNFFKTEITLANGEIRKRPLIETNGETGEIVWDKGRDFATVRKVLSMPQVNIVKKTEVQTGGFSKESILPKRNSDKLIARKKDWDPKKYGGFDSPTVAYSVLVVAKVEKGKSKKLKSVKELLGITIMERSSFEKNPIDFLEAKGYKEVKKDLIIKLPKYSLFELENGRKRMLASAGELQKGNELALPSKYVNFLYLASHYEKLKGSPEDNEQKQLFVEQHKHYLDEIIEQISEFSKRVILADANLDKVLSAYNKHRDKPIREQAENIIHLFTLTNLGAPAAFKYFDTTIDRKRYTSTKEVLDATLIHQSITGLYETRIDLSQLGGDGGGGSGGSGGSGGSGGSGGTLNIEDEYRLHETSKEPDVPLGSTWLSDFPQAWAETGGMGLAVRQAPLIIPLKATSTPVSIKQYPMSQEARLGIKPHIQRLLDQGILVPCQSPWNTPLLPVKKPGTNDYRPVQDLREVNKRVEDIHPTVPNPYNLLSGLPPSHQWYTVLDLKDAFFCLRLHPTSQPLFAFEWRDPEMGISGQLTWTRLPQGFKNSPTLFNEALHRDLADFRIQHPDLILLQYVDDLLLAATSEQDCQRGTRALLQTLGNLGYRASAKKAQICQKQVKYLGYLLKEGQRWLTEARKETVMGQPTPKTPRQLREFLGKAGFCRLFIPGFAEMAAPLYPLTKPGTLFNWGPDQQKAYQEIKQALLTAPALGLPDLTKPFELFVDEKQGYAKGVLTQKLGPWRRPVAYLSKKLDPVAAGWPPCLRMVAAIAVLTKDAGKLTMGQPLVILAPHAVEALVKQPPDRWLSNARMTHYQAMLLDTDRVQFGPVVALNPATLLPLPEKEAPHDCLEILAETHGTRPDLTDQPIPDADYTWYTDGSSFLQEGQRRAGAAVTTETEVIWARALPAGTSAQRAELIALTQALKMAEGKKLNVYTDSRYAFATAHVHGEIYRRRGWLTSEGREIKNKNEILALLKALFLPKRLSIIHCPGHQKGNSAEARGNRMADQAAREAAMKAVLETSTLLAGKRTADGSEFEKRTADGSEFESPKKKAKVE

SEQ ID NO: 6076 - protein, 2105 aa, synthetic construct
MPAAKRVKLDGGDKKYSIGLDIGTNSVGWAVITDEYKVPSKKFKVLGNTDRHSIKKNLIGALLFDSGETAEATRLKRTARRRYTRRKNRICYLQEIFSNEMAKVDDSFFHRLEESFLVEEDKKHERHPIFGNIVDEVAYHEKYPTIYHLRKKLVDSTDKADLRLIYLALAHMIKFRGHFLIEGDLNPDNSDVDKLFIQLVQTYNQLFEENPINASGVDAKAILSARLSKSRRLENLIAQLPGEKKNGLFGNLIALSLGLTPNFKSNFDLAEDAKLQLSKDTYDDDLDNLLAQIGDQYADLFLAAKNLSDAILLSDILRVNTEITKAPLSASMIKRYDEHHQDLTLLKALVRQQLPEKYKEIFFDQSKNGYAGYIDGGASQEEFYKFIKPILEKMDGTEELLVKLNREDLLRKQRTFDNGSIPHQIHLGELHAILRRQEDFYPFLKDNREKIEKILTFRIPYYVGPLARGNSRFAWMTRKSEETITPWNFEEVVDKGASAQSFIERMTNFDKNLPNEKVLPKHSLLYEYFTVYNELTKVKYVTEGMRKPAFLSGEQKKAIVDLLFKTNRKVTVKQLKEDYFKKIECFDSVEISGVEDRFNASLGTYHDLLKIIKDKDFLDNEENEDILEDIVLTLTLFEDREMIEERLKTYAHLFDDKVMKQLKRRRYTGWGRLSRKLINGIRDKQSGKTILDFLKSDGFANRNFMQLIHDDSLTFKEDIQKAQVSGQGDSLHEHIANLAGSPAIKKGILQTVKVVDELVKVMGRHKPENIVIEMARENQTTQKGQKNSRERMKRIEEGIKELGSQILKEHPVENTQLQNEKLYLYYLQNGRDMYVDQELDINRLSDYDVDHIVPQSFLKDDSIDNKVLTRSDKARGKSDNVPSEEVVKKMKNYWRQLLNAKLITQRKFDNLTKAERGGLSELDKAGFIKRQLVETRQITKHVAQILDSRMNTKYDENDKLIREVKVITLKSKLVSDFRKDFQFYKVREINNYHHAHDAYLNAVVGTALIKKYPKLESEFVYGDYKVYDVRKMIAKSEQEIGKATAKYFFYSNIMNFFKTEITLANGEIRKRPLIETNGETGEIVWDKGRDFATVRKVLSMPQVNIVKKTEVQTGGFSKESILPKRNSDKLIARKKDWDPKKYGGFDSPTVAYSVLVVAKVEKGKSKKLKSVKELLGITIMERSSFEKNPIDFLEAKGYKEVKKDLIIKLPKYSLFELENGRKRMLASAGELQKGNELALPSKYVNFLYLASHYEKLKGSPEDNEQKQLFVEQHKHYLDEIIEQISEFSKRVILADANLDKVLSAYNKHRDKPIREQAENIIHLFTLTNLGAPAAFKYFDTTIDRKRYTSTKEVLDATLIHQSITGLYETRIDLSQLGGDGGGGSGGSGGSGGSGGSGGSGGTAPLEEEYRLFLEAPIQNVTLLEQWKREIPKVWAEINPPGLASTQAPIHVQLLSTALPVRVRQYPITLEAKRSLRETIRKFRAAGILRPVHSPWNTPLLPVRKSGTSEYRMVQDLREVNKRVETIHPTVPNPYTLLSLLPPDRIWYSVLDLKDAFFCIPLAPESQLIFAFEWADAEEGESGQLTWTRLPQGFKNSPTLFDEALNRDLQGFRLDHPSVSLLQYVDDLLIAADTQAACLSATRDLLMTLAELGYRVSGKKAQLCQEEVTYLGFKIHKGSRSLSNSRTQAILQIPVPKTKRQVREFLGTIGYCRLWIPGFAELAQPLYAATRGGNDPLVWGEKEEEAFQSLKLALTQPPALALPSLDKPFQLFVEETSGAAKGVLTQALGPWKRPVAYLSKRLDPVAAGWPRCLRAIAAAALLTREASKLTFGQDIEITSSHNLESLLRSPPDKWLTNARITQYQVLLLDPPRVRFKQTAALNPATLLPETDDTLPIHHCLDTLDSLTSTRPDLTDQPLAQAEATLFTDGSSYIRDGKRYAGAAVVTLDSVIWAEPLPIGTSAQKAELIALTKALEWSKDKSVNIYTDSRYAFATLHVHGMIYRERGLLTAGGKAIKNAPEILALLTAVWLPKRVAVMHCKGHQKDDAPTSTGNRRADEVAREVAIRPLSTQATISAGKRTADGSEFEKRTADGSEFESPKKKAKVE

SEQ ID NO: 6077 - protein, 2105 aa, synthetic construct
MPAAKRVKLDGGDKKYSIGLDIGTNSVGWAVITDEYKVPSKKFKVLGNTDRHSIKKNLIGALLFDSGETAEATRLKRTARRRYTRRKNRICYLQEIFSNEMAKVDDSFFHRLEESFLVEEDKKHERHPIFGNIVDEVAYHEKYPTIYHLRKKLVDSTDKADLRLIYLALAHMIKFRGHFLIEGDLNPDNSDVDKLFIQLVQTYNQLFEENPINASGVDAKAILSARLSKSRRLENLIAQLPGEKKNGLFGNLIALSLGLTPNFKSNFDLAEDAKLQLSKDTYDDDLDNLLAQIGDQYADLFLAAKNLSDAILLSDILRVNTEITKAPLSASMIKRYDEHHQDLTLLKALVRQQLPEKYKEIFFDQSKNGYAGYIDGGASQEEFYKFIKPILEKMDGTEELLVKLNREDLLRKQRTFDNGSIPHQIHLGELHAILRRQEDFYPFLKDNREKIEKILTFRIPYYVGPLARGNSRFAWMTRKSEETITPWNFEEVVDKGASAQSFIERMTNFDKNLPNEKVLPKHSLLYEYFTVYNELTKVKYVTEGMRKPAFLSGEQKKAIVDLLFKTNRKVTVKQLKEDYFKKIECFDSVEISGVEDRFNASLGTYHDLLKIIKDKDFLDNEENEDILEDIVLTLTLFEDREMIEERLKTYAHLFDDKVMKQLKRRRYTGWGRLSRKLINGIRDKQSGKTILDFLKSDGFANRNFMQLIHDDSLTFKEDIQKAQVSGQGDSLHEHIANLAGSPAIKKGILQTVKVVDELVKVMGRHKPENIVIEMARENQTTQKGQKNSRERMKRIEEGIKELGSQILKEHPVENTQLQNEKLYLYYLQNGRDMYVDQELDINRLSDYDVDHIVPQSFLKDDSIDNKVLTRSDKARGKSDNVPSEEVVKKMKNYWRQLLNAKLITQRKFDNLTKAERGGLSELDKAGFIKRQLVETRQITKHVAQILDSRMNTKYDENDKLIREVKVITLKSKLVSDFRKDFQFYKVREINNYHHAHDAYLNAVVGTALIKKYPKLESEFVYGDYKVYDVRKMIAKSEQEIGKATAKYFFYSNIMNFFKTEITLANGEIRKRPLIETNGETGEIVWDKGRDFATVRKVLSMPQVNIVKKTEVQTGGFSKESILPKRNSDKLIARKKDWDPKKYGGFDSPTVAYSVLVVAKVEKGKSKKLKSVKELLGITIMERSSFEKNPIDFLEAKGYKEVKKDLIIKLPKYSLFELENGRKRMLASAGELQKGNELALPSKYVNFLYLASHYEKLKGSPEDNEQKQLFVEQHKHYLDEIIEQISEFSKRVILADANLDKVLSAYNKHRDKPIREQAENIIHLFTLTNLGAPAAFKYFDTTIDRKRYTSTKEVLDATLIHQSITGLYETRIDLSQLGGDGGGGSGGSGGSGGSGGSGGSGGTAPLEEEYRLFLEAPIQNVTLLEQWKREIPKVWAEINPPGLASTQAPIHVQLLSTALPVRVRQYPITLEAKRSLRETIRKFRAAGILRPVHSPWNTPLLPVRKSGTSEYRMVQDLREVNKRVETIHPTVPNPYTLLSLLPPDRIWYSVLDLKDAFFCIPLAPESQLIFAFEWADAEEGESGQLTWTRLPQGFKNSPTLFNEALNRDLQGFRLDHPSVSLLQYVDDLLIAADTQAACLSATRDLLMTLAELGYRVSGKKAQLCQEEVTYLGFKIHKGSRSLSNSRTQAILQIPVPKTKRQVREFLGTIGYCRLWIPGFAELAQPLYAATRPGNDPLVWGEKEEEAFQSLKLALTQPPALALPSLDKPFQLFVEETSGAAKGVLTQALGPWKRPVAYLSKRLDPVAAGWPRCLRAIAAAALLTREASKLTFGQDIEITSSHNLESLLRSPPDKWLTNARITQYQVLLLDPPRVRFKQTAALNPATLLPETDDTLPIHHCLDTLDSLTSTRPDLTDQPLAQAEATLFTDGSSYIRDGKRYAGAAVVTLDSVIWAEPLPIGTSAQKAELIALTKALEWSKDKSVNIYTDSRYAFATLHVHGMIYRERGWLTAGGKAIKNAPEILALLTAVWLPKRVAVMHCKGHQKDDAPTSTGNRRADEVAREVAIRPLSTQATISAGKRTADGSEFEKRTADGSEFESPKKKAKVE

SEQ ID NO: 6078 - protein, 2105 aa, synthetic construct
MPAAKRVKLDGGDKKYSIGLDIGTNSVGWAVITDEYKVPSKKFKVLGNTDRHSIKKNLIGALLFDSGETAEATRLKRTARRRYTRRKNRICYLQEIFSNEMAKVDDSFFHRLEESFLVEEDKKHERHPIFGNIVDEVAYHEKYPTIYHLRKKLVDSTDKADLRLIYLALAHMIKFRGHFLIEGDLNPDNSDVDKLFIQLVQTYNQLFEENPINASGVDAKAILSARLSKSRRLENLIAQLPGEKKNGLFGNLIALSLGLTPNFKSNFDLAEDAKLQLSKDTYDDDLDNLLAQIGDQYADLFLAAKNLSDAILLSDILRVNTEITKAPLSASMIKRYDEHHQDLTLLKALVRQQLPEKYKEIFFDQSKNGYAGYIDGGASQEEFYKFIKPILEKMDGTEELLVKLNREDLLRKQRTFDNGSIPHQIHLGELHAILRRQEDFYPFLKDNREKIEKILTFRIPYYVGPLARGNSRFAWMTRKSEETITPWNFEEVVDKGASAQSFIERMTNFDKNLPNEKVLPKHSLLYEYFTVYNELTKVKYVTEGMRKPAFLSGEQKKAIVDLLFKTNRKVTVKQLKEDYFKKIECFDSVEISGVEDRFNASLGTYHDLLKIIKDKDFLDNEENEDILEDIVLTLTLFEDREMIEERLKTYAHLFDDKVMKQLKRRRYTGWGRLSRKLINGIRDKQSGKTILDFLKSDGFANRNFMQLIHDDSLTFKEDIQKAQVSGQGDSLHEHIANLAGSPAIKKGILQTVKVVDELVKVMGRHKPENIVIEMARENQTTQKGQKNSRERMKRIEEGIKELGSQILKEHPVENTQLQNEKLYLYYLQNGRDMYVDQELDINRLSDYDVDHIVPQSFLKDDSIDNKVLTRSDKARGKSDNVPSEEVVKKMKNYWRQLLNAKLITQRKFDNLTKAERGGLSELDKAGFIKRQLVETRQITKHVAQILDSRMNTKYDENDKLIREVKVITLKSKLVSDFRKDFQFYKVREINNYHHAHDAYLNAVVGTALIKKYPKLESEFVYGDYKVYDVRKMIAKSEQEIGKATAKYFFYSNIMNFFKTEITLANGEIRKRPLIETNGETGEIVWDKGRDFATVRKVLSMPQVNIVKKTEVQTGGFSKESILPKRNSDKLIARKKDWDPKKYGGFDSPTVAYSVLVVAKVEKGKSKKLKSVKELLGITIMERSSFEKNPIDFLEAKGYKEVKKDLIIKLPKYSLFELENGRKRMLASAGELQKGNELALPSKYVNFLYLASHYEKLKGSPEDNEQKQLFVEQHKHYLDEIIEQISEFSKRVILADANLDKVLSAYNKHRDKPIREQAENIIHLFTLTNLGAPAAFKYFDTTIDRKRYTSTKEVLDATLIHQSITGLYETRIDLSQLGGDGGGGSGGSGGSGGSGGSGGSGGTAPLEEEYRLFLEAPIQNVTLLEQWKREIPKVWAEINPPGLASTQAPIHVQLLSTALPVRVRQYPITLEAKRSLRETIRKFRAAGILRPVHSPWNTPLLPVRKSGTSEYRMVQDLREVNKRVETIHPTVPNPYTLLSLLPPDRIWYSVLDLKDAFFCIPLAPESQLIFAFEWADAEEGESGQLTWTRLPQGFKNSPTLFNEALNRDLQGFRLDHPSVSLLQYVDDLLIAADTQAACLSATRDLLMTLAELGYRVSGKKAQLCQEEVTYLGFKIHKGSRSLSNSRTQAILQIPVPKTKRQVREFLGKIGYCRLFIPGFAELAQPLYAATRPGNDPLVWGEKEEEAFQSLKLALTQPPALALPSLDKPFQLFVEETSGAAKGVLTQALGPWKRPVAYLSKRLDPVAAGWPRCLRAIAAAALLTREASKLTFGQDIEITSSHNLESLLRSPPDKWLTNARITQYQVLLLDPPRVRFKQTAALNPATLLPETDDTLPIHHCLDTLDSLTSTRPDLTDQPLAQAEATLFTDGSSYIRDGKRYAGAAVVTLDSVIWAEPLPIGTSAQKAELIALTKALEWSKDKSVNIYTDSRYAFATLHVHGMIYRERGWLTAGGKAIKNAPEILALLTAVWLPKRVAVMHCKGHQKDDAPTSTGNRRADEVAREVAIRPLSTQATISAGKRTADGSEFEKRTADGSEFESPKKKAKVE

SEQ ID NO: 6079 - protein, 2109 aa, synthetic construct
MPAAKRVKLDGGDKKYSIGLDIGTNSVGWAVITDEYKVPSKKFKVLGNTDRHSIKKNLIGALLFDSGETAEATRLKRTARRRYTRRKNRICYLQEIFSNEMAKVDDSFFHRLEESFLVEEDKKHERHPIFGNIVDEVAYHEKYPTIYHLRKKLVDSTDKADLRLIYLALAHMIKFRGHFLIEGDLNPDNSDVDKLFIQLVQTYNQLFEENPINASGVDAKAILSARLSKSRRLENLIAQLPGEKKNGLFGNLIALSLGLTPNFKSNFDLAEDAKLQLSKDTYDDDLDNLLAQIGDQYADLFLAAKNLSDAILLSDILRVNTEITKAPLSASMIKRYDEHHQDLTLLKALVRQQLPEKYKEIFFDQSKNGYAGYIDGGASQEEFYKFIKPILEKMDGTEELLVKLNREDLLRKQRTFDNGSIPHQIHLGELHAILRRQEDFYPFLKDNREKIEKILTFRIPYYVGPLARGNSRFAWMTRKSEETITPWNFEEVVDKGASAQSFIERMTNFDKNLPNEKVLPKHSLLYEYFTVYNELTKVKYVTEGMRKPAFLSGEQKKAIVDLLFKTNRKVTVKQLKEDYFKKIECFDSVEISGVEDRFNASLGTYHDLLKIIKDKDFLDNEENEDILEDIVLTLTLFEDREMIEERLKTYAHLFDDKVMKQLKRRRYTGWGRLSRKLINGIRDKQSGKTILDFLKSDGFANRNFMQLIHDDSLTFKEDIQKAQVSGQGDSLHEHIANLAGSPAIKKGILQTVKVVDELVKVMGRHKPENIVIEMARENQTTQKGQKNSRERMKRIEEGIKELGSQILKEHPVENTQLQNEKLYLYYLQNGRDMYVDQELDINRLSDYDVDHIVPQSFLKDDSIDNKVLTRSDKARGKSDNVPSEEVVKKMKNYWRQLLNAKLITQRKFDNLTKAERGGLSELDKAGFIKRQLVETRQITKHVAQILDSRMNTKYDENDKLIREVKVITLKSKLVSDFRKDFQFYKVREINNYHHAHDAYLNAVVGTALIKKYPKLESEFVYGDYKVYDVRKMIAKSEQEIGKATAKYFFYSNIMNFFKTEITLANGEIRKRPLIETNGETGEIVWDKGRDFATVRKVLSMPQVNIVKKTEVQTGGFSKESILPKRNSDKLIARKKDWDPKKYGGFDSPTVAYSVLVVAKVEKGKSKKLKSVKELLGITIMERSSFEKNPIDFLEAKGYKEVKKDLIIKLPKYSLFELENGRKRMLASAGELQKGNELALPSKYVNFLYLASHYEKLKGSPEDNEQKQLFVEQHKHYLDEIIEQISEFSKRVILADANLDKVLSAYNKHRDKPIREQAENIIHLFTLTNLGAPAAFKYFDTTIDRKRYTSTKEVLDATLIHQSITGLYETRIDLSQLGGDGGGGSGGSGGSGGSGGSGGSGGTVSLQDEHRLFDIPVTTSLPDVWLQDFPQAWAETGGLGRAKCQAPIIIDLKPTAVPVSIKQYPMSLEAHMGIRQHIIKFLELGVLRPCRSPWNTPLLPVKKPGTQDYRPVQDLREINKRTVDIHPTVPNPYNLLSTLKPDYSWYTVLDLKDAFFCLPLAPQSQELFAFEWKDPERGISGQLTWTRLPQGFKNSPTLFNEALHRDLTDFRTQHPEVTLLQYVDDLLLAAPTKKACTQGTRHLLQELGEKGYRASAKKAQICQTKVTYLGYILSEGKRWLTPGRIETVARIPPPRNPREVREFLGTAGFCRLWIPGFAELAAPLYALTKPSTPFTWQTEHQLAFEALKKALLSAPALGLPDTSKPFTLFLDERQGIAKGVLTQKLGPWKRPVAYLSKKLDPVAAGWPPCLRIMAATAMLVKDSAKLTLGQPLTVITPHTLEAIVRQPPDRWITNARLTHYQALLLDTDRVQFGPPVTLNPATLLPVPENQPSPHDCRQVLAETHGTREDLKDQELPDADHTWYTDGSSYLDSGTRRAGAAVVDGHNTIWAQSLPPGTSAQKAELIALTKALELSKGKKANIYTDSRYAFATAHTHGSIYERRGWLTSEGKEIKNKAEIIALLKALFLPQEVAIIHCPGHQKGQDPVAVGNRQADRVARQAAMAEVLTLATEPDNTSHITAGKRTADGSEFEKRTADGSEFESPKKKAKVE

SEQ ID NO: 6080 - protein, 2094 aa, synthetic construct
MPAAKRVKLDGGDKKYSIGLDIGTNSVGWAVITDEYKVPSKKFKVLGNTDRHSIKKNLIGALLFDSGETAEATRLKRTARRRYTRRKNRICYLQEIFSNEMAKVDDSFFHRLEESFLVEEDKKHERHPIFGNIVDEVAYHEKYPTIYHLRKKLVDSTDKADLRLIYLALAHMIKFRGHFLIEGDLNPDNSDVDKLFIQLVQTYNQLFEENPINASGVDAKAILSARLSKSRRLENLIAQLPGEKKNGLFGNLIALSLGLTPNFKSNFDLAEDAKLQLSKDTYDDDLDNLLAQIGDQYADLFLAAKNLSDAILLSDILRVNTEITKAPLSASMIKRYDEHHQDLTLLKALVRQQLPEKYKEIFFDQSKNGYAGYIDGGASQEEFYKFIKPILEKMDGTEELLVKLNREDLLRKQRTFDNGSIPHQIHLGELHAILRRQEDFYPFLKDNREKIEKILTFRIPYYVGPLARGNSRFAWMTRKSEETITPWNFEEVVDKGASAQSFIERMTNFDKNLPNEKVLPKHSLLYEYFTVYNELTKVKYVTEGMRKPAFLSGEQKKAIVDLLFKTNRKVTVKQLKEDYFKKIECFDSVEISGVEDRFNASLGTYHDLLKIIKDKDFLDNEENEDILEDIVLTLTLFEDREMIEERLKTYAHLFDDKVMKQLKRRRYTGWGRLSRKLINGIRDKQSGKTILDFLKSDGFANRNFMQLIHDDSLTFKEDIQKAQVSGQGDSLHEHIANLAGSPAIKKGILQTVKVVDELVKVMGRHKPENIVIEMARENQTTQKGQKNSRERMKRIEEGIKELGSQILKEHPVENTQLQNEKLYLYYLQNGRDMYVDQELDINRLSDYDVDHIVPQSFLKDDSIDNKVLTRSDKARGKSDNVPSEEVVKKMKNYWRQLLNAKLITQRKFDNLTKAERGGLSELDKAGFIKRQLVETRQITKHVAQILDSRMNTKYDENDKLIREVKVITLKSKLVSDFRKDFQFYKVREINNYHHAHDAYLNAVVGTALIKKYPKLESEFVYGDYKVYDVRKMIAKSEQEIGKATAKYFFYSNIMNFFKTEITLANGEIRKRPLIETNGETGEIVWDKGRDFATVRKVLSMPQVNIVKKTEVQTGGFSKESILPKRNSDKLIARKKDWDPKKYGGFDSPTVAYSVLVVAKVEKGKSKKLKSVKELLGITIMERSSFEKNPIDFLEAKGYKEVKKDLIIKLPKYSLFELENGRKRMLASAGELQKGNELALPSKYVNFLYLASHYEKLKGSPEDNEQKQLFVEQHKHYLDEIIEQISEFSKRVILADANLDKVLSAYNKHRDKPIREQAENIIHLFTLTNLGAPAAFKYFDTTIDRKRYTSTKEVLDATLIHQSITGLYETRIDLSQLGGDGGGGSGGSGGSGGSGGSGGSGGVPWILKKPLELTIKLDLEEQQGTLLNNSILSKKGKEELKQLFEKYSALWQSWENQVGHRRIRPHKIATGTVKPTPQKQYHINPKAKPDIQIVINDLLKQGVLIQKESTMNTPVYPVPKPNGRWRMVLDYRAVNKVTPLIAVQNQHSYGILGSLFKGRYKTTIDLSNGFWAHPIVPEDYWITAFTWQGKQYCWTVLPQGFLNSPGLFTGDVVDLLQGIPNVEVYVDDVYISHDSEKEHLEYLDILFNRLKEAGYIISLKKSNIANSIVDFLGFQITNEGRGLTDTFKEKLENITAPTTLKQLQSILGLLNFARNFIPDFTELIAPLYALIPKSTKNYVPWQIEHSTTLETLITKLNGAEYLQGRKGDKTLIMKVNASYTTGYIRYYNEGEKKPISYVSIVFSKTELKFTELEKLLTTVHKGLLKALDLSMGQNIHVYSPIVSMQNIQKTPQTAKKALASRWLSWLSYLEDPRIRFFYDPQMPALKDLPAVDTGKDNKKHPSNFQHIFYTDGSAITSPTKEGHLNAGMGIVYFINKDGNLQKQQEWSISLGNHTAQFAEIAAFEFALKKCLPLGGNILVVTDSNYVAKAYNEELDVWASNGFVNNRKKPLKHISKWKSVADLKRLRPDVVVTHEPGHQKLDSSPHAYGNNLADQLATQASFKVHAGKRTADGSEFEKRTADGSEFESPKKKAKVE

SEQ ID NO: 6081 - protein, 2180 aa, synthetic construct
MPAAKRVKLDGGDKKYSIGLDIGTNSVGWAVITDEYKVPSKKFKVLGNTDRHSIKKNLIGALLFDSGETAEATRLKRTARRRYTRRKNRICYLQEIFSNEMAKVDDSFFHRLEESFLVEEDKKHERHPIFGNIVDEVAYHEKYPTIYHLRKKLVDSTDKADLRLIYLALAHMIKFRGHFLIEGDLNPDNSDVDKLFIQLVQTYNQLFEENPINASGVDAKAILSARLSKSRRLENLIAQLPGEKKNGLFGNLIALSLGLTPNFKSNFDLAEDAKLQLSKDTYDDDLDNLLAQIGDQYADLFLAAKNLSDAILLSDILRVNTEITKAPLSASMIKRYDEHHQDLTLLKALVRQQLPEKYKEIFFDQSKNGYAGYIDGGASQEEFYKFIKPILEKMDGTEELLVKLNREDLLRKQRTFDNGSIPHQIHLGELHAILRRQEDFYPFLKDNREKIEKILTFRIPYYVGPLARGNSRFAWMTRKSEETITPWNFEEVVDKGASAQSFIERMTNFDKNLPNEKVLPKHSLLYEYFTVYNELTKVKYVTEGMRKPAFLSGEQKKAIVDLLFKTNRKVTVKQLKEDYFKKIECFDSVEISGVEDRFNASLGTYHDLLKIIKDKDFLDNEENEDILEDIVLTLTLFEDREMIEERLKTYAHLFDDKVMKQLKRRRYTGWGRLSRKLINGIRDKQSGKTILDFLKSDGFANRNFMQLIHDDSLTFKEDIQKAQVSGQGDSLHEHIANLAGSPAIKKGILQTVKVVDELVKVMGRHKPENIVIEMARENQTTQKGQKNSRERMKRIEEGIKELGSQILKEHPVENTQLQNEKLYLYYLQNGRDMYVDQELDINRLSDYDVDHIVPQSFLKDDSIDNKVLTRSDKARGKSDNVPSEEVVKKMKNYWRQLLNAKLITQRKFDNLTKAERGGLSELDKAGFIKRQLVETRQITKHVAQILDSRMNTKYDENDKLIREVKVITLKSKLVSDFRKDFQFYKVREINNYHHAHDAYLNAVVGTALIKKYPKLESEFVYGDYKVYDVRKMIAKSEQEIGKATAKYFFYSNIMNFFKTEITLANGEIRKRPLIETNGETGEIVWDKGRDFATVRKVLSMPQVNIVKKTEVQTGGFSKESILPKRNSDKLIARKKDWDPKKYGGFDSPTVAYSVLVVAKVEKGKSKKLKSVKELLGITIMERSSFEKNPIDFLEAKGYKEVKKDLIIKLPKYSLFELENGRKRMLASAGELQKGNELALPSKYVNFLYLASHYEKLKGSPEDNEQKQLFVEQHKHYLDEIIEQISEFSKRVILADANLDKVLSAYNKHRDKPIREQAENIIHLFTLTNLGAPAAFKYFDTTIDRKRYTSTKEVLDATLIHQSITGLYETRIDLSQLGGDGGGGSGGSGGSGGSGGSGGSGGMDLLKPLTVERKGVKIKGYWNSQADITCVPKDLLQGEEPVRQQNVTTIHGTQEGDVYYVNLKIDGRRINTEVIGTTLDYAIITPGDVPWILKKPLELTIKLDLEEQQGTLLNNSILSKKGKEELKQLFEKYSALWQSWENQVGHRRIRPHKIATGTVKPTPQKQYHINPKAKPDIQIVINDLLKQGVLIQKESTMNTPVYPVPKPNGRWRMVLDYRAVNKVTPLIAVQNQHSYGILGSLFKGRYKTTIDLSNGFWAHPIVPEDYWITAFTWQGKQYCWTVLPQGFLNSPGLFNGDVVDLLQGIPNVEVYVDDVYISHDSEKEHLEYLDILFNRLKEAGYIISLKKSNIANSIVDFLGFQITNEGRGLTDTFKEKLENITAPTTLKQLQSILGLLNFARNFIPDFTELIAPLYALIPKSPKNYVPWQIEHSTTLETLITKLNGAEYLQGRKGDKTLIMKVNASYTTGYIRYYNEGEKKPISYVSIVFSKTELKFTELEKLLTTVHKGLLKALDLSMGQNIHVYSPIVSMQNIQKTPQTAKKALASRWLSWLSYLEDPRIRFFYDPQMPALKDLPAVDTGKDNKKHPSNFQHIFYTDGSAITSPTKEGHLNAGMGIVYFINKDGNLQKQQEWSISLGNHTAQFAEIAAFEFALKKCLPLGGNILVVTDSNYVAKAYNEELDVWASNGFVNNRKKPLKHISKWKSVADLKRLRPDVVVTHEPGHQKLDSSPHAYGNNLADQLATQASFKVHAGKRTADGSEFEKRTADGSEFESPKKKAKVE

SEQ ID NO: 6082 - protein, 2102 aa, synthetic construct
MPAAKRVKLDGGDKKYSIGLDIGTNSVGWAVITDEYKVPSKKFKVLGNTDRHSIKKNLIGALLFDSGETAEATRLKRTARRRYTRRKNRICYLQEIFSNEMAKVDDSFFHRLEESFLVEEDKKHERHPIFGNIVDEVAYHEKYPTIYHLRKKLVDSTDKADLRLIYLALAHMIKFRGHFLIEGDLNPDNSDVDKLFIQLVQTYNQLFEENPINASGVDAKAILSARLSKSRRLENLIAQLPGEKKNGLFGNLIALSLGLTPNFKSNFDLAEDAKLQLSKDTYDDDLDNLLAQIGDQYADLFLAAKNLSDAILLSDILRVNTEITKAPLSASMIKRYDEHHQDLTLLKALVRQQLPEKYKEIFFDQSKNGYAGYIDGGASQEEFYKFIKPILEKMDGTEELLVKLNREDLLRKQRTFDNGSIPHQIHLGELHAILRRQEDFYPFLKDNREKIEKILTFRIPYYVGPLARGNSRFAWMTRKSEETITPWNFEEVVDKGASAQSFIERMTNFDKNLPNEKVLPKHSLLYEYFTVYNELTKVKYVTEGMRKPAFLSGEQKKAIVDLLFKTNRKVTVKQLKEDYFKKIECFDSVEISGVEDRFNASLGTYHDLLKIIKDKDFLDNEENEDILEDIVLTLTLFEDREMIEERLKTYAHLFDDKVMKQLKRRRYTGWGRLSRKLINGIRDKQSGKTILDFLKSDGFANRNFMQLIHDDSLTFKEDIQKAQVSGQGDSLHEHIANLAGSPAIKKGILQTVKVVDELVKVMGRHKPENIVIEMARENQTTQKGQKNSRERMKRIEEGIKELGSQILKEHPVENTQLQNEKLYLYYLQNGRDMYVDQELDINRLSDYDVDHIVPQSFLKDDSIDNKVLTRSDKARGKSDNVPSEEVVKKMKNYWRQLLNAKLITQRKFDNLTKAERGGLSELDKAGFIKRQLVETRQITKHVAQILDSRMNTKYDENDKLIREVKVITLKSKLVSDFRKDFQFYKVREINNYHHAHDAYLNAVVGTALIKKYPKLESEFVYGDYKVYDVRKMIAKSEQEIGKATAKYFFYSNIMNFFKTEITLANGEIRKRPLIETNGETGEIVWDKGRDFATVRKVLSMPQVNIVKKTEVQTGGFSKESILPKRNSDKLIARKKDWDPKKYGGFDSPTVAYSVLVVAKVEKGKSKKLKSVKELLGITIMERSSFEKNPIDFLEAKGYKEVKKDLIIKLPKYSLFELENGRKRMLASAGELQKGNELALPSKYVNFLYLASHYEKLKGSPEDNEQKQLFVEQHKHYLDEIIEQISEFSKRVILADANLDKVLSAYNKHRDKPIREQAENIIHLFTLTNLGAPAAFKYFDTTIDRKRYTSTKEVLDATLIHQSITGLYETRIDLSQLGGDGGGGSGGSGGSGGSGGSGGSGGTLQLEEEYRLFEPESTQKQEMDIWLKNFPQAWAETGGMGTAHCQAPVLIQLKATATPISIRQYPMPHEAYQGIKPHIRRMLDQGILKPCQSPWNTPLLPVKKPGTEDYRPVQDLREVNKRVEDIHPTVPNPYNLLSTLPPSHPWYTVLDLKDAFFCLRLHSESQLLFAFEWRDPEIGLSGQLTWTRLPQGFKNSPTLFNEALHSDLADFRVRYPALVLLQYVDDLLLAAATRTECLEGTKALLETLGNKGYRASAKKAQICLQEVTYLGYSLKDGQRWLTKARKEAILSIPVPKNSRQVREFLGKAGYCRLFIPGFAELAAPLYPLTRPGTLFQWGTEQQLAFEDIKKALLSSPALGLPDITKPFELFIDENSGFAKGVLVQKLGPWKRPVAYLSKKLDTVASGWPPCLRMVAAIAILVKDAGKLTLGQPLTILTSHPVEALVRQPPNKWLSNARMTHYQAMLLDAERVHFGPTVSLNPATLLPLPSGGNHHDCLQILAETHGTRPDLTDQPLPDADLTWYTDGSSFIRNGEREAGAAVTTESEVIWAAPLPPGTSAQRAELIALTQALKMAEGKKLTVYTDSRYAFATTHVHGEIYRRRGWLTSEGKEIKNKNEILALLEALFLPKRLSIIHCPGHQKGDSPQAKGNRLADDTAKKAATETHSSLTVLPAGKRTADGSEFEKRTADGSEFESPKKKAKVE

SEQ ID NO: 6083 - protein, 2094 aa, synthetic construct
MPAAKRVKLDGGDKKYSIGLDIGTNSVGWAVITDEYKVPSKKFKVLGNTDRHSIKKNLIGALLFDSGETAEATRLKRTARRRYTRRKNRICYLQEIFSNEMAKVDDSFFHRLEESFLVEEDKKHERHPIFGNIVDEVAYHEKYPTIYHLRKKLVDSTDKADLRLIYLALAHMIKFRGHFLIEGDLNPDNSDVDKLFIQLVQTYNQLFEENPINASGVDAKAILSARLSKSRRLENLIAQLPGEKKNGLFGNLIALSLGLTPNFKSNFDLAEDAKLQLSKDTYDDDLDNLLAQIGDQYADLFLAAKNLSDAILLSDILRVNTEITKAPLSASMIKRYDEHHQDLTLLKALVRQQLPEKYKEIFFDQSKNGYAGYIDGGASQEEFYKFIKPILEKMDGTEELLVKLNREDLLRKQRTFDNGSIPHQIHLGELHAILRRQEDFYPFLKDNREKIEKILTFRIPYYVGPLARGNSRFAWMTRKSEETITPWNFEEVVDKGASAQSFIERMTNFDKNLPNEKVLPKHSLLYEYFTVYNELTKVKYVTEGMRKPAFLSGEQKKAIVDLLFKTNRKVTVKQLKEDYFKKIECFDSVEISGVEDRFNASLGTYHDLLKIIKDKDFLDNEENEDILEDIVLTLTLFEDREMIEERLKTYAHLFDDKVMKQLKRRRYTGWGRLSRKLINGIRDKQSGKTILDFLKSDGFANRNFMQLIHDDSLTFKEDIQKAQVSGQGDSLHEHIANLAGSPAIKKGILQTVKVVDELVKVMGRHKPENIVIEMARENQTTQKGQKNSRERMKRIEEGIKELGSQILKEHPVENTQLQNEKLYLYYLQNGRDMYVDQELDINRLSDYDVDHIVPQSFLKDDSIDNKVLTRSDKARGKSDNVPSEEVVKKMKNYWRQLLNAKLITQRKFDNLTKAERGGLSELDKAGFIKRQLVETRQITKHVAQILDSRMNTKYDENDKLIREVKVITLKSKLVSDFRKDFQFYKVREINNYHHAHDAYLNAVVGTALIKKYPKLESEFVYGDYKVYDVRKMIAKSEQEIGKATAKYFFYSNIMNFFKTEITLANGEIRKRPLIETNGETGEIVWDKGRDFATVRKVLSMPQVNIVKKTEVQTGGFSKESILPKRNSDKLIARKKDWDPKKYGGFDSPTVAYSVLVVAKVEKGKSKKLKSVKELLGITIMERSSFEKNPIDFLEAKGYKEVKKDLIIKLPKYSLFELENGRKRMLASAGELQKGNELALPSKYVNFLYLASHYEKLKGSPEDNEQKQLFVEQHKHYLDEIIEQISEFSKRVILADANLDKVLSAYNKHRDKPIREQAENIIHLFTLTNLGAPAAFKYFDTTIDRKRYTSTKEVLDATLIHQSITGLYETRIDLSQLGGDGGGGSGGSGGSGGSGGSGGSGGVPWLTQQPLQLTILVPLQEYQEKILSKTALPEDQKQQLKTLFVKYDNLWQHWENQVGHRKIRPHNIATGDYPPRPQKQYPINPKAKPSIQIVIDDLLKQGVLTPQNSTMNTPVYPVPKPDGRWRMVLDYREVNKTIPLTAAQNQHSAGILATIVRQKYKTTLDLANGFWAHPITPESYWLTAFTWQGKQYCWTRLPQGFLNSPALFNADVVDLLKEIPNVQVYVDDIYLSHDDPKEHVQQLEKVFQILLQAGYVVSLKKSEIGQKTVEFLGFNITKEGRGLTDTFKTKLLNITPPKDLKQLQSILGLLNFARNFIPNFAELVQPLYNLIAPAKGKYIEWSEENTKQLNMVIEALNTASNLEERLPEQRLVIKVNTSPSAGYVRYYNETGKKPIMYLNYVFSKAELKFSMLEKLLTTMHKALIKAMDLAMGQEILVYSPIVSMTKIQKTPLPERKALPIRWITWMTYLEDPRIQFHYDKTLPELKHIPDVYTSSQSPVKHPSQYEGVFYTDGSAIKSPDPTKSNNAGMGIVHATYKPEYQVLNQWSIPLGNHTAQMAEIAAVEFACKKALKIPGPVLVITDSFYVAESANKELPYWKSNGFVNNKKKPLKHISKWKSIAECLSMKPDITIQHEKGISLQIPVFILKGNALADKLATQGSYVVNAGKRTADGSEFEKRTADGSEFESPKKKAKVE

SEQ ID NO: 6084 - protein, 2101 aa, synthetic construct
MPAAKRVKLDGGDKKYSIGLDIGTNSVGWAVITDEYKVPSKKFKVLGNTDRHSIKKNLIGALLFDSGETAEATRLKRTARRRYTRRKNRICYLQEIFSNEMAKVDDSFFHRLEESFLVEEDKKHERHPIFGNIVDEVAYHEKYPTIYHLRKKLVDSTDKADLRLIYLALAHMIKFRGHFLIEGDLNPDNSDVDKLFIQLVQTYNQLFEENPINASGVDAKAILSARLSKSRRLENLIAQLPGEKKNGLFGNLIALSLGLTPNFKSNFDLAEDAKLQLSKDTYDDDLDNLLAQIGDQYADLFLAAKNLSDAILLSDILRVNTEITKAPLSASMIKRYDEHHQDLTLLKALVRQQLPEKYKEIFFDQSKNGYAGYIDGGASQEEFYKFIKPILEKMDGTEELLVKLNREDLLRKQRTFDNGSIPHQIHLGELHAILRRQEDFYPFLKDNREKIEKILTFRIPYYVGPLARGNSRFAWMTRKSEETITPWNFEEVVDKGASAQSFIERMTNFDKNLPNEKVLPKHSLLYEYFTVYNELTKVKYVTEGMRKPAFLSGEQKKAIVDLLFKTNRKVTVKQLKEDYFKKIECFDSVEISGVEDRFNASLGTYHDLLKIIKDKDFLDNEENEDILEDIVLTLTLFEDREMIEERLKTYAHLFDDKVMKQLKRRRYTGWGRLSRKLINGIRDKQSGKTILDFLKSDGFANRNFMQLIHDDSLTFKEDIQKAQVSGQGDSLHEHIANLAGSPAIKKGILQTVKVVDELVKVMGRHKPENIVIEMARENQTTQKGQKNSRERMKRIEEGIKELGSQILKEHPVENTQLQNEKLYLYYLQNGRDMYVDQELDINRLSDYDVDHIVPQSFLKDDSIDNKVLTRSDKARGKSDNVPSEEVVKKMKNYWRQLLNAKLITQRKFDNLTKAERGGLSELDKAGFIKRQLVETRQITKHVAQILDSRMNTKYDENDKLIREVKVITLKSKLVSDFRKDFQFYKVREINNYHHAHDAYLNAVVGTALIKKYPKLESEFVYGDYKVYDVRKMIAKSEQEIGKATAKYFFYSNIMNFFKTEITLANGEIRKRPLIETNGETGEIVWDKGRDFATVRKVLSMPQVNIVKKTEVQTGGFSKESILPKRNSDKLIARKKDWDPKKYGGFDSPTVAYSVLVVAKVEKGKSKKLKSVKELLGITIMERSSFEKNPIDFLEAKGYKEVKKDLIIKLPKYSLFELENGRKRMLASAGELQKGNELALPSKYVNFLYLASHYEKLKGSPEDNEQKQLFVEQHKHYLDEIIEQISEFSKRVILADANLDKVLSAYNKHRDKPIREQAENIIHLFTLTNLGAPAAFKYFDTTIDRKRYTSTKEVLDATLIHQSITGLYETRIDLSQLGGDGGGGSGGSGGSGGSGGSGGSGGVLNLEEEYRLHEKPVPSSIDPSWLQLFPTVWAERAGMGLANQVPPVVVELRSGASPVAVRQYPMSKEAREGIRPHIQKFLDLGVLVPCRSPWNTPLLPVKKPGTNDYRPVQDLREINKRVQDIHPTVPNPYNLLSSLPPSYTWYSVLDLKDAFFCLRLHPNSQPLFAFEWKDPEKGNTGQLTWTRLPQGFKNSPTLFNEALHRDLAPFRALNPQVVLLQYVDDLLVAAPTYEDCKKGTQKLLQELSKLGYRVSAKKAQLCQREVTYLGYLLKEGKRWLTPARKATVMKIPVPTTPRQVREFLGKAGFCRLFIPGFASLAAPLYPLTKPSIPFIWTEEHQQAFDHIKKALLSAPALALPDLTKPFTLYIDERAGVARGVLTQTLGPWRRPVAYLSKKLDPVASGWPTCLKAVAAVALLLKDADKLTLGQNVTVIASHSLESIVRQPPDRWMTNARMTHYQSLLLNERVSFAPPAVLNPATLLPVESEATPVHRCSEILAEETGTRRDLEDQPLPGVPTWYTDGSSFITEGKRRAGAPIVDGKRTVWASSLPEGTSAQKAELVALTQALRLAEGKNINIYTDSRYAFATAHIHGAIYKQRGWLTSAGKDIKNKEEILALLEAIHLPRRVAIIHCPGHQRGSNPVATGNRRADEAAKQAALSTRVLAGTTKPAGKRTADGSEFEKRTADGSEFESPKKKAKVE

SEQ ID NO: 6085 - protein, 2020 aa, synthetic construct
MPAAKRVKLDGGDKKYSIGLDIGTNSVGWAVITDEYKVPSKKFKVLGNTDRHSIKKNLIGALLFDSGETAEATRLKRTARRRYTRRKNRICYLQEIFSNEMAKVDDSFFHRLEESFLVEEDKKHERHPIFGNIVDEVAYHEKYPTIYHLRKKLVDSTDKADLRLIYLALAHMIKFRGHFLIEGDLNPDNSDVDKLFIQLVQTYNQLFEENPINASGVDAKAILSARLSKSRRLENLIAQLPGEKKNGLFGNLIALSLGLTPNFKSNFDLAEDAKLQLSKDTYDDDLDNLLAQIGDQYADLFLAAKNLSDAILLSDILRVNTEITKAPLSASMIKRYDEHHQDLTLLKALVRQQLPEKYKEIFFDQSKNGYAGYIDGGASQEEFYKFIKPILEKMDGTEELLVKLNREDLLRKQRTFDNGSIPHQIHLGELHAILRRQEDFYPFLKDNREKIEKILTFRIPYYVGPLARGNSRFAWMTRKSEETITPWNFEEVVDKGASAQSFIERMTNFDKNLPNEKVLPKHSLLYEYFTVYNELTKVKYVTEGMRKPAFLSGEQKKAIVDLLFKTNRKVTVKQLKEDYFKKIECFDSVEISGVEDRFNASLGTYHDLLKIIKDKDFLDNEENEDILEDIVLTLTLFEDREMIEERLKTYAHLFDDKVMKQLKRRRYTGWGRLSRKLINGIRDKQSGKTILDFLKSDGFANRNFMQLIHDDSLTFKEDIQKAQVSGQGDSLHEHIANLAGSPAIKKGILQTVKVVDELVKVMGRHKPENIVIEMARENQTTQKGQKNSRERMKRIEEGIKELGSQILKEHPVENTQLQNEKLYLYYLQNGRDMYVDQELDINRLSDYDVDHIVPQSFLKDDSIDNKVLTRSDKARGKSDNVPSEEVVKKMKNYWRQLLNAKLITQRKFDNLTKAERGGLSELDKAGFIKRQLVETRQITKHVAQILDSRMNTKYDENDKLIREVKVITLKSKLVSDFRKDFQFYKVREINNYHHAHDAYLNAVVGTALIKKYPKLESEFVYGDYKVYDVRKMIAKSEQEIGKATAKYFFYSNIMNFFKTEITLANGEIRKRPLIETNGETGEIVWDKGRDFATVRKVLSMPQVNIVKKTEVQTGGFSKESILPKRNSDKLIARKKDWDPKKYGGFDSPTVAYSVLVVAKVEKGKSKKLKSVKELLGITIMERSSFEKNPIDFLEAKGYKEVKKDLIIKLPKYSLFELENGRKRMLASAGELQKGNELALPSKYVNFLYLASHYEKLKGSPEDNEQKQLFVEQHKHYLDEIIEQISEFSKRVILADANLDKVLSAYNKHRDKPIREQAENIIHLFTLTNLGAPAAFKYFDTTIDRKRYTSTKEVLDATLIHQSITGLYETRIDLSQLGGDGGGGSGGSGGSGGSGGSGGSGGAVLGLEHLPRPPQISQFPLNPERLQALQHLVRKALEAGHIEPYTGPGNNPVFPVKKANGTWRFIHDLRATNSLTIDLSSSSPGPPDLSSLPTTLAHLQTIDLRDAFFQIPLPKQFQPYFAFTVPQQCNYGPGTRYAWKVLPQGFKNSPTLFEMQLAHILQPIRQAFPQCTILQYMDDILLASPSHEDLLLLSEATMASLISHGLPVSENKTQQTPGTIKFLGQIISPNHLTYDAVPTVPIRSRWALPELQALLGEIQWVSKGTPTLRQPLHSLYCALQRHTDPRDQIYLNPSQVQSLVQLRQALSQNCRSRLVQTLPLLGAIMLTLTGTTTVVFQSKEQWPLVWLHAPLPHTSQCPWGQLLASAVLLLDKYTLQSYGLLCQTIHHNISTQTFNQFIQTSDHPSVPILLHHSHRFKNLGAQTGELWNTFLKTAAPLAPVKALMPVFTLSPVIINTAPCLFSDGSTSRAAYILWDKQILSQRSFPLPPPHKSAQRAELLGLLHGLSSARSWRCLNIFLDSKYLYHYLRTLALGTFQGRSSQAPFQALLPRLLSRKVVYLHHVRSHTNLPDPISRLNALTDALLITPVLQLAGKRTADGSEFEKRTADGSEFESPKKKAKVE

SEQ ID NO: 6086 - protein, 2016 aa, synthetic construct
MPAAKRVKLDGGDKKYSIGLDIGTNSVGWAVITDEYKVPSKKFKVLGNTDRHSIKKNLIGALLFDSGETAEATRLKRTARRRYTRRKNRICYLQEIFSNEMAKVDDSFFHRLEESFLVEEDKKHERHPIFGNIVDEVAYHEKYPTIYHLRKKLVDSTDKADLRLIYLALAHMIKFRGHFLIEGDLNPDNSDVDKLFIQLVQTYNQLFEENPINASGVDAKAILSARLSKSRRLENLIAQLPGEKKNGLFGNLIALSLGLTPNFKSNFDLAEDAKLQLSKDTYDDDLDNLLAQIGDQYADLFLAAKNLSDAILLSDILRVNTEITKAPLSASMIKRYDEHHQDLTLLKALVRQQLPEKYKEIFFDQSKNGYAGYIDGGASQEEFYKFIKPILEKMDGTEELLVKLNREDLLRKQRTFDNGSIPHQIHLGELHAILRRQEDFYPFLKDNREKIEKILTFRIPYYVGPLARGNSRFAWMTRKSEETITPWNFEEVVDKGASAQSFIERMTNFDKNLPNEKVLPKHSLLYEYFTVYNELTKVKYVTEGMRKPAFLSGEQKKAIVDLLFKTNRKVTVKQLKEDYFKKIECFDSVEISGVEDRFNASLGTYHDLLKIIKDKDFLDNEENEDILEDIVLTLTLFEDREMIEERLKTYAHLFDDKVMKQLKRRRYTGWGRLSRKLINGIRDKQSGKTILDFLKSDGFANRNFMQLIHDDSLTFKEDIQKAQVSGQGDSLHEHIANLAGSPAIKKGILQTVKVVDELVKVMGRHKPENIVIEMARENQTTQKGQKNSRERMKRIEEGIKELGSQILKEHPVENTQLQNEKLYLYYLQNGRDMYVDQELDINRLSDYDVDHIVPQSFLKDDSIDNKVLTRSDKARGKSDNVPSEEVVKKMKNYWRQLLNAKLITQRKFDNLTKAERGGLSELDKAGFIKRQLVETRQITKHVAQILDSRMNTKYDENDKLIREVKVITLKSKLVSDFRKDFQFYKVREINNYHHAHDAYLNAVVGTALIKKYPKLESEFVYGDYKVYDVRKMIAKSEQEIGKATAKYFFYSNIMNFFKTEITLANGEIRKRPLIETNGETGEIVWDKGRDFATVRKVLSMPQVNIVKKTEVQTGGFSKESILPKRNSDKLIARKKDWDPKKYGGFDSPTVAYSVLVVAKVEKGKSKKLKSVKELLGITIMERSSFEKNPIDFLEAKGYKEVKKDLIIKLPKYSLFELENGRKRMLASAGELQKGNELALPSKYVNFLYLASHYEKLKGSPEDNEQKQLFVEQHKHYLDEIIEQISEFSKRVILADANLDKVLSAYNKHRDKPIREQAENIIHLFTLTNLGAPAAFKYFDTTIDRKRYTSTKEVLDATLIHQSITGLYETRIDLSQLGGDGGGGSGGSGGSGGSGGSGGSGGGLEHLPPPPEVSQFPLNPERLQALTDLVSRALEAKHIEPYQGPGNNPIFPVKKPNGKWRFIHDLRATNSLTRDLASPSPGPPDLTSPPQDLPHLRTIDLTDAFFQIPLPAVFQPYFAFTLPQPNNHGPGTRYSWRVLPQGFKNSPTLFQQQLSHILAPVRKAFPNSLIIQYMDDILLASPALRELTALTDKVTNALTKEGLPMSLEKTQATPGSIHFLGQVISPDCITYETLPSIHVKSIWSLAELQSMLGELQWVSKGTPVLRSSLHQLYLALRGHRDPRDTIELTSTQVQALKTIQKALALNCRSRLVSQLPILALIILRPTGTTAVLFQTKQKWPLVWLHTPHPATSLRPWGQLLANAIITLDKYSLQHYGQICKSFHHNISNQALTYYLHTSDQSSVAILLQHSHRFHNLGAQPSGPWRSLLQVPQIFQNIDVLRPPFIISPVVIDHAPCLFSDGATSKAAFILWDKQVIHQQVLPLPSTCSAQAGELFGLLAGLQKSKPWPALNIFLDSKFLIGHLRRMAWGAFLGPSTQCDLHARLFPLLQGKTVYVHHVRSHTLLQDPISRLNEATDALMLAPLLPLAGKRTADGSEFEKRTADGSEFESPKKKAKVE

SEQ ID NO: 6087 - protein, 2013 aa, synthetic construct
MPAAKRVKLDGGDKKYSIGLDIGTNSVGWAVITDEYKVPSKKFKVLGNTDRHSIKKNLIGALLFDSGETAEATRLKRTARRRYTRRKNRICYLQEIFSNEMAKVDDSFFHRLEESFLVEEDKKHERHPIFGNIVDEVAYHEKYPTIYHLRKKLVDSTDKADLRLIYLALAHMIKFRGHFLIEGDLNPDNSDVDKLFIQLVQTYNQLFEENPINASGVDAKAILSARLSKSRRLENLIAQLPGEKKNGLFGNLIALSLGLTPNFKSNFDLAEDAKLQLSKDTYDDDLDNLLAQIGDQYADLFLAAKNLSDAILLSDILRVNTEITKAPLSASMIKRYDEHHQDLTLLKALVRQQLPEKYKEIFFDQSKNGYAGYIDGGASQEEFYKFIKPILEKMDGTEELLVKLNREDLLRKQRTFDNGSIPHQIHLGELHAILRRQEDFYPFLKDNREKIEKILTFRIPYYVGPLARGNSRFAWMTRKSEETITPWNFEEVVDKGASAQSFIERMTNFDKNLPNEKVLPKHSLLYEYFTVYNELTKVKYVTEGMRKPAFLSGEQKKAIVDLLFKTNRKVTVKQLKEDYFKKIECFDSVEISGVEDRFNASLGTYHDLLKIIKDKDFLDNEENEDILEDIVLTLTLFEDREMIEERLKTYAHLFDDKVMKQLKRRRYTGWGRLSRKLINGIRDKQSGKTILDFLKSDGFANRNFMQLIHDDSLTFKEDIQKAQVSGQGDSLHEHIANLAGSPAIKKGILQTVKVVDELVKVMGRHKPENIVIEMARENQTTQKGQKNSRERMKRIEEGIKELGSQILKEHPVENTQLQNEKLYLYYLQNGRDMYVDQELDINRLSDYDVDHIVPQSFLKDDSIDNKVLTRSDKARGKSDNVPSEEVVKKMKNYWRQLLNAKLITQRKFDNLTKAERGGLSELDKAGFIKRQLVETRQITKHVAQILDSRMNTKYDENDKLIREVKVITLKSKLVSDFRKDFQFYKVREINNYHHAHDAYLNAVVGTALIKKYPKLESEFVYGDYKVYDVRKMIAKSEQEIGKATAKYFFYSNIMNFFKTEITLANGEIRKRPLIETNGETGEIVWDKGRDFATVRKVLSMPQVNIVKKTEVQTGGFSKESILPKRNSDKLIARKKDWDPKKYGGFDSPTVAYSVLVVAKVEKGKSKKLKSVKELLGITIMERSSFEKNPIDFLEAKGYKEVKKDLIIKLPKYSLFELENGRKRMLASAGELQKGNELALPSKYVNFLYLASHYEKLKGSPEDNEQKQLFVEQHKHYLDEIIEQISEFSKRVILADANLDKVLSAYNKHRDKPIREQAENIIHLFTLTNLGAPAAFKYFDTTIDRKRYTSTKEVLDATLIHQSITGLYETRIDLSQLGGDGGGGSGGSGGSGGSGGSGGSGGPLGTSDSPVTHADPIDWKSEEPVWVDQWPLTQEKLSAAQQLVQEQLRLGHIEPSTSAWNSPIFVIKKKSGKWRLLQDLRKVNETMMHMGALQPGLPTPSPIPDKSYIIVIDLKDCFYTIPLAPQDCKRFAFSLPSVNFKEPMQRYQWRVLPQGMTNSPTLCQKFVATAIAPVRQRFPQLYLVHYMDDILLAHTDEHLLYQAFSILKQHLSLNGLVIADEKIQTHFPYNYLGFSLYPRVYNTQLVKLQTDHLKTLNDFQKLLGDINWIRPYLKLPTYTLQPLFDILKGDSDPASPRTLSLEGRTALQSIEEAIRQQQITYCDYQRSWGLYILPTPRAPTGVLYQDKPLRWIYLSATPTKHLLPYYELVAKIIAKGRHEAIQYFGMEPPFICVPYALEQQDWLFQFSDNWSIAFANYPGQITHHYPSDKLLQFASSHAFIFPKIVRRQPIPEATLIFTDGSSNGTAALIINHQTYYAQTSFSSAQVVELFAVHQALLTVPTSFNLFTDSSYVVGALQMIETVPIIGTTSPEVLNLFTLIQQVLHCRQHPCFFGHIRAHSTLPGALVQGNHTADVLTKQVFFQSAGKRTADGSEFEKRTADGSEFESPKKKAKVE

SEQ ID NO: 6088 - protein, 2134 aa, synthetic construct
MPAAKRVKLDGGDKKYSIGLDIGTNSVGWAVITDEYKVPSKKFKVLGNTDRHSIKKNLIGALLFDSGETAEATRLKRTARRRYTRRKNRICYLQEIFSNEMAKVDDSFFHRLEESFLVEEDKKHERHPIFGNIVDEVAYHEKYPTIYHLRKKLVDSTDKADLRLIYLALAHMIKFRGHFLIEGDLNPDNSDVDKLFIQLVQTYNQLFEENPINASGVDAKAILSARLSKSRRLENLIAQLPGEKKNGLFGNLIALSLGLTPNFKSNFDLAEDAKLQLSKDTYDDDLDNLLAQIGDQYADLFLAAKNLSDAILLSDILRVNTEITKAPLSASMIKRYDEHHQDLTLLKALVRQQLPEKYKEIFFDQSKNGYAGYIDGGASQEEFYKFIKPILEKMDGTEELLVKLNREDLLRKQRTFDNGSIPHQIHLGELHAILRRQEDFYPFLKDNREKIEKILTFRIPYYVGPLARGNSRFAWMTRKSEETITPWNFEEVVDKGASAQSFIERMTNFDKNLPNEKVLPKHSLLYEYFTVYNELTKVKYVTEGMRKPAFLSGEQKKAIVDLLFKTNRKVTVKQLKEDYFKKIECFDSVEISGVEDRFNASLGTYHDLLKIIKDKDFLDNEENEDILEDIVLTLTLFEDREMIEERLKTYAHLFDDKVMKQLKRRRYTGWGRLSRKLINGIRDKQSGKTILDFLKSDGFANRNFMQLIHDDSLTFKEDIQKAQVSGQGDSLHEHIANLAGSPAIKKGILQTVKVVDELVKVMGRHKPENIVIEMARENQTTQKGQKNSRERMKRIEEGIKELGSQILKEHPVENTQLQNEKLYLYYLQNGRDMYVDQELDINRLSDYDVDHIVPQSFLKDDSIDNKVLTRSDKARGKSDNVPSEEVVKKMKNYWRQLLNAKLITQRKFDNLTKAERGGLSELDKAGFIKRQLVETRQITKHVAQILDSRMNTKYDENDKLIREVKVITLKSKLVSDFRKDFQFYKVREINNYHHAHDAYLNAVVGTALIKKYPKLESEFVYGDYKVYDVRKMIAKSEQEIGKATAKYFFYSNIMNFFKTEITLANGEIRKRPLIETNGETGEIVWDKGRDFATVRKVLSMPQVNIVKKTEVQTGGFSKESILPKRNSDKLIARKKDWDPKKYGGFDSPTVAYSVLVVAKVEKGKSKKLKSVKELLGITIMERSSFEKNPIDFLEAKGYKEVKKDLIIKLPKYSLFELENGRKRMLASAGELQKGNELALPSKYVNFLYLASHYEKLKGSPEDNEQKQLFVEQHKHYLDEIIEQISEFSKRVILADANLDKVLSAYNKHRDKPIREQAENIIHLFTLTNLGAPAAFKYFDTTIDRKRYTSTKEVLDATLIHQSITGLYETRIDLSQLGGDGGGGSGGSGGSGGSGGSGGSGGLLGRDLLTKLKAQIQFSTEGPQVTWEDRPAMCLVLNLEEEYRLHEKPVPPSIDPSWLQLFPMVWAEKAGMGLANQVPPVVVELKSDASPVAVRQYPMSKEAREGIRPHIQRFLDLGILVPCQSPWNTPLLPVKKPGTNDYRPVQDLREVNKRVQDIHPTVPNPYNLLSSLPPSHTWYSVLDLKDAFFCLKLHPNSQPLFAFEWRDPEKGNTGQLTWTRLPQGFKNSPTLFNEALHRDLASFRALNPQVVMLQYVDDLLVAAPTYRDCKEGTRRLLQELSKLGYRVSAKKAQLCREEVTYLGYLLKGGKRWLTPARKATVMKIPTPTTPRQVREFLGKAGFCRLFIPGFASLAAPLYPLTRPKVPFTWTEAHQEAFGRIKEALLSAPALALPDLTKPFALYVDEKEGVARGVLTQTLGPWRRPVAYLSKKLDPVASGWPTCLKAIAAVALLLKDADKLTLGQNVLVIAPHNLESIVRQPPDRWMTNARMTHYQSLLLNERVSFAPPAILNPATLLPVESDDTPIHICSEILAEETGTRPDLRDQPLPGVPAWYTDGSSFIMDGRRQAGAAIVDNKRTVWASNLPEGTSAQKAELIALTQALRLAEGKSINIYTDSRYAFATAHVHGAIYKQRGWLTSAGKDIKNKEEILALLEAIHLPKRVAIIHCPGHQRGTDPVATGNRKADEAAKQAAQSTRILTETTKNAGKRTADGSEFEKRTADGSEFESPKKKAKVE

SEQ ID NO: 6089 - protein, 2225 aa, synthetic construct
MPAAKRVKLDGGDKKYSIGLDIGTNSVGWAVITDEYKVPSKKFKVLGNTDRHSIKKNLIGALLFDSGETAEATRLKRTARRRYTRRKNRICYLQEIFSNEMAKVDDSFFHRLEESFLVEEDKKHERHPIFGNIVDEVAYHEKYPTIYHLRKKLVDSTDKADLRLIYLALAHMIKFRGHFLIEGDLNPDNSDVDKLFIQLVQTYNQLFEENPINASGVDAKAILSARLSKSRRLENLIAQLPGEKKNGLFGNLIALSLGLTPNFKSNFDLAEDAKLQLSKDTYDDDLDNLLAQIGDQYADLFLAAKNLSDAILLSDILRVNTEITKAPLSASMIKRYDEHHQDLTLLKALVRQQLPEKYKEIFFDQSKNGYAGYIDGGASQEEFYKFIKPILEKMDGTEELLVKLNREDLLRKQRTFDNGSIPHQIHLGELHAILRRQEDFYPFLKDNREKIEKILTFRIPYYVGPLARGNSRFAWMTRKSEETITPWNFEEVVDKGASAQSFIERMTNFDKNLPNEKVLPKHSLLYEYFTVYNELTKVKYVTEGMRKPAFLSGEQKKAIVDLLFKTNRKVTVKQLKEDYFKKIECFDSVEISGVEDRFNASLGTYHDLLKIIKDKDFLDNEENEDILEDIVLTLTLFEDREMIEERLKTYAHLFDDKVMKQLKRRRYTGWGRLSRKLINGIRDKQSGKTILDFLKSDGFANRNFMQLIHDDSLTFKEDIQKAQVSGQGDSLHEHIANLAGSPAIKKGILQTVKVVDELVKVMGRHKPENIVIEMARENQTTQKGQKNSRERMKRIEEGIKELGSQILKEHPVENTQLQNEKLYLYYLQNGRDMYVDQELDINRLSDYDVDHIVPQSFLKDDSIDNKVLTRSDKARGKSDNVPSEEVVKKMKNYWRQLLNAKLITQRKFDNLTKAERGGLSELDKAGFIKRQLVETRQITKHVAQILDSRMNTKYDENDKLIREVKVITLKSKLVSDFRKDFQFYKVREINNYHHAHDAYLNAVVGTALIKKYPKLESEFVYGDYKVYDVRKMIAKSEQEIGKATAKYFFYSNIMNFFKTEITLANGEIRKRPLIETNGETGEIVWDKGRDFATVRKVLSMPQVNIVKKTEVQTGGFSKESILPKRNSDKLIARKKDWDPKKYGGFDSPTVAYSVLVVAKVEKGKSKKLKSVKELLGITIMERSSFEKNPIDFLEAKGYKEVKKDLIIKLPKYSLFELENGRKRMLASAGELQKGNELALPSKYVNFLYLASHYEKLKGSPEDNEQKQLFVEQHKHYLDEIIEQISEFSKRVILADANLDKVLSAYNKHRDKPIREQAENIIHLFTLTNLGAPAAFKYFDTTIDRKRYTSTKEVLDATLIHQSITGLYETRIDLSQLGGDGGGGSGGSGGSGGSGGSGGSGGTLGDQGSRGSDPLPEPRVTLTVEGIPTEFLVNTGAEHSVLTKPMGKMGSKRTVVAGATGSKVYPWTTKRLLKIGQKQVTHSFLVIPECPAPLLGRDLLTKLKAQIQFSTEGPQVTWEDRPAMCLVLNLEEEYRLHEKPVPPSIDPSWLQLFPMVWAEKAGMGLANQVPPVVVELKSDASPVAVRQYPMSKEAREGIRPHIQRFLDLGILVPCQSPWNTPLLPVKKPGTNDYRPVQDLREVNKRVQDIHPTVPNPYNLLSSLPPSHTWYSVLDLKDAFFCLKLHPNSQPLFAFEWRDPEKGNTGQLTWTRLPQGFKNSPTLFNEALHRDLASFRALNPQVVMLQYVDDLLVAAPTYRDCKEGTRRLLQELSKLGYRVSAKKAQLCREEVTYLGYLLKGGKRWLTPARKATVMKIPTPTTPRQVREFLGKAGFCRLFIPGFASLAAPLYPLTRPKVPFTWTEAHQEAFGRIKEALLSAPALALPDLTKPFALYVDEKEGVARGVLTQTLGPWRRPVAYLSKKLDPVASGWPTCLKAIAAVALLLKDADKLTLGQNVLVIAPHNLESIVRQPPDRWMTNARMTHYQSLLLNERVSFAPPAILNPATLLPVESDDTPIHICSEILAEETGTRPDLRDQPLPGVPAWYTDGSSFIMDGRRQAGAAIVDNKRTVWASNLPEGTSAQKAELIALTQALRLAEGKSINIYTDSRYAFATAHVHGAIYKQRGWLTSAGKDIKNKEEILALLEAIHLPKRVAIIHCPGHQRGTDPVATGNRKADEAAKQAAQSTRILTETTKNAGKRTADGSEFEKRTADGSEFESPKKKAKVE

SEQ ID NO: 6090 - protein, 2103 aa, synthetic construct; identical to SEQ ID NO: 4503

SEQ ID NO: 6091 - protein, 2103 aa, synthetic construct; identical to SEQ ID NO: 4503

SEQ ID NO: 6092 - protein, 2103 aa, synthetic construct
MPAAKRVKLDGGDKKYSIGLDIGTNSVGWAVITDEYKVPSKKFKVLGNTDRHSIKKNLIGALLFDSGETAEATRLKRTARRRYTRRKNRICYLQEIFSNEMAKVDDSFFHRLEESFLVEEDKKHERHPIFGNIVDEVAYHEKYPTIYHLRKKLVDSTDKADLRLIYLALAHMIKFRGHFLIEGDLNPDNSDVDKLFIQLVQTYNQLFEENPINASGVDAKAILSARLSKSRRLENLIAQLPGEKKNGLFGNLIALSLGLTPNFKSNFDLAEDAKLQLSKDTYDDDLDNLLAQIGDQYADLFLAAKNLSDAILLSDILRVNTEITKAPLSASMIKRYDEHHQDLTLLKALVRQQLPEKYKEIFFDQSKNGYAGYIDGGASQEEFYKFIKPILEKMDGTEELLVKLNREDLLRKQRTFDNGSIPHQIHLGELHAILRRQEDFYPFLKDNREKIEKILTFRIPYYVGPLARGNSRFAWMTRKSEETITPWNFEEVVDKGASAQSFIERMTNFDKNLPNEKVLPKHSLLYEYFTVYNELTKVKYVTEGMRKPAFLSGEQKKAIVDLLFKTNRKVTVKQLKEDYFKKIECFDSVEISGVEDRFNASLGTYHDLLKIIKDKDFLDNEENEDILEDIVLTLTLFEDREMIEERLKTYAHLFDDKVMKQLKRRRYTGWGRLSRKLINGIRDKQSGKTILDFLKSDGFANRNFMQLIHDDSLTFKEDIQKAQVSGQGDSLHEHIANLAGSPAIKKGILQTVKVVDELVKVMGRHKPENIVIEMARENQTTQKGQKNSRERMKRIEEGIKELGSQILKEHPVENTQLQNEKLYLYYLQNGRDMYVDQELDINRLSDYDVDHIVPQSFLKDDSIDNKVLTRSDKARGKSDNVPSEEVVKKMKNYWRQLLNAKLITQRKFDNLTKAERGGLSELDKAGFIKRQLVETRQITKHVAQILDSRMNTKYDENDKLIREVKVITLKSKLVSDFRKDFQFYKVREINNYHHAHDAYLNAVVGTALIKKYPKLESEFVYGDYKVYDVRKMIAKSEQEIGKATAKYFFYSNIMNFFKTEITLANGEIRKRPLIETNGETGEIVWDKGRDFATVRKVLSMPQVNIVKKTEVQTGGFSKESILPKRNSDKLIARKKDWDPKKYGGFDSPTVAYSVLVVAKVEKGKSKKLKSVKELLGITIMERSSFEKNPIDFLEAKGYKEVKKDLIIKLPKYSLFELENGRKRMLASAGELQKGNELALPSKYVNFLYLASHYEKLKGSPEDNEQKQLFVEQHKHYLDEIIEQISEFSKRVILADANLDKVLSAYNKHRDKPIREQAENIIHLFTLTNLGAPAAFKYFDTTIDRKRYTSTKEVLDATLIHQSITGLYETRIDLSQLGGDGGGGSGGSGGSGGSGGSGGSGGTLGIEDEYRLHETSTEPDVSLGSTWLSDFPQAWAETGGMGLAVRQAPLIIPLKATSTPVSIQQYPMSHEARLGIKPHIQRLLDQGILVPCQSPWNTPLLPVKKPGTNDYRPVQDLREVNKRVEDIHPTVPNPYNLLSGLPPSHQWYTVLDLKDAFFCLRLHPTSQPLFAFEWRDPGMGISGQLTWTRLPQGFKNSPTLFDEALHRDLADFRIQHPDLILLQYVDDILLAATSELDCQQGTRALLQTLGDLGYRASAKKAQICQKQVKYLGYLLREGQRWLTEARKETVMGQPVPKTPRQLREFLGTAGFCRLWIPGFAEMAAPLYPLTKTGTLFSWGPDQQKAYQEIKQALLTAPALGLPDLTKPFELFVDEKQGYAKGVLTQKLGPWRRPVAYLSKKLDPVAAGWPPCLRMVAAIAVLTKDAGKLTMGQPLVILAPHAVEALVKQPPDRWLSNARMTHYQAMLLDTDRVQFGPVVALNPATLLPLPEEGAPHDCLEILAETHGTRPDLTDQPIPDADHTWYTDGSSFLQEGQRKAGAAVTTETEVIWAGALPAGTSAQRAELIALTQALKMAEGKRLNVYTDSRYAFATAHIHGEIYRRRGLLTSEGREIKNKSEILALLKALFLPKRLSIIHCLGHQKGDSAEARGNRLADQAAREAAIKTPPDTSTLLAGKRTADGSEFEKRTADGSEFESPKKKAKVE

SEQ ID NO: 6093 - protein, 2103 aa, synthetic construct
MPAAKRVKLDGGDKKYSIGLDIGTNSVGWAVITDEYKVPSKKFKVLGNTDRHSIKKNLIGALLFDSGETAEATRLKRTARRRYTRRKNRICYLQEIFSNEMAKVDDSFFHRLEESFLVEEDKKHERHPIFGNIVDEVAYHEKYPTIYHLRKKLVDSTDKADLRLIYLALAHMIKFRGHFLIEGDLNPDNSDVDKLFIQLVQTYNQLFEENPINASGVDAKAILSARLSKSRRLENLIAQLPGEKKNGLFGNLIALSLGLTPNFKSNFDLAEDAKLQLSKDTYDDDLDNLLAQIGDQYADLFLAAKNLSDAILLSDILRVNTEITKAPLSASMIKRYDEHHQDLTLLKALVRQQLPEKYKEIFFDQSKNGYAGYIDGGASQEEFYKFIKPILEKMDGTEELLVKLNREDLLRKQRTFDNGSIPHQIHLGELHAILRRQEDFYPFLKDNREKIEKILTFRIPYYVGPLARGNSRFAWMTRKSEETITPWNFEEVVDKGASAQSFIERMTNFDKNLPNEKVLPKHSLLYEYFTVYNELTKVKYVTEGMRKPAFLSGEQKKAIVDLLFKTNRKVTVKQLKEDYFKKIECFDSVEISGVEDRFNASLGTYHDLLKIIKDKDFLDNEENEDILEDIVLTLTLFEDREMIEERLKTYAHLFDDKVMKQLKRRRYTGWGRLSRKLINGIRDKQSGKTILDFLKSDGFANRNFMQLIHDDSLTFKEDIQKAQVSGQGDSLHEHIANLAGSPAIKKGILQTVKVVDELVKVMGRHKPENIVIEMARENQTTQKGQKNSRERMKRIEEGIKELGSQILKEHPVENTQLQNEKLYLYYLQNGRDMYVDQELDINRLSDYDVDHIVPQSFLKDDSIDNKVLTRSDKARGKSDNVPSEEVVKKMKNYWRQLLNAKLITQRKFDNLTKAERGGLSELDKAGFIKRQLVETRQITKHVAQILDSRMNTKYDENDKLIREVKVITLKSKLVSDFRKDFQFYKVREINNYHHAHDAYLNAVVGTALIKKYPKLESEFVYGDYKVYDVRKMIAKSEQEIGKATAKYFFYSNIMNFFKTEITLANGEIRKRPLIETNGETGEIVWDKGRDFATVRKVLSMPQVNIVKKTEVQTGGFSKESILPKRNSDKLIARKKDWDPKKYGGFDSPTVAYSVLVVAKVEKGKSKKLKSVKELLGITIMERSSFEKNPIDFLEAKGYKEVKKDLIIKLPKYSLFELENGRKRMLASAGELQKGNELALPSKYVNFLYLASHYEKLKGSPEDNEQKQLFVEQHKHYLDEIIEQISEFSKRVILADANLDKVLSAYNKHRDKPIREQAENIIHLFTLTNLGAPAAFKYFDTTIDRKRYTSTKEVLDATLIHQSITGLYETRIDLSQLGGDGGGGSGGSGGSGGSGGSGGSGGTLGIEDEYRLHETSTEPDVSLGSTWLSDFPQAWAETGGMGLAVRQAPLIIPLKATSTPVSIQQYPMSHEARLGIKPHIQRLLDQGILVPCQSPWNTPLLPVKKPGTNDYRPVQDLREVNKRVEDIHPTVPNPYNLLSGLPPSHQWYTVLDLKDAFFCLRLHPTSQPLFAFEWRDPGMGISGQLTWTRLPQGFKNSPTLFNEALHRDLADFRIQHPDLILLQYVDDILLAATSELDCQQGTRALLQTLGDLGYRASAKKAQICQKQVKYLGYLLREGQRWLTEARKETVMGQPVPKTPRQLREFLGTAGFCRLWIPGFAEMAAPLYPLTKPGTLFSWGPDQQKAYQEIKQALLTAPALGLPDLTKPFELFVDEKQGYAKGVLTQKLGPWRRPVAYLSKKLDPVAAGWPPCLRMVAAIAVLTKDAGKLTMGQPLVILAPHAVEALVKQPPDRWLSNARMTHYQAMLLDTDRVQFGPVVALNPATLLPLPEEGAPHDCLEILAETHGTRPDLTDQPIPDADHTWYTDGSSFLQEGQRKAGAAVTTETEVIWAGALPAGTSAQRAELIALTQALKMAEGKRLNVYTDSRYAFATAHIHGEIYRRRGWLTSEGREIKNKSEILALLKALFLPKRLSIIHCLGHQKGDSAEARGNRLADQAAREAAIKTPPDTSTLLAGKRTADGSEFEKRTADGSEFESPKKKAKVE

SEQ ID NO: 6094 - protein, 2103 aa, synthetic construct
MPAAKRVKLDGGDKKYSIGLDIGTNSVGWAVITDEYKVPSKKFKVLGNTDRHSIKKNLIGALLFDSGETAEATRLKRTARRRYTRRKNRICYLQEIFSNEMAKVDDSFFHRLEESFLVEEDKKHERHPIFGNIVDEVAYHEKYPTIYHLRKKLVDSTDKADLRLIYLALAHMIKFRGHFLIEGDLNPDNSDVDKLFIQLVQTYNQLFEENPINASGVDAKAILSARLSKSRRLENLIAQLPGEKKNGLFGNLIALSLGLTPNFKSNFDLAEDAKLQLSKDTYDDDLDNLLAQIGDQYADLFLAAKNLSDAILLSDILRVNTEITKAPLSASMIKRYDEHHQDLTLLKALVRQQLPEKYKEIFFDQSKNGYAGYIDGGASQEEFYKFIKPILEKMDGTEELLVKLNREDLLRKQRTFDNGSIPHQIHLGELHAILRRQEDFYPFLKDNREKIEKILTFRIPYYVGPLARGNSRFAWMTRKSEETITPWNFEEVVDKGASAQSFIERMTNFDKNLPNEKVLPKHSLLYEYFTVYNELTKVKYVTEGMRKPAFLSGEQKKAIVDLLFKTNRKVTVKQLKEDYFKKIECFDSVEISGVEDRFNASLGTYHDLLKIIKDKDFLDNEENEDILEDIVLTLTLFEDREMIEERLKTYAHLFDDKVMKQLKRRRYTGWGRLSRKLINGIRDKQSGKTILDFLKSDGFANRNFMQLIHDDSLTFKEDIQKAQVSGQGDSLHEHIANLAGSPAIKKGILQTVKVVDELVKVMGRHKPENIVIEMARENQTTQKGQKNSRERMKRIEEGIKELGSQILKEHPVENTQLQNEKLYLYYLQNGRDMYVDQELDINRLSDYDVDHIVPQSFLKDDSIDNKVLTRSDKARGKSDNVPSEEVVKKMKNYWRQLLNAKLITQRKFDNLTKAERGGLSELDKAGFIKRQLVETRQITKHVAQILDSRMNTKYDENDKLIREVKVITLKSKLVSDFRKDFQFYKVREINNYHHAHDAYLNAVVGTALIKKYPKLESEFVYGDYKVYDVRKMIAKSEQEIGKATAKYFFYSNIMNFFKTEITLANGEIRKRPLIETNGETGEIVWDKGRDFATVRKVLSMPQVNIVKKTEVQTGGFSKESILPKRNSDKLIARKKDWDPKKYGGFDSPTVAYSVLVVAKVEKGKSKKLKSVKELLGITIMERSSFEKNPIDFLEAKGYKEVKKDLIIKLPKYSLFELENGRKRMLASAGELQKGNELALPSKYVNFLYLASHYEKLKGSPEDNEQKQLFVEQHKHYLDEIIEQISEFSKRVILADANLDKVLSAYNKHRDKPIREQAENIIHLFTLTNLGAPAAFKYFDTTIDRKRYTSTKEVLDATLIHQSITGLYETRIDLSQLGGDGGGGSGGSGGSGGSGGSGGSGGTLNIEDEYRLHETSKEPDVSLGSTWLSDFPQAWAETGGMGLAVRQAPLIIPLKATSTPVSIKQYPMSQEARLGIKPHIQRLLDQGILVPCQSPWNTPLLPVKKPGTNDYRPVQDLREVNKRVEDIHPTVPNPYNLLSGLPPSHQWYTVLDLKDAFFCLRLHPTSQPLFAFEWRDPEMGISGQLTWTRLPQGFKNSPTLFNEALHRDLAGFRIQHPDLILLQYVDDLLLAATSELDCQQGTRALLQTLGDLGYRASAKKAQICQKQVKYLGYLLKEGQRWLTEARKETVMGQPIPKTPRQLREFLGTAGFCRLWIPGFAEMAAPLYPLTKPGTLFNWGPDQQKAFQEIKQALLTAPALGLPDLTKPFELFVDEKQGYAKGVLTQKLGPWRRPVAYLSKKLDPVAAGWPPCLRMVAAIAVLTKDAGKLTMGQPLVILAPHAVEALVKQPPDRWLSNARMTHYQALLLDTDRVQFGPVVALNPATLLPLPEEGLQHDCLDILAEAHGTRSDLMDQPLPDADHTWYTDGSSFLQEGQRKAGAAVTTETEVIWARALPAGTSAQRAELIALTQALKMAEGKKLNVYTDSRYAFATAHIHGEIYRRRGWLTSEGKEIKNKDEILALLKALFLPKRLSIIHCPGHQKGNSAEARGNRMADQAAREVATRETPETSTLLAGKRTADGSEFEKRTADGSEFESPKKKAKVE

SEQ ID NO: 6095 - protein, 2103 aa, synthetic construct
MPAAKRVKLDGGDKKYSIGLDIGTNSVGWAVITDEYKVPSKKFKVLGNTDRHSIKKNLIGALLFDSGETAEATRLKRTARRRYTRRKNRICYLQEIFSNEMAKVDDSFFHRLEESFLVEEDKKHERHPIFGNIVDEVAYHEKYPTIYHLRKKLVDSTDKADLRLIYLALAHMIKFRGHFLIEGDLNPDNSDVDKLFIQLVQTYNQLFEENPINASGVDAKAILSARLSKSRRLENLIAQLPGEKKNGLFGNLIALSLGLTPNFKSNFDLAEDAKLQLSKDTYDDDLDNLLAQIGDQYADLFLAAKNLSDAILLSDILRVNTEITKAPLSASMIKRYDEHHQDLTLLKALVRQQLPEKYKEIFFDQSKNGYAGYIDGGASQEEFYKFIKPILEKMDGTEELLVKLNREDLLRKQRTFDNGSIPHQIHLGELHAILRRQEDFYPFLKDNREKIEKILTFRIPYYVGPLARGNSRFAWMTRKSEETITPWNFEEVVDKGASAQSFIERMTNFDKNLPNEKVLPKHSLLYEYFTVYNELTKVKYVTEGMRKPAFLSGEQKKAIVDLLFKTNRKVTVKQLKEDYFKKIECFDSVEISGVEDRFNASLGTYHDLLKIIKDKDFLDNEENEDILEDIVLTLTLFEDREMIEERLKTYAHLFDDKVMKQLKRRRYTGWGRLSRKLINGIRDKQSGKTILDFLKSDGFANRNFMQLIHDDSLTFKEDIQKAQVSGQGDSLHEHIANLAGSPAIKKGILQTVKVVDELVKVMGRHKPENIVIEMARENQTTQKGQKNSRERMKRIEEGIKELGSQILKEHPVENTQLQNEKLYLYYLQNGRDMYVDQELDINRLSDYDVDHIVPQSFLKDDSIDNKVLTRSDKARGKSDNVPSEEVVKKMKNYWRQLLNAKLITQRKFDNLTKAERGGLSELDKAGFIKRQLVETRQITKHVAQILDSRMNTKYDENDKLIREVKVITLKSKLVSDFRKDFQFYKVREINNYHHAHDAYLNAVVGTALIKKYPKLESEFVYGDYKVYDVRKMIAKSEQEIGKATAKYFFYSNIMNFFKTEITLANGEIRKRPLIETNGETGEIVWDKGRDFATVRKVLSMPQVNIVKKTEVQTGGFSKESILPKRNSDKLIARKKDWDPKKYGGFDSPTVAYSVLVVAKVEKGKSKKLKSVKELLGITIMERSSFEKNPIDFLEAKGYKEVKKDLIIKLPKYSLFELENGRKRMLASAGELQKGNELALPSKYVNFLYLASHYEKLKGSPEDNEQKQLFVEQHKHYLDEIIEQISEFSKRVILADANLDKVLSAYNKHRDKPIREQAENIIHLFTLTNLGAPAAFKYFDTTIDRKRYTSTKEVLDATLIHQSITGLYETRIDLSQLGGDGGGGSGGSGGSGGSGGSGGSGGTLNIEDEYRLHETSKGPDVPLGSTWLSDFPQAWAETGGMGLAFRQAPLIISLKATSTPVSIKQYPMSQEARLGIKPHIQRLLDQGILVPCQSPWNTPLLPVKKPGTNDYRPVQDLREVNKRVEDIHPTVPNPYNLLSGLPPSHQWYTVLDLKDAFFCLRLHPTSQSLFAFEWKDPEMGISGQLTWTRLPQGFKNSPTLFNEALHRDLADFRIQHPDLILLQYVDDLLLAATSELDCQQGTRALLQTLGDLGYRASAKKAQICQKQVKYLGYLLKEGQRWLTEARKETVMGQPTPKTPRQLREFLGKAGLCRLFIPGFAEMAAPLYPLTKPGTLFKWGPDQQKAYQEIKQALLTAPALGLPDLTKPFELFVDEKQGYAKGVLTQKLGPWRRPVAYLSKKLDPVAAGWPPCLRMVAAIAVLTKDVGKLTMGQPLVILAPHAVEALVKQPPDRWLSNARMTHYQALLLDTDRVQFGPIVALNPATLLPLPEEGLQHDCLDILAEAHGTRPDLTDQPLPDADHTWYTDGSSFLQEGQRRAGAAVTTETEVIWAKALPAGTSAQRAELIALTQALKMAAGKKLNVYTDSRYAFATAHIHGEIYRRRGWLTSEGKEIKNKDEILALLKALFLPKRLSIIHCPGHQKGNHAEARGNRMADQAAREVATRETPETSTLLAGKRTADGSEFEKRTADGSEFESPKKKAKVE

SEQ ID NO: 6096 - protein, 2103 aa, synthetic construct
MPAAKRVKLDGGDKKYSIGLDIGTNSVGWAVITDEYKVPSKKFKVLGNTDRHSIKKNLIGALLFDSGETAEATRLKRTARRRYTRRKNRICYLQEIFSNEMAKVDDSFFHRLEESFLVEEDKKHERHPIFGNIVDEVAYHEKYPTIYHLRKKLVDSTDKADLRLIYLALAHMIKFRGHFLIEGDLNPDNSDVDKLFIQLVQTYNQLFEENPINASGVDAKAILSARLSKSRRLENLIAQLPGEKKNGLFGNLIALSLGLTPNFKSNFDLAEDAKLQLSKDTYDDDLDNLLAQIGDQYADLFLAAKNLSDAILLSDILRVNTEITKAPLSASMIKRYDEHHQDLTLLKALVRQQLPEKYKEIFFDQSKNGYAGYIDGGASQEEFYKFIKPILEKMDGTEELLVKLNREDLLRKQRTFDNGSIPHQIHLGELHAILRRQEDFYPFLKDNREKIEKILTFRIPYYVGPLARGNSRFAWMTRKSEETITPWNFEEVVDKGASAQSFIERMTNFDKNLPNEKVLPKHSLLYEYFTVYNELTKVKYVTEGMRKPAFLSGEQKKAIVDLLFKTNRKVTVKQLKEDYFKKIECFDSVEISGVEDRFNASLGTYHDLLKIIKDKDFLDNEENEDILEDIVLTLTLFEDREMIEERLKTYAHLFDDKVMKQLKRRRYTGWGRLSRKLINGIRDKQSGKTILDFLKSDGFANRNFMQLIHDDSLTFKEDIQKAQVSGQGDSLHEHIANLAGSPAIKKGILQTVKVVDELVKVMGRHKPENIVIEMARENQTTQKGQKNSRERMKRIEEGIKELGSQILKEHPVENTQLQNEKLYLYYLQNGRDMYVDQELDINRLSDYDVDHIVPQSFLKDDSIDNKVLTRSDKARGKSDNVPSEEVVKKMKNYWRQLLNAKLITQRKFDNLTKAERGGLSELDKAGFIKRQLVETRQITKHVAQILDSRMNTKYDENDKLIREVKVITLKSKLVSDFRKDFQFYKVREINNYHHAHDAYLNAVVGTALIKKYPKLESEFVYGDYKVYDVRKMIAKSEQEIGKATAKYFFYSNIMNFFKTEITLANGEIRKRPLIETNGETGEIVWDKGRDFATVRKVLSMPQVNIVKKTEVQTGGFSKESILPKRNSDKLIARKKDWDPKKYGGFDSPTVAYSVLVVAKVEKGKSKKLKSVKELLGITIMERSSFEKNPIDFLEAKGYKEVKKDLIIKLPKYSLFELENGRKRMLASAGELQKGNELALPSKYVNFLYLASHYEKLKGSPEDNEQKQLFVEQHKHYLDEIIEQISEFSKRVILADANLDKVLSAYNKHRDKPIREQAENIIHLFTLTNLGAPAAFKYFDTTIDRKRYTSTKEVLDATLIHQSITGLYETRIDLSQLGGDGGGGSGGSGGSGGSGGSGGSGGTLNIEDEYRLHETSKGPDVPLGSTWLSDFPQAWAETGGMGLAVRQAPLIIPLKATSTPVSIKQYPMSQEARLGIKPHIQRLLDQGILVPCQSPWNTPLLPVKKPGTNDYRPVQDLREVNKRVEDIHPTVPNPYNLLSGLPPSHQWYTVLDLKDAFFCLRLHPTSQSLFAFEWRDPEMGISGQLTWTRLPQGFKNSPTLFNEALHRDLADFRIQHPDLILLQYVDDLLLAATSELDCQQGTRALLQTLGDLGYRASAKKAQICQKQVKYLGYLLKEGQRWLTEARKETVMGQPTPKTPRQLREFLGTAGFCRLWIPGFAEMAAPLYPLTKPGTLFEWGPDQQKAYQEIKQALLTAPALGLPDLTKPFELFVDEKQGYAKGVLTQKLGPWRRPVAYLSKKLDPVAAGWPPCLRMVAAIAVLTKDAGKLTMGQPLVILAPHAVEALVKQPPDRWLSNARMTHYQALLLDTDRVQFGPIVALNPATLLPLPEEGLQHDCLDILAEAHGTRPDLTDQPLPDADHTWYTDGSSFLQEGQRKAGAAVTTETEVVWAKALPAGTSAQRAELIALTQALKMAEGKKLNVYTDSRYAFATAHIHGEIYRRRGWLTSEGKEIKNKDEILALLKALFLPKRLSIIHCPGHQKGNRAEARGNRMADQAAREVATRETPETSTLLAGKRTADGSEFEKRTADGSEFESPKKKAKVE

SEQ ID NO: 6097 - protein, 2103 aa, synthetic construct
MPAAKRVKLDGGDKKYSIGLDIGTNSVGWAVITDEYKVPSKKFKVLGNTDRHSIKKNLIGALLFDSGETAEATRLKRTARRRYTRRKNRICYLQEIFSNEMAKVDDSFFHRLEESFLVEEDKKHERHPIFGNIVDEVAYHEKYPTIYHLRKKLVDSTDKADLRLIYLALAHMIKFRGHFLIEGDLNPDNSDVDKLFIQLVQTYNQLFEENPINASGVDAKAILSARLSKSRRLENLIAQLPGEKKNGLFGNLIALSLGLTPNFKSNFDLAEDAKLQLSKDTYDDDLDNLLAQIGDQYADLFLAAKNLSDAILLSDILRVNTEITKAPLSASMIKRYDEHHQDLTLLKALVRQQLPEKYKEIFFDQSKNGYAGYIDGGASQEEFYKFIKPILEKMDGTEELLVKLNREDLLRKQRTFDNGSIPHQIHLGELHAILRRQEDFYPFLKDNREKIEKILTFRIPYYVGPLARGNSRFAWMTRKSEETITPWNFEEVVDKGASAQSFIERMTNFDKNLPNEKVLPKHSLLYEYFTVYNELTKVKYVTEGMRKPAFLSGEQKKAIVDLLFKTNRKVTVKQLKEDYFKKIECFDSVEISGVEDRFNASLGTYHDLLKIIKDKDFLDNEENEDILEDIVLTLTLFEDREMIEERLKTYAHLFDDKVMKQLKRRRYTGWGRLSRKLINGIRDKQSGKTILDFLKSDGFANRNFMQLIHDDSLTFKEDIQKAQVSGQGDSLHEHIANLAGSPAIKKGILQTVKVVDELVKVMGRHKPENIVIEMARENQTTQKGQKNSRERMKRIEEGIKELGSQILKEHPVENTQLQNEKLYLYYLQNGRDMYVDQELDINRLSDYDVDHIVPQSFLKDDSIDNKVLTRSDKARGKSDNVPSEEVVKKMKNYWRQLLNAKLITQRKFDNLTKAERGGLSELDKAGFIKRQLVETRQITKHVAQILDSRMNTKYDENDKLIREVKVITLKSKLVSDFRKDFQFYKVREINNYHHAHDAYLNAVVGTALIKKYPKLESEFVYGDYKVYDVRKMIAKSEQEIGKATAKYFFYSNIMNFFKTEITLANGEIRKRPLIETNGETGEIVWDKGRDFATVRKVLSMPQVNIVKKTEVQTGGFSKESILPKRNSDKLIARKKDWDPKKYGGFDSPTVAYSVLVVAKVEKGKSKKLKSVKELLGITIMERSSFEKNPIDFLEAKGYKEVKKDLIIKLPKYSLFELENGRKRMLASAGELQKGNELALPSKYVNFLYLASHYEKLKGSPEDNEQKQLFVEQHKHYLDEIIEQISEFSKRVILADANLDKVLSAYNKHRDKPIREQAENIIHLFTLTNLGAPAAFKYFDTTIDRKRYTSTKEVLDATLIHQSITGLYETRIDLSQLGGDGGGGSGGSGGSGGSGGSGGSGGTLNIEDEHRLHETSKEPDVSLGSTWLSDFPQAWAETGGMGLAVRQAPLIIPLKATSTPVSIKQYPMSQEARLGIKPHIQRLLDQGILVPCQSPWNTPLLPVKKPGTNDYRPVQDLREVNKRVEDIHPTVPNPYNLLSGLPPSHQWYTVLDLKDAFFCLRLHPTSQPLFAFEWRDPEMGISGQLTWTRLPQGFKNSPTLFDEALHRDLADFRIQHPDLILLQYVDDLLLAATSELDCQQGTRALLQTLGNLGYRASAKKAQICQKQVKYLGYLLKEGQRWLTEARKETVMGQPTPKTPRQLREFLGTAGFCRLWIPGFAEMAAPLYPLTKTGTLFNWGPDQQKAYQEIKQALLTAPALGLPDLTKPFELFVDEKQGYAKGVLTQKLGPWRRPVAYLSKKLDPVAAGWPPCLRMVAAIAVLTKDAGKLTMGQPLVILAPHAVEALVKQPPDRWLSNARMTHYQALLLDTDRVQFGPVVALNPATLLPLPEEGLQHNCLDILAEAHGTRPDLTDQPLPDADHTWYTDGSSLLQEGQRKAGAAVTTETEVIWAKALPAGTSAQRAELIALTQALKMAEGKKLNVYTDSRYAFATAHIHGEIYRRRGLLTSEGKEIKNKDEILALLKALFLPKRLSIIHCPGHQKGHSAEARGNRMADQAARKAAITETPDTSTLLAGKRTADGSEFEKRTADGSEFESPKKKAKVE

SEQ ID NO: 6098 - protein, 2103 aa, synthetic construct
MPAAKRVKLDGGDKKYSIGLDIGTNSVGWAVITDEYKVPSKKFKVLGNTDRHSIKKNLIGALLFDSGETAEATRLKRTARRRYTRRKNRICYLQEIFSNEMAKVDDSFFHRLEESFLVEEDKKHERHPIFGNIVDEVAYHEKYPTIYHLRKKLVDSTDKADLRLIYLALAHMIKFRGHFLIEGDLNPDNSDVDKLFIQLVQTYNQLFEENPINASGVDAKAILSARLSKSRRLENLIAQLPGEKKNGLFGNLIALSLGLTPNFKSNFDLAEDAKLQLSKDTYDDDLDNLLAQIGDQYADLFLAAKNLSDAILLSDILRVNTEITKAPLSASMIKRYDEHHQDLTLLKALVRQQLPEKYKEIFFDQSKNGYAGYIDGGASQEEFYKFIKPILEKMDGTEELLVKLNREDLLRKQRTFDNGSIPHQIHLGELHAILRRQEDFYPFLKDNREKIEKILTFRIPYYVGPLARGNSRFAWMTRKSEETITPWNFEEVVDKGASAQSFIERMTNFDKNLPNEKVLPKHSLLYEYFTVYNELTKVKYVTEGMRKPAFLSGEQKKAIVDLLFKTNRKVTVKQLKEDYFKKIECFDSVEISGVEDRFNASLGTYHDLLKIIKDKDFLDNEENEDILEDIVLTLTLFEDREMIEERLKTYAHLFDDKVMKQLKRRRYTGWGRLSRKLINGIRDKQSGKTILDFLKSDGFANRNFMQLIHDDSLTFKEDIQKAQVSGQGDSLHEHIANLAGSPAIKKGILQTVKVVDELVKVMGRHKPENIVIEMARENQTTQKGQKNSRERMKRIEEGIKELGSQILKEHPVENTQLQNEKLYLYYLQNGRDMYVDQELDINRLSDYDVDHIVPQSFLKDDSIDNKVLTRSDKARGKSDNVPSEEVVKKMKNYWRQLLNAKLITQRKFDNLTKAERGGLSELDKAGFIKRQLVETRQITKHVAQILDSRMNTKYDENDKLIREVKVITLKSKLVSDFRKDFQFYKVREINNYHHAHDAYLNAVVGTALIKKYPKLESEFVYGDYKVYDVRKMIAKSEQEIGKATAKYFFYSNIMNFFKTEITLANGEIRKRPLIETNGETGEIVWDKGRDFATVRKVLSMPQVNIVKKTEVQTGGFSKESILPKRNSDKLIARKKDWDPKKYGGFDSPTVAYSVLVVAKVEKGKSKKLKSVKELLGITIMERSSFEKNPIDFLEAKGYKEVKKDLIIKLPKYSLFELENGRKRMLASAGELQKGNELALPSKYVNFLYLASHYEKLKGSPEDNEQKQLFVEQHKHYLDEIIEQISEFSKRVILADANLDKVLSAYNKHRDKPIREQAENIIHLFTLTNLGAPAAFKYFDTTIDRKRYTSTKEVLDATLIHQSITGLYETRIDLSQLGGDGGGGSGGSGGSGGSGGSGGSGGTLNIEDEHRLHETSKEPDVSLGSTWLSDFPQAWAETGGMGLAVRQAPLIIPLKATSTPVSIKQYPMSQEARLGIKPHIQRLLDQGILVPCQSPWNTPLLPVKKPGTNDYRPVQDLREVNKRVEDIHPTVPNPYNLLSGLPPSHQWYTVLDLKDAFFCLRLHPTSQPLFAFEWRDPEMGISGQLTWTRLPQGFKNSPTLFNEALHRDLADFRIQHPDLILLQYVDDLLLAATSELDCQQGTRALLQTLGNLGYRASAKKAQICQKQVKYLGYLLKEGQRWLTEARKETVMGQPTPKTPRQLREFLGTAGFCRLWIPGFAEMAAPLYPLTKPGTLFNWGPDQQKAYQEIKQALLTAPALGLPDLTKPFELFVDEKQGYAKGVLTQKLGPWRRPVAYLSKKLDPVAAGWPPCLRMVAAIAVLTKDAGKLTMGQPLVILAPHAVEALVKQPPDRWLSNARMTHYQALLLDTDRVQFGPVVALNPATLLPLPEEGLQHNCLDILAEAHGTRPDLTDQPLPDADHTWYTDGSSLLQEGQRKAGAAVTTETEVIWAKALPAGTSAQRAELIALTQALKMAEGKKLNVYTDSRYAFATAHIHGEIYRRRGWLTSEGKEIKNKDEILALLKALFLPKRLSIIHCPGHQKGHSAEARGNRMADQAARKAAITETPDTSTLLAGKRTADGSEFEKRTADGSEFESPKKKAKVE

SEQ ID NO: 6099 - protein, 2103 aa, synthetic construct; identical to SEQ ID NO: 6098

SEQ ID NO: 6100 - protein, 2017 aa, synthetic construct
MPAAKRVKLDGGDKKYSIGLDIGTNSVGWAVITDEYKVPSKKFKVLGNTDRHSIKKNLIGALLFDSGETAEATRLKRTARRRYTRRKNRICYLQEIFSNEMAKVDDSFFHRLEESFLVEEDKKHERHPIFGNIVDEVAYHEKYPTIYHLRKKLVDSTDKADLRLIYLALAHMIKFRGHFLIEGDLNPDNSDVDKLFIQLVQTYNQLFEENPINASGVDAKAILSARLSKSRRLENLIAQLPGEKKNGLFGNLIALSLGLTPNFKSNFDLAEDAKLQLSKDTYDDDLDNLLAQIGDQYADLFLAAKNLSDAILLSDILRVNTEITKAPLSASMIKRYDEHHQDLTLLKALVRQQLPEKYKEIFFDQSKNGYAGYIDGGASQEEFYKFIKPILEKMDGTEELLVKLNREDLLRKQRTFDNGSIPHQIHLGELHAILRRQEDFYPFLKDNREKIEKILTFRIPYYVGPLARGNSRFAWMTRKSEETITPWNFEEVVDKGASAQSFIERMTNFDKNLPNEKVLPKHSLLYEYFTVYNELTKVKYVTEGMRKPAFLSGEQKKAIVDLLFKTNRKVTVKQLKEDYFKKIECFDSVEISGVEDRFNASLGTYHDLLKIIKDKDFLDNEENEDILEDIVLTLTLFEDREMIEERLKTYAHLFDDKVMKQLKRRRYTGWGRLSRKLINGIRDKQSGKTILDFLKSDGFANRNFMQLIHDDSLTFKEDIQKAQVSGQGDSLHEHIANLAGSPAIKKGILQTVKVVDELVKVMGRHKPENIVIEMARENQTTQKGQKNSRERMKRIEEGIKELGSQILKEHPVENTQLQNEKLYLYYLQNGRDMYVDQELDINRLSDYDVDHIVPQSFLKDDSIDNKVLTRSDKARGKSDNVPSEEVVKKMKNYWRQLLNAKLITQRKFDNLTKAERGGLSELDKAGFIKRQLVETRQITKHVAQILDSRMNTKYDENDKLIREVKVITLKSKLVSDFRKDFQFYKVREINNYHHAHDAYLNAVVGTALIKKYPKLESEFVYGDYKVYDVRKMIAKSEQEIGKATAKYFFYSNIMNFFKTEITLANGEIRKRPLIETNGETGEIVWDKGRDFATVRKVLSMPQVNIVKKTEVQTGGFSKESILPKRNSDKLIARKKDWDPKKYGGFDSPTVAYSVLVVAKVEKGKSKKLKSVKELLGITIMERSSFEKNPIDFLEAKGYKEVKKDLIIKLPKYSLFELENGRKRMLASAGELQKGNELALPSKYVNFLYLASHYEKLKGSPEDNEQKQLFVEQHKHYLDEIIEQISEFSKRVILADANLDKVLSAYNKHRDKPIREQAENIIHLFTLTNLGAPAAFKYFDTTIDRKRYTSTKEVLDATLIHQSITGLYETRIDLSQLGGDGGGGSGGSGGSGGSGGSGGSGGLTAAIDILAPQQCAEPITWKSDEPVWVDQWPLTNDKLAAAQQLVQEQLEAGHITESSSPWNTPIFVIKKKSGKWRLLQDLRAVNATMVLMGALQPGLPSPVAPPQGYLKIIIDLKDCFFSIPLHPSDQKRFAFSLPSTNFKEPMQRFQWKVLPQGMANSPTLCQKYVATAIHKVRHAWKQMYIIHYMDDILIAGKDGQQVLQCFDQLKQELTAAGLHIAPEKVQLQDPYTYLGFELNGPKITNQKAVIRKDKLQTLNDFQKLLGDINWLRPYLKLTTGDLKPLFDTLKPDSDPNSHRSLSKEALASLEKVETAIAEQFVTHINYSLPLIFLIFNTALTPTGLFWQDNPIMWIHLPASPKKVLLPYYDAIADLIILGRDHSKKYFGIEPSTIIQPYSKSQIDWLMQNTEMWPIACASFVGILDNHYPPNKLIQFCKLHTFVFPQIISKTPLNNALLVFTDGSSTGMAAYTLTDTTIKFQTNLNSAQLVELQALIAVLSAFPNQPLNIYTDSAYLAHSIPLLETVAQIKHISETAKLFLQCQQLIYNRSIPFYIGHVRAHSGLPGPIAQGNQRADLATKIVASNINTAGKRTADGSEFEKRTADGSEFESPKKKAKVE

SEQ ID NO: 6101 - protein, 2183 aa, synthetic construct
MPAAKRVKLDGGDKKYSIGLDIGTNSVGWAVITDEYKVPSKKFKVLGNTDRHSIKKNLIGALLFDSGETAEATRLKRTARRRYTRRKNRICYLQEIFSNEMAKVDDSFFHRLEESFLVEEDKKHERHPIFGNIVDEVAYHEKYPTIYHLRKKLVDSTDKADLRLIYLALAHMIKFRGHFLIEGDLNPDNSDVDKLFIQLVQTYNQLFEENPINASGVDAKAILSARLSKSRRLENLIAQLPGEKKNGLFGNLIALSLGLTPNFKSNFDLAEDAKLQLSKDTYDDDLDNLLAQIGDQYADLFLAAKNLSDAILLSDILRVNTEITKAPLSASMIKRYDEHHQDLTLLKALVRQQLPEKYKEIFFDQSKNGYAGYIDGGASQEEFYKFIKPILEKMDGTEELLVKLNREDLLRKQRTFDNGSIPHQIHLGELHAILRRQEDFYPFLKDNREKIEKILTFRIPYYVGPLARGNSRFAWMTRKSEETITPWNFEEVVDKGASAQSFIERMTNFDKNLPNEKVLPKHSLLYEYFTVYNELTKVKYVTEGMRKPAFLSGEQKKAIVDLLFKTNRKVTVKQLKEDYFKKIECFDSVEISGVEDRFNASLGTYHDLLKIIKDKDFLDNEENEDILEDIVLTLTLFEDREMIEERLKTYAHLFDDKVMKQLKRRRYTGWGRLSRKLINGIRDKQSGKTILDFLKSDGFANRNFMQLIHDDSLTFKEDIQKAQVSGQGDSLHEHIANLAGSPAIKKGILQTVKVVDELVKVMGRHKPENIVIEMARENQTTQKGQKNSRERMKRIEEGIKELGSQILKEHPVENTQLQNEKLYLYYLQNGRDMYVDQELDINRLSDYDVDHIVPQSFLKDDSIDNKVLTRSDKARGKSDNVPSEEVVKKMKNYWRQLLNAKLITQRKFDNLTKAERGGLSELDKAGFIKRQLVETRQITKHVAQILDSRMNTKYDENDKLIREVKVITLKSKLVSDFRKDFQFYKVREINNYHHAHDAYLNAVVGTALIKKYPKLESEFVYGDYKVYDVRKMIAKSEQEIGKATAKYFFYSNIMNFFKTEITLANGEIRKRPLIETNGETGEIVWDKGRDFATVRKVLSMPQVNIVKKTEVQTGGFSKESILPKRNSDKLIARKKDWDPKKYGGFDSPTVAYSVLVVAKVEKGKSKKLKSVKELLGITIMERSSFEKNPIDFLEAKGYKEVKKDLIIKLPKYSLFELENGRKRMLASAGELQKGNELALPSKYVNFLYLASHYEKLKGSPEDNEQKQLFVEQHKHYLDEIIEQISEFSKRVILADANLDKVLSAYNKHRDKPIREQAENIIHLFTLTNLGAPAAFKYFDTTIDRKRYTSTKEVLDATLIHQSITGLYETRIDLSQLGGDGGGGSGGSGGSGGSGGSGGSGGMDPLQLLQPLEAEIKGTKLKAHWNSGATITCVPQAFLEEEVPIKNIWIKTIHGEKEQPVYYLTFKIQGRKVEAEVISSPYDYILVSPSDIPWLMKKPLQLTTLVPLQEYEERLLKQTMLTGSYKEKLQSLFLKYDALWQHWENQVGHRRIKPHHIATGTVNPRPQKQYPINPKAKASIQTVINDLLKQGVLIQQNSIMNTPVYPVPKPDGKWRMVLDYREVNKTIPLIAAQNQHSAGILSSIFRGKYKTTLDLSNGFWAHSITPESYWLTAFTWLGQQYCWTRLPQGFLNSPALFTADVVDLLKEVPNVQVYVDDIYISHDDPREHLEQLEKVFSLLLNAGYVVSLKKSEIAQHEVEFLGFNITKEGRGLTETFKQKLLNITPPRDLKQLQSILGLLNFARNFIPNFSELVKPLYNIIATANGKYITWTTDNSQQLQNIISMLNSAENLEERNPEVRLIMKVNTSPSAGYIRFYNEFAKRPIMYLNYVYTKAEVKFTNTEKLLTTIHKGLIKALDLGMGQEILVYSPIVSMTKIQKTPLPERKALPIRWITWMSYLEDPRIQFHYDKTLPELQQVPTVTDDIIAKIKHPSEFSMVFYTDGSAIKHPNVNKSHNAGMGIAQVQFKPEFTVINTWSIPLGDHTAQLAEVAAVEFACKKALKIDGPVLIVTDSFYVAESVNKELPYWQSNGFFNNKKKPLKHVSKWKSIADCIQLKPDIIIIHEKGHQPTASTFHTEGNNLADKLATQGSYVVNAGKRTADGSEFEKRTADGSEFESPKKKAKVE

SEQ ID NO: 6102 - protein, 2094 aa, synthetic construct
MPAAKRVKLDGGDKKYSIGLDIGTNSVGWAVITDEYKVPSKKFKVLGNTDRHSIKKNLIGALLFDSGETAEATRLKRTARRRYTRRKNRICYLQEIFSNEMAKVDDSFFHRLEESFLVEEDKKHERHPIFGNIVDEVAYHEKYPTIYHLRKKLVDSTDKADLRLIYLALAHMIKFRGHFLIEGDLNPDNSDVDKLFIQLVQTYNQLFEENPINASGVDAKAILSARLSKSRRLENLIAQLPGEKKNGLFGNLIALSLGLTPNFKSNFDLAEDAKLQLSKDTYDDDLDNLLAQIGDQYADLFLAAKNLSDAILLSDILRVNTEITKAPLSASMIKRYDEHHQDLTLLKALVRQQLPEKYKEIFFDQSKNGYAGYIDGGASQEEFYKFIKPILEKMDGTEELLVKLNREDLLRKQRTFDNGSIPHQIHLGELHAILRRQEDFYPFLKDNREKIEKILTFRIPYYVGPLARGNSRFAWMTRKSEETITPWNFEEVVDKGASAQSFIERMTNFDKNLPNEKVLPKHSLLYEYFTVYNELTKVKYVTEGMRKPAFLSGEQKKAIVDLLFKTNRKVTVKQLKEDYFKKIECFDSVEISGVEDRFNASLGTYHDLLKIIKDKDFLDNEENEDILEDIVLTLTLFEDREMIEERLKTYAHLFDDKVMKQLKRRRYTGWGRLSRKLINGIRDKQSGKTILDFLKSDGFANRNFMQLIHDDSLTFKEDIQKAQVSGQGDSLHEHIANLAGSPAIKKGILQTVKVVDELVKVMGRHKPENIVIEMARENQTTQKGQKNSRERMKRIEEGIKELGSQILKEHPVENTQLQNEKLYLYYLQNGRDMYVDQELDINRLSDYDVDHIVPQSFLKDDSIDNKVLTRSDKARGKSDNVPSEEVVKKMKNYWRQLLNAKLITQRKFDNLTKAERGGLSELDKAGFIKRQLVETRQITKHVAQILDSRMNTKYDENDKLIREVKVITLKSKLVSDFRKDFQFYKVREINNYHHAHDAYLNAVVGTALIKKYPKLESEFVYGDYKVYDVRKMIAKSEQEIGKATAKYFFYSNIMNFFKTEITLANGEIRKRPLIETNGETGEIVWDKGRDFATVRKVLSMPQVNIVKKTEVQTGGFSKESILPKRNSDKLIARKKDWDPKKYGGFDSPTVAYSVLVVAKVEKGKSKKLKSVKELLGITIMERSSFEKNPIDFLEAKGYKEVKKDLIIKLPKYSLFELENGRKRMLASAGELQKGNELALPSKYVNFLYLASHYEKLKGSPEDNEQKQLFVEQHKHYLDEIIEQISEFSKRVILADANLDKVLSAYNKHRDKPIREQAENIIHLFTLTNLGAPAAFKYFDTTIDRKRYTSTKEVLDATLIHQSITGLYETRIDLSQLGGDGGGGSGGSGGSGGSGGSGGSGGIPWLMKKPLQLTTLVPLQEYEERLLKQTMLTGSYKEKLQSLFLKYDALWQHWENQVGHRRIKPHHIATGTVNPRPQKQYPINPKAKASIQTVINDLLKQGVLIQQNSIMNTPVYPVPKPDGKWRMVLDYREVNKTIPLIAAQNQHSAGILSSIFRGKYKTTLDLSNGFWAHSITPESYWLTAFTWLGQQYCWTRLPQGFLNSPALFNADVVDLLKEVPNVQVYVDDIYISHDDPREHLEQLEKVFSLLLNAGYVVSLKKSEIAQHEVEFLGFNITKEGRGLTETFKQKLLNITPPRDLKQLQSILGLLNFARNFIPNFSELVKPLYNIIATAPGKYITWTTDNSQQLQNIISMLNSAENLEERNPEVRLIMKVNTSPSAGYIRFYNEFAKRPIMYLNYVYTKAEVKFTNTEKLLTTIHKGLIKALDLGMGQEILVYSPIVSMTKIQKTPLPERKALPIRWITWMSYLEDPRIQFHYDKTLPELQQVPTVTDDIIAKIKHPSEFSMVFYTDGSAIKHPNVNKSHNAGMGIAQVQFKPEFTVINTWSIPLGDHTAQLAEVAAVEFACKKALKIDGPVLIVTDSFYVAESVNKELPYWQSNGFFNNKKKPLKHVSKWKSIADCIQLKPDIIIIHEKGHQPTASTFHTEGNNLADKLATQGSYVVNAGKRTADGSEFEKRTADGSEFESPKKKAKVE

SEQ ID NO: 6103 - protein, 2094 aa, synthetic construct
MPAAKRVKLDGGDKKYSIGLDIGTNSVGWAVITDEYKVPSKKFKVLGNTDRHSIKKNLIGALLFDSGETAEATRLKRTARRRYTRRKNRICYLQEIFSNEMAKVDDSFFHRLEESFLVEEDKKHERHPIFGNIVDEVAYHEKYPTIYHLRKKLVDSTDKADLRLIYLALAHMIKFRGHFLIEGDLNPDNSDVDKLFIQLVQTYNQLFEENPINASGVDAKAILSARLSKSRRLENLIAQLPGEKKNGLFGNLIALSLGLTPNFKSNFDLAEDAKLQLSKDTYDDDLDNLLAQIGDQYADLFLAAKNLSDAILLSDILRVNTEITKAPLSASMIKRYDEHHQDLTLLKALVRQQLPEKYKEIFFDQSKNGYAGYIDGGASQEEFYKFIKPILEKMDGTEELLVKLNREDLLRKQRTFDNGSIPHQIHLGELHAILRRQEDFYPFLKDNREKIEKILTFRIPYYVGPLARGNSRFAWMTRKSEETITPWNFEEVVDKGASAQSFIERMTNFDKNLPNEKVLPKHSLLYEYFTVYNELTKVKYVTEGMRKPAFLSGEQKKAIVDLLFKTNRKVTVKQLKEDYFKKIECFDSVEISGVEDRFNASLGTYHDLLKIIKDKDFLDNEENEDILEDIVLTLTLFEDREMIEERLKTYAHLFDDKVMKQLKRRRYTGWGRLSRKLINGIRDKQSGKTILDFLKSDGFANRNFMQLIHDDSLTFKEDIQKAQVSGQGDSLHEHIANLAGSPAIKKGILQTVKVVDELVKVMGRHKPENIVIEMARENQTTQKGQKNSRERMKRIEEGIKELGSQILKEHPVENTQLQNEKLYLYYLQNGRDMYVDQELDINRLSDYDVDHIVPQSFLKDDSIDNKVLTRSDKARGKSDNVPSEEVVKKMKNYWRQLLNAKLITQRKFDNLTKAERGGLSELDKAGFIKRQLVETRQITKHVAQILDSRMNTKYDENDKLIREVKVITLKSKLVSDFRKDFQFYKVREINNYHHAHDAYLNAVVGTALIKKYPKLESEFVYGDYKVYDVRKMIAKSEQEIGKATAKYFFYSNIMNFFKTEITLANGEIRKRPLIETNGETGEIVWDKGRDFATVRKVLSMPQVNIVKKTEVQTGGFSKESILPKRNSDKLIARKKDWDPKKYGGFDSPTVAYSVLVVAKVEKGKSKKLKSVKELLGITIMERSSFEKNPIDFLEAKGYKEVKKDLIIKLPKYSLFELENGRKRMLASAGELQKGNELALPSKYVNFLYLASHYEKLKGSPEDNEQKQLFVEQHKHYLDEIIEQISEFSKRVILADANLDKVLSAYNKHRDKPIREQAENIIHLFTLTNLGAPAAFKYFDTTIDRKRYTSTKEVLDATLIHQSITGLYETRIDLSQLGGDGGGGSGGSGGSGGSGGSGGSGGIPWLMKKPLQLTTLVPLQEYEERLLKQTMLTGSYKEKLQSLFLKYDALWQHWENQVGHRRIKPHHIATGTVNPRPQKQYPINPKAKASIQTVINDLLKQGVLIQQNSIMNTPVYPVPKPDGKWRMVLDYREVNKTIPLIAAQNQHSAGILSSIFRGKYKTTLDLSNGFWAHSITPESYWLTAFTWLGQQYCWTRLPQGFLNSPALFNADVVDLLKEVPNVQVYVDDIYISHDDPREHLEQLEKVFSLLLNAGYVVSLKKSEIAQHEVEFLGFNITKEGRGLTETFKQKLLNITPPRDLKQLQSILGKLNFARNFIPNFSELVKPLYNIIATAPGKYITWTTDNSQQLQNIISMLNSAENLEERNPEVRLIMKVNTSPSAGYIRFYNEFAKRPIMYLNYVYTKAEVKFTNTEKLLTTIHKGLIKALDLGMGQEILVYSPIVSMTKIQKTPLPERKALPIRWITWMSYLEDPRIQFHYDKTLPELQQVPTVTDDIIAKIKHPSEFSMVFYTDGSAIKHPNVNKSHNAGMGIAQVQFKPEFTVINTWSIPLGDHTAQLAEVAAVEFACKKALKIDGPVLIVTDSFYVAESVNKELPYWQSNGFFNNKKKPLKHVSKWKSIADCIQLKPDIIIIHEKGHQPTASTFHTEGNNLADKLATQGSYVVNAGKRTADGSEFEKRTADGSEFESPKKKAKVE

SEQ ID NO: 6104 - protein, 2024 aa, synthetic construct
MPAAKRVKLDGGDKKYSIGLDIGTNSVGWAVITDEYKVPSKKFKVLGNTDRHSIKKNLIGALLFDSGETAEATRLKRTARRRYTRRKNRICYLQEIFSNEMAKVDDSFFHRLEESFLVEEDKKHERHPIFGNIVDEVAYHEKYPTIYHLRKKLVDSTDKADLRLIYLALAHMIKFRGHFLIEGDLNPDNSDVDKLFIQLVQTYNQLFEENPINASGVDAKAILSARLSKSRRLENLIAQLPGEKKNGLFGNLIALSLGLTPNFKSNFDLAEDAKLQLSKDTYDDDLDNLLAQIGDQYADLFLAAKNLSDAILLSDILRVNTEITKAPLSASMIKRYDEHHQDLTLLKALVRQQLPEKYKEIFFDQSKNGYAGYIDGGASQEEFYKFIKPILEKMDGTEELLVKLNREDLLRKQRTFDNGSIPHQIHLGELHAILRRQEDFYPFLKDNREKIEKILTFRIPYYVGPLARGNSRFAWMTRKSEETITPWNFEEVVDKGASAQSFIERMTNFDKNLPNEKVLPKHSLLYEYFTVYNELTKVKYVTEGMRKPAFLSGEQKKAIVDLLFKTNRKVTVKQLKEDYFKKIECFDSVEISGVEDRFNASLGTYHDLLKIIKDKDFLDNEENEDILEDIVLTLTLFEDREMIEERLKTYAHLFDDKVMKQLKRRRYTGWGRLSRKLINGIRDKQSGKTILDFLKSDGFANRNFMQLIHDDSLTFKEDIQKAQVSGQGDSLHEHIANLAGSPAIKKGILQTVKVVDELVKVMGRHKPENIVIEMARENQTTQKGQKNSRERMKRIEEGIKELGSQILKEHPVENTQLQNEKLYLYYLQNGRDMYVDQELDINRLSDYDVDHIVPQSFLKDDSIDNKVLTRSDKARGKSDNVPSEEVVKKMKNYWRQLLNAKLITQRKFDNLTKAERGGLSELDKAGFIKRQLVETRQITKHVAQILDSRMNTKYDENDKLIREVKVITLKSKLVSDFRKDFQFYKVREINNYHHAHDAYLNAVVGTALIKKYPKLESEFVYGDYKVYDVRKMIAKSEQEIGKATAKYFFYSNIMNFFKTEITLANGEIRKRPLIETNGETGEIVWDKGRDFATVRKVLSMPQVNIVKKTEVQTGGFSKESILPKRNSDKLIARKKDWDPKKYGGFDSPTVAYSVLVVAKVEKGKSKKLKSVKELLGITIMERSSFEKNPIDFLEAKGYKEVKKDLIIKLPKYSLFELENGRKRMLASAGELQKGNELALPSKYVNFLYLASHYEKLKGSPEDNEQKQLFVEQHKHYLDEIIEQISEFSKRVILADANLDKVLSAYNKHRDKPIREQAENIIHLFTLTNLGAPAAFKYFDTTIDRKRYTSTKEVLDATLIHQSITGLYETRIDLSQLGGDGGGGSGGSGGSGGSGGSGGSGGPRSRAIDIPVPHADKISWKITDPVWVDQWPLTYEKTLAAIALVQEQLAAGHIEPTNSPWNTPIFIIKKKSGSWRLLQDLRAVNKVMVPMGALQPGLPSPVAIPLNYHKIVIDLKDCFFTIPLHPEDRPYFAFSVPQINFQSPMPRYQWKVLPQGMANSPTLCQKFVAAAIAPVRSQWPEAYILHYMDDILLACDSAEAAKACYAHIISCLTSYGLKIAPDKVQVSEPFSYLGFELHHQQVFTPRVCLKTDHLKTLNDFQKLLGDIQWLRPYLKLPTSALVPLNNILKGDPNPLSVRALTPEAKQSLALINKAIQNQSVQQISYNLPLVLLLLPTPHTPTAVFWQPNGTDPTKNGSPLLWLHLPASPSKVLLTYPSLLAMLIIKGRYTGRQLFGRDPHSIIIPYTQDQLTWLLQTSDEWAIALSSFTGDIDNHYPSDPVIQFAKLHQFIFPKITKCAPIPQATLVFTDGSSNGIAAYVIDNQPISIKSPYLSAQLVELYAILQVFTVLAHQPFNLYTDSAYIAQSVPLLETVPFIKSSTNATPLFSKLQQLILNRQHPFFIGHLRAHLNLPGPLAEGNALADAATQIFPIISDAGKRTADGSEFEKRTADGSEFESPKKKAKVE

SEQ ID NO: 6105 - protein, 2101 aa, synthetic construct
MPAAKRVKLDGGDKKYSIGLDIGTNSVGWAVITDEYKVPSKKFKVLGNTDRHSIKKNLIGALLFDSGETAEATRLKRTARRRYTRRKNRICYLQEIFSNEMAKVDDSFFHRLEESFLVEEDKKHERHPIFGNIVDEVAYHEKYPTIYHLRKKLVDSTDKADLRLIYLALAHMIKFRGHFLIEGDLNPDNSDVDKLFIQLVQTYNQLFEENPINASGVDAKAILSARLSKSRRLENLIAQLPGEKKNGLFGNLIALSLGLTPNFKSNFDLAEDAKLQLSKDTYDDDLDNLLAQIGDQYADLFLAAKNLSDAILLSDILRVNTEITKAPLSASMIKRYDEHHQDLTLLKALVRQQLPEKYKEIFFDQSKNGYAGYIDGGASQEEFYKFIKPILEKMDGTEELLVKLNREDLLRKQRTFDNGSIPHQIHLGELHAILRRQEDFYPFLKDNREKIEKILTFRIPYYVGPLARGNSRFAWMTRKSEETITPWNFEEVVDKGASAQSFIERMTNFDKNLPNEKVLPKHSLLYEYFTVYNELTKVKYVTEGMRKPAFLSGEQKKAIVDLLFKTNRKVTVKQLKEDYFKKIECFDSVEISGVEDRFNASLGTYHDLLKIIKDKDFLDNEENEDILEDIVLTLTLFEDREMIEERLKTYAHLFDDKVMKQLKRRRYTGWGRLSRKLINGIRDKQSGKTILDFLKSDGFANRNFMQLIHDDSLTFKEDIQKAQVSGQGDSLHEHIANLAGSPAIKKGILQTVKVVDELVKVMGRHKPENIVIEMARENQTTQKGQKNSRERMKRIEEGIKELGSQILKEHPVENTQLQNEKLYLYYLQNGRDMYVDQELDINRLSDYDVDHIVPQSFLKDDSIDNKVLTRSDKARGKSDNVPSEEVVKKMKNYWRQLLNAKLITQRKFDNLTKAERGGLSELDKAGFIKRQLVETRQITKHVAQILDSRMNTKYDENDKLIREVKVITLKSKLVSDFRKDFQFYKVREINNYHHAHDAYLNAVVGTALIKKYPKLESEFVYGDYKVYDVRKMIAKSEQEIGKATAKYFFYSNIMNFFKTEITLANGEIRKRPLIETNGETGEIVWDKGRDFATVRKVLSMPQVNIVKKTEVQTGGFSKESILPKRNSDKLIARKKDWDPKKYGGFDSPTVAYSVLVVAKVEKGKSKKLKSVKELLGITIMERSSFEKNPIDFLEAKGYKEVKKDLIIKLPKYSLFELENGRKRMLASAGELQKGNELALPSKYVNFLYLASHYEKLKGSPEDNEQKQLFVEQHKHYLDEIIEQISEFSKRVILADANLDKVLSAYNKHRDKPIREQAENIIHLFTLTNLGAPAAFKYFDTTIDRKRYTSTKEVLDATLIHQSITGLYETRIDLSQLGGDGGGGSGGSGGSGGSGGSGGSGGVLNLEEEYRLHEKPVPSSIDPSWLQLFPTVWAERAGMGLANQVPPVVVELRSGASPVAVRQYPMSKEAREGIRPHIQRFLDLGVLVPCQSPWNTPLLPVKKPGTNDYRPVQDLREINKRVQDIHPTVPNPYNLLSSLPPSHTWYSVLDLKDAFFCLKLHPNSQPLFAFEWRDPEKGNTGQLTWTRLPQGFKNSPTLFDEALHRDLAPFRALNPQVVLLQYVDDLLVAAPTYRDCKEGTQKLLQELSKLGYRVSAKKAQLCQKEVTYLGYLLKEGKRWLTPARKATVMKIPPPTTPRQVREFLGTAGFCRLWIPGFASLAAPLYPLTKESIPFIWTEEHQKAFDRIKEALLSAPALALPDLTKPFTLYVDERAGVARGVLTQTLGPWRRPVAYLSKKLDPVASGWPTCLKAVAAVALLLKDADKLTLGQNVTVIASHSLESIVRQPPDRWMTNARMTHYQSLLLNERVSFAPPAVLNPATLLPVESEATPVHRCSEILAEETGTRRDLKDQPLPGVPAWYTDGSSFIAEGKRRAGAAIVDGKRTVWASSLPEGTSAQKAELVALTQALRLAEGKDINIYTDSRYAFATAHIHGAIYKQRGLLTSAGKDIKNKEEILALLEAIHLPKRVAIIHCPGHQKGNDPVATGNRRADEAAKQAALSTRVLAETTKPAGKRTADGSEFEKRTADGSEFESPKKKAKVE

SEQ ID NO: 6106 - protein, 2101 aa, synthetic construct
MPAAKRVKLDGGDKKYSIGLDIGTNSVGWAVITDEYKVPSKKFKVLGNTDRHSIKKNLIGALLFDSGETAEATRLKRTARRRYTRRKNRICYLQEIFSNEMAKVDDSFFHRLEESFLVEEDKKHERHPIFGNIVDEVAYHEKYPTIYHLRKKLVDSTDKADLRLIYLALAHMIKFRGHFLIEGDLNPDNSDVDKLFIQLVQTYNQLFEENPINASGVDAKAILSARLSKSRRLENLIAQLPGEKKNGLFGNLIALSLGLTPNFKSNFDLAEDAKLQLSKDTYDDDLDNLLAQIGDQYADLFLAAKNLSDAILLSDILRVNTEITKAPLSASMIKRYDEHHQDLTLLKALVRQQLPEKYKEIFFDQSKNGYAGYIDGGASQEEFYKFIKPILEKMDGTEELLVKLNREDLLRKQRTFDNGSIPHQIHLGELHAILRRQEDFYPFLKDNREKIEKILTFRIPYYVGPLARGNSRFAWMTRKSEETITPWNFEEVVDKGASAQSFIERMTNFDKNLPNEKVLPKHSLLYEYFTVYNELTKVKYVTEGMRKPAFLSGEQKKAIVDLLFKTNRKVTVKQLKEDYFKKIECFDSVEISGVEDRFNASLGTYHDLLKIIKDKDFLDNEENEDILEDIVLTLTLFEDREMIEERLKTYAHLFDDKVMKQLKRRRYTGWGRLSRKLINGIRDKQSGKTILDFLKSDGFANRNFMQLIHDDSLTFKEDIQKAQVSGQGDSLHEHIANLAGSPAIKKGILQTVKVVDELVKVMGRHKPENIVIEMARENQTTQKGQKNSRERMKRIEEGIKELGSQILKEHPVENTQLQNEKLYLYYLQNGRDMYVDQELDINRLSDYDVDHIVPQSFLKDDSIDNKVLTRSDKARGKSDNVPSEEVVKKMKNYWRQLLNAKLITQRKFDNLTKAERGGLSELDKAGFIKRQLVETRQITKHVAQILDSRMNTKYDENDKLIREVKVITLKSKLVSDFRKDFQFYKVREINNYHHAHDAYLNAVVGTALIKKYPKLESEFVYGDYKVYDVRKMIAKSEQEIGKATAKYFFYSNIMNFFKTEITLANGEIRKRPLIETNGETGEIVWDKGRDFATVRKVLSMPQVNIVKKTEVQTGGFSKESILPKRNSDKLIARKKDWDPKKYGGFDSPTVAYSVLVVAKVEKGKSKKLKSVKELLGITIMERSSFEKNPIDFLEAKGYKEVKKDLIIKLPKYSLFELENGRKRMLASAGELQKGNELALPSKYVNFLYLASHYEKLKGSPEDNEQKQLFVEQHKHYLDEIIEQISEFSKRVILADANLDKVLSAYNKHRDKPIREQAENIIHLFTLTNLGAPAAFKYFDTTIDRKRYTSTKEVLDATLIHQSITGLYETRIDLSQLGGDGGGGSGGSGGSGGSGGSGGSGGVLNLEEEYRLHEKPVPSSIDPSWLQLFPTVWAERAGMGLANQVPPVVVELRSGASPVAVRQYPMSKEAREGIRPHIQRFLDLGVLVPCQSPWNTPLLPVKKPGTNDYRPVQDLREINKRVQDIHPTVPNPYNLLSSLPPSHTWYSVLDLKDAFFCLKLHPNSQPLFAFEWRDPEKGNTGQLTWTRLPQGFKNSPTLFNEALHRDLAPFRALNPQVVLLQYVDDLLVAAPTYRDCKEGTQKLLQELSKLGYRVSAKKAQLCQKEVTYLGYLLKEGKRWLTPARKATVMKIPPPTTPRQVREFLGTAGFCRLWIPGFASLAAPLYPLTKPSIPFIWTEEHQKAFDRIKEALLSAPALALPDLTKPFTLYVDERAGVARGVLTQTLGPWRRPVAYLSKKLDPVASGWPTCLKAVAAVALLLKDADKLTLGQNVTVIASHSLESIVRQPPDRWMTNARMTHYQSLLLNERVSFAPPAVLNPATLLPVESEATPVHRCSEILAEETGTRRDLKDQPLPGVPAWYTDGSSFIAEGKRRAGAAIVDGKRTVWASSLPEGTSAQKAELVALTQALRLAEGKDINIYTDSRYAFATAHIHGAIYKQRGWLTSAGKDIKNKEEILALLEAIHLPKRVAIIHCPGHQKGNDPVATGNRRADEAAKQAALSTRVLAETTKPAGKRTADGSEFEKRTADGSEFESPKKKAKVE

SEQ ID NO: 6107 - protein, 2103 aa, synthetic construct
MPAAKRVKLDGGDKKYSIGLDIGTNSVGWAVITDEYKVPSKKFKVLGNTDRHSIKKNLIGALLFDSGETAEATRLKRTARRRYTRRKNRICYLQEIFSNEMAKVDDSFFHRLEESFLVEEDKKHERHPIFGNIVDEVAYHEKYPTIYHLRKKLVDSTDKADLRLIYLALAHMIKFRGHFLIEGDLNPDNSDVDKLFIQLVQTYNQLFEENPINASGVDAKAILSARLSKSRRLENLIAQLPGEKKNGLFGNLIALSLGLTPNFKSNFDLAEDAKLQLSKDTYDDDLDNLLAQIGDQYADLFLAAKNLSDAILLSDILRVNTEITKAPLSASMIKRYDEHHQDLTLLKALVRQQLPEKYKEIFFDQSKNGYAGYIDGGASQEEFYKFIKPILEKMDGTEELLVKLNREDLLRKQRTFDNGSIPHQIHLGELHAILRRQEDFYPFLKDNREKIEKILTFRIPYYVGPLARGNSRFAWMTRKSEETITPWNFEEVVDKGASAQSFIERMTNFDKNLPNEKVLPKHSLLYEYFTVYNELTKVKYVTEGMRKPAFLSGEQKKAIVDLLFKTNRKVTVKQLKEDYFKKIECFDSVEISGVEDRFNASLGTYHDLLKIIKDKDFLDNEENEDILEDIVLTLTLFEDREMIEERLKTYAHLFDDKVMKQLKRRRYTGWGRLSRKLINGIRDKQSGKTILDFLKSDGFANRNFMQLIHDDSLTFKEDIQKAQVSGQGDSLHEHIANLAGSPAIKKGILQTVKVVDELVKVMGRHKPENIVIEMARENQTTQKGQKNSRERMKRIEEGIKELGSQILKEHPVENTQLQNEKLYLYYLQNGRDMYVDQELDINRLSDYDVDHIVPQSFLKDDSIDNKVLTRSDKARGKSDNVPSEEVVKKMKNYWRQLLNAKLITQRKFDNLTKAERGGLSELDKAGFIKRQLVETRQITKHVAQILDSRMNTKYDENDKLIREVKVITLKSKLVSDFRKDFQFYKVREINNYHHAHDAYLNAVVGTALIKKYPKLESEFVYGDYKVYDVRKMIAKSEQEIGKATAKYFFYSNIMNFFKTEITLANGEIRKRPLIETNGETGEIVWDKGRDFATVRKVLSMPQVNIVKKTEVQTGGFSKESILPKRNSDKLIARKKDWDPKKYGGFDSPTVAYSVLVVAKVEKGKSKKLKSVKELLGITIMERSSFEKNPIDFLEAKGYKEVKKDLIIKLPKYSLFELENGRKRMLASAGELQKGNELALPSKYVNFLYLASHYEKLKGSPEDNEQKQLFVEQHKHYLDEIIEQISEFSKRVILADANLDKVLSAYNKHRDKPIREQAENIIHLFTLTNLGAPAAFKYFDTTIDRKRYTSTKEVLDATLIHQSITGLYETRIDLSQLGGDGGGGSGGSGGSGGSGGSGGSGGTLNIEDEYRLHETSKEPDVPLGSTWLSDFPQAWAETGGMGLAVRQAPLIIPLKATSTPVSIKQYPMSQEARLGIKPHIQRLLDQGILVPCQSPWNTPLLPVKKPGTNDYRPVQDLREVNKRVEDIHPTVPNPYNLLSGLPPSHQWYTVLDLKDAFFCLRLHPTSQPLFAFEWRDPEMGISGQLTWTRLPQGFKNSPTLFNEALHRDLADFRIQHPDLILLQYVDDLLLAATSEQDCQRGTRALLQTLGNLGYRASAKKAQICQKQVKYLGYLLKEGQRWLTEARKETVMGQPTPKTPRQLREFLGKAGFCRLFIPGFAEMAAPLYPLTKPGTLFNWGPDQQKAYQEIKQALLTAPALGLPDLTKPFELFVDEKQGYAKGVLTQKLGPWRRPVAYLSKKLDPVAAGWPPCLRMVAAIAVLTKDAGKLTMGQPLVILAPHAVEALVKQPPDRWLSNARMTHYQAMLLDTDRVQFGPVVALNPATLLPLPEKEAPHDCLEILAETHGTRPDLTDQPIPDADYTWYTDGSSFLQEGQRRAGAAVTTETEVIWARALPAGTSAQRAELIALTQALKMAEGKKLNVYTDSRYAFATAHVHGEIYRRRGWLTSEGREIKNKNEILALLKALFLPKRLSIIHCPGHQKGNSAEARGNRMADQAAREAAMKAVLETSTLLAGKRTADGSEFEKRTADGSEFESPKKKAKVE

SEQ ID NO: 6108 - protein, 2092 aa, synthetic construct
MPAAKRVKLDGGDKKYSIGLDIGTNSVGWAVITDEYKVPSKKFKVLGNTDRHSIKKNLIGALLFDSGETAEATRLKRTARRRYTRRKNRICYLQEIFSNEMAKVDDSFFHRLEESFLVEEDKKHERHPIFGNIVDEVAYHEKYPTIYHLRKKLVDSTDKADLRLIYLALAHMIKFRGHFLIEGDLNPDNSDVDKLFIQLVQTYNQLFEENPINASGVDAKAILSARLSKSRRLENLIAQLPGEKKNGLFGNLIALSLGLTPNFKSNFDLAEDAKLQLSKDTYDDDLDNLLAQIGDQYADLFLAAKNLSDAILLSDILRVNTEITKAPLSASMIKRYDEHHQDLTLLKALVRQQLPEKYKEIFFDQSKNGYAGYIDGGASQEEFYKFIKPILEKMDGTEELLVKLNREDLLRKQRTFDNGSIPHQIHLGELHAILRRQEDFYPFLKDNREKIEKILTFRIPYYVGPLARGNSRFAWMTRKSEETITPWNFEEVVDKGASAQSFIERMTNFDKNLPNEKVLPKHSLLYEYFTVYNELTKVKYVTEGMRKPAFLSGEQKKAIVDLLFKTNRKVTVKQLKEDYFKKIECFDSVEISGVEDRFNASLGTYHDLLKIIKDKDFLDNEENEDILEDIVLTLTLFEDREMIEERLKTYAHLFDDKVMKQLKRRRYTGWGRLSRKLINGIRDKQSGKTILDFLKSDGFANRNFMQLIHDDSLTFKEDIQKAQVSGQGDSLHEHIANLAGSPAIKKGILQTVKVVDELVKVMGRHKPENIVIEMARENQTTQKGQKNSRERMKRIEEGIKELGSQILKEHPVENTQLQNEKLYLYYLQNGRDMYVDQELDINRLSDYDVDHIVPQSFLKDDSIDNKVLTRSDKARGKSDNVPSEEVVKKMKNYWRQLLNAKLITQRKFDNLTKAERGGLSELDKAGFIKRQLVETRQITKHVAQILDSRMNTKYDENDKLIREVKVITLKSKLVSDFRKDFQFYKVREINNYHHAHDAYLNAVVGTALIKKYPKLESEFVYGDYKVYDVRKMIAKSEQEIGKATAKYFFYSNIMNFFKTEITLANGEIRKRPLIETNGETGEIVWDKGRDFATVRKVLSMPQVNIVKKTEVQTGGFSKESILPKRNSDKLIARKKDWDPKKYGGFDSPTVAYSVLVVAKVEKGKSKKLKSVKELLGITIMERSSFEKNPIDFLEAKGYKEVKKDLIIKLPKYSLFELENGRKRMLASAGELQKGNELALPSKYVNFLYLASHYEKLKGSPEDNEQKQLFVEQHKHYLDEIIEQISEFSKRVILADANLDKVLSAYNKHRDKPIREQAENIIHLFTLTNLGAPAAFKYFDTTIDRKRYTSTKEVLDATLIHQSITGLYETRIDLSQLGGDGGGGGGSGGTAPLEEEYRLFLEAPIQNVTLLEQWKREIPKVWAEINPPGLASTQAPIHVQLLSTALPVRVRQYPITLEAKRSLRETIRKFRAAGILRPVHSPWNTPLLPVRKSGTSEYRMVQDLREVNKRVETIHPTVPNPYTLLSLLPPDRIWYSVLDLKDAFFCIPLAPESQLIFAFEWADAEEGESGQLTWTRLPQGFKNSPTLFNEALNRDLQGFRLDHPSVSLLQYVDDLLIAADTQAACLSATRDLLMTLAELGYRVSGKKAQLCQEEVTYLGFKIHKGSRSLSNSRTQAILQIPVPKTKRQVREFLGKIGYCRLFIPGFAELAQPLYAATRPGNDPLVWGEKEEEAFQSLKLALTQPPALALPSLDKPFQLFVEETSGAAKGVLTQALGPWKRPVAYLSKRLDPVAAGWPRCLRAIAAAALLTREASKLTFGQDIEITSSHNLESLLRSPPDKWLTNARITQYQVLLLDPPRVRFKQTAALNPATLLPETDDTLPIHHCLDTLDSLTSTRPDLTDQPLAQAEATLFTDGSSYIRDGKRYAGAAVVTLDSVIWAEPLPIGTSAQKAELIALTKALEWSKDKSVNIYTDSRYAFATLHVHGMIYRERGWLTAGGKAIKNAPEILALLTAVWLPKRVAVMHCKGHQKDDAPTSTGNRRADEVAREVAIRPLSTQATISAGKRTADGSEFEKRTADGSEFESPKKKAKVE

SEQ ID NO: 6109 - protein, 2081 aa, synthetic construct
MPAAKRVKLDGGDKKYSIGLDIGTNSVGWAVITDEYKVPSKKFKVLGNTDRHSIKKNLIGALLFDSGETAEATRLKRTARRRYTRRKNRICYLQEIFSNEMAKVDDSFFHRLEESFLVEEDKKHERHPIFGNIVDEVAYHEKYPTIYHLRKKLVDSTDKADLRLIYLALAHMIKFRGHFLIEGDLNPDNSDVDKLFIQLVQTYNQLFEENPINASGVDAKAILSARLSKSRRLENLIAQLPGEKKNGLFGNLIALSLGLTPNFKSNFDLAEDAKLQLSKDTYDDDLDNLLAQIGDQYADLFLAAKNLSDAILLSDILRVNTEITKAPLSASMIKRYDEHHQDLTLLKALVRQQLPEKYKEIFFDQSKNGYAGYIDGGASQEEFYKFIKPILEKMDGTEELLVKLNREDLLRKQRTFDNGSIPHQIHLGELHAILRRQEDFYPFLKDNREKIEKILTFRIPYYVGPLARGNSRFAWMTRKSEETITPWNFEEVVDKGASAQSFIERMTNFDKNLPNEKVLPKHSLLYEYFTVYNELTKVKYVTEGMRKPAFLSGEQKKAIVDLLFKTNRKVTVKQLKEDYFKKIECFDSVEISGVEDRFNASLGTYHDLLKIIKDKDFLDNEENEDILEDIVLTLTLFEDREMIEERLKTYAHLFDDKVMKQLKRRRYTGWGRLSRKLINGIRDKQSGKTILDFLKSDGFANRNFMQLIHDDSLTFKEDIQKAQVSGQGDSLHEHIANLAGSPAIKKGILQTVKVVDELVKVMGRHKPENIVIEMARENQTTQKGQKNSRERMKRIEEGIKELGSQILKEHPVENTQLQNEKLYLYYLQNGRDMYVDQELDINRLSDYDVDHIVPQSFLKDDSIDNKVLTRSDKARGKSDNVPSEEVVKKMKNYWRQLLNAKLITQRKFDNLTKAERGGLSELDKAGFIKRQLVETRQITKHVAQILDSRMNTKYDENDKLIREVKVITLKSKLVSDFRKDFQFYKVREINNYHHAHDAYLNAVVGTALIKKYPKLESEFVYGDYKVYDVRKMIAKSEQEIGKATAKYFFYSNIMNFFKTEITLANGEIRKRPLIETNGETGEIVWDKGRDFATVRKVLSMPQVNIVKKTEVQTGGFSKESILPKRNSDKLIARKKDWDPKKYGGFDSPTVAYSVLVVAKVEKGKSKKLKSVKELLGITIMERSSFEKNPIDFLEAKGYKEVKKDLIIKLPKYSLFELENGRKRMLASAGELQKGNELALPSKYVNFLYLASHYEKLKGSPEDNEQKQLFVEQHKHYLDEIIEQISEFSKRVILADANLDKVLSAYNKHRDKPIREQAENIIHLFTLTNLGAPAAFKYFDTTIDRKRYTSTKEVLDATLIHQSITGLYETRIDLSQLGGDGGGGGGSGGVPWILKKPLELTIKLDLEEQQGTLLNNSILSKKGKEELKQLFEKYSALWQSWENQVGHRRIRPHKIATGTVKPTPQKQYHINPKAKPDIQIVINDLLKQGVLIQKESTMNTPVYPVPKPNGRWRMVLDYRAVNKVTPLIAVQNQHSYGILGSLFKGRYKTTIDLSNGFWAHPIVPEDYWITAFTWQGKQYCWTVLPQGFLNSPGLFTGDVVDLLQGIPNVEVYVDDVYISHDSEKEHLEYLDILFNRLKEAGYIISLKKSNIANSIVDFLGFQITNEGRGLTDTFKEKLENITAPTTLKQLQSILGLLNFARNFIPDFTELIAPLYALIPKSTKNYVPWQIEHSTTLETLITKLNGAEYLQGRKGDKTLIMKVNASYTTGYIRYYNEGEKKPISYVSIVFSKTELKFTELEKLLTTVHKGLLKALDLSMGQNIHVYSPIVSMQNIQKTPQTAKKALASRWLSWLSYLEDPRIRFFYDPQMPALKDLPAVDTGKDNKKHPSNFQHIFYTDGSAITSPTKEGHLNAGMGIVYFINKDGNLQKQQEWSISLGNHTAQFAEIAAFEFALKKCLPLGGNILVVTDSNYVAKAYNEELDVWASNGFVNNRKKPLKHISKWKSVADLKRLRPDVVVTHEPGHQKLDSSPHAYGNNLADQLATQASFKVHAGKRTADGSEFEKRTADGSEFESPKKKAKVE

SEQ ID NO: 6110 - protein, 2088 aa, synthetic construct
MPAAKRVKLDGGDKKYSIGLDIGTNSVGWAVITDEYKVPSKKFKVLGNTDRHSIKKNLIGALLFDSGETAEATRLKRTARRRYTRRKNRICYLQEIFSNEMAKVDDSFFHRLEESFLVEEDKKHERHPIFGNIVDEVAYHEKYPTIYHLRKKLVDSTDKADLRLIYLALAHMIKFRGHFLIEGDLNPDNSDVDKLFIQLVQTYNQLFEENPINASGVDAKAILSARLSKSRRLENLIAQLPGEKKNGLFGNLIALSLGLTPNFKSNFDLAEDAKLQLSKDTYDDDLDNLLAQIGDQYADLFLAAKNLSDAILLSDILRVNTEITKAPLSASMIKRYDEHHQDLTLLKALVRQQLPEKYKEIFFDQSKNGYAGYIDGGASQEEFYKFIKPILEKMDGTEELLVKLNREDLLRKQRTFDNGSIPHQIHLGELHAILRRQEDFYPFLKDNREKIEKILTFRIPYYVGPLARGNSRFAWMTRKSEETITPWNFEEVVDKGASAQSFIERMTNFDKNLPNEKVLPKHSLLYEYFTVYNELTKVKYVTEGMRKPAFLSGEQKKAIVDLLFKTNRKVTVKQLKEDYFKKIECFDSVEISGVEDRFNASLGTYHDLLKIIKDKDFLDNEENEDILEDIVLTLTLFEDREMIEERLKTYAHLFDDKVMKQLKRRRYTGWGRLSRKLINGIRDKQSGKTILDFLKSDGFANRNFMQLIHDDSLTFKEDIQKAQVSGQGDSLHEHIANLAGSPAIKKGILQTVKVVDELVKVMGRHKPENIVIEMARENQTTQKGQKNSRERMKRIEEGIKELGSQILKEHPVENTQLQNEKLYLYYLQNGRDMYVDQELDINRLSDYDVDHIVPQSFLKDDSIDNKVLTRSDKARGKSDNVPSEEVVKKMKNYWRQLLNAKLITQRKFDNLTKAERGGLSELDKAGFIKRQLVETRQITKHVAQILDSRMNTKYDENDKLIREVKVITLKSKLVSDFRKDFQFYKVREINNYHHAHDAYLNAVVGTALIKKYPKLESEFVYGDYKVYDVRKMIAKSEQEIGKATAKYFFYSNIMNFFKTEITLANGEIRKRPLIETNGETGEIVWDKGRDFATVRKVLSMPQVNIVKKTEVQTGGFSKESILPKRNSDKLIARKKDWDPKKYGGFDSPTVAYSVLVVAKVEKGKSKKLKSVKELLGITIMERSSFEKNPIDFLEAKGYKEVKKDLIIKLPKYSLFELENGRKRMLASAGELQKGNELALPSKYVNFLYLASHYEKLKGSPEDNEQKQLFVEQHKHYLDEIIEQISEFSKRVILADANLDKVLSAYNKHRDKPIREQAENIIHLFTLTNLGAPAAFKYFDTTIDRKRYTSTKEVLDATLIHQSITGLYETRIDLSQLGGDGGGGGGSGGVLNLEEEYRLHEKPVPSSIDPSWLQLFPTVWAERAGMGLANQVPPVVVELRSGASPVAVRQYPMSKEAREGIRPHIQKFLDLGVLVPCRSPWNTPLLPVKKPGTNDYRPVQDLREINKRVQDIHPTVPNPYNLLSSLPPSYTWYSVLDLKDAFFCLRLHPNSQPLFAFEWKDPEKGNTGQLTWTRLPQGFKNSPTLFNEALHRDLAPFRALNPQVVLLQYVDDLLVAAPTYEDCKKGTQKLLQELSKLGYRVSAKKAQLCQREVTYLGYLLKEGKRWLTPARKATVMKIPVPTTPRQVREFLGTAGFCRLWIPGFASLAAPLYPLTKPSIPFIWTEEHQQAFDHIKKALLSAPALALPDLTKPFTLYIDERAGVARGVLTQTLGPWRRPVAYLSKKLDPVASGWPTCLKAVAAVALLLKDADKLTLGQNVTVIASHSLESIVRQPPDRWMTNARMTHYQSLLLNERVSFAPPAVLNPATLLPVESEATPVHRCSEILAEETGTRRDLEDQPLPGVPTWYTDGSSFITEGKRRAGAPIVDGKRTVWASSLPEGTSAQKAELVALTQALRLAEGKNINIYTDSRYAFATAHIHGAIYKQRGWLTSAGKDIKNKEEILALLEAIHLPRRVAIIHCPGHQRGSNPVATGNRRADEAAKQAALSTRVLAGTTKPAGKRTADGSEFEKRTADGSEFESPKKKAKVE

SEQ ID NO: 6111 - protein, 2090 aa, synthetic construct
MPAAKRVKLDGGDKKYSIGLDIGTNSVGWAVITDEYKVPSKKFKVLGNTDRHSIKKNLIGALLFDSGETAEATRLKRTARRRYTRRKNRICYLQEIFSNEMAKVDDSFFHRLEESFLVEEDKKHERHPIFGNIVDEVAYHEKYPTIYHLRKKLVDSTDKADLRLIYLALAHMIKFRGHFLIEGDLNPDNSDVDKLFIQLVQTYNQLFEENPINASGVDAKAILSARLSKSRRLENLIAQLPGEKKNGLFGNLIALSLGLTPNFKSNFDLAEDAKLQLSKDTYDDDLDNLLAQIGDQYADLFLAAKNLSDAILLSDILRVNTEITKAPLSASMIKRYDEHHQDLTLLKALVRQQLPEKYKEIFFDQSKNGYAGYIDGGASQEEFYKFIKPILEKMDGTEELLVKLNREDLLRKQRTFDNGSIPHQIHLGELHAILRRQEDFYPFLKDNREKIEKILTFRIPYYVGPLARGNSRFAWMTRKSEETITPWNFEEVVDKGASAQSFIERMTNFDKNLPNEKVLPKHSLLYEYFTVYNELTKVKYVTEGMRKPAFLSGEQKKAIVDLLFKTNRKVTVKQLKEDYFKKIECFDSVEISGVEDRFNASLGTYHDLLKIIKDKDFLDNEENEDILEDIVLTLTLFEDREMIEERLKTYAHLFDDKVMKQLKRRRYTGWGRLSRKLINGIRDKQSGKTILDFLKSDGFANRNFMQLIHDDSLTFKEDIQKAQVSGQGDSLHEHIANLAGSPAIKKGILQTVKVVDELVKVMGRHKPENIVIEMARENQTTQKGQKNSRERMKRIEEGIKELGSQILKEHPVENTQLQNEKLYLYYLQNGRDMYVDQELDINRLSDYDVDHIVPQSFLKDDSIDNKVLTRSDKARGKSDNVPSEEVVKKMKNYWRQLLNAKLITQRKFDNLTKAERGGLSELDKAGFIKRQLVETRQITKHVAQILDSRMNTKYDENDKLIREVKVITLKSKLVSDFRKDFQFYKVREINNYHHAHDAYLNAVVGTALIKKYPKLESEFVYGDYKVYDVRKMIAKSEQEIGKATAKYFFYSNIMNFFKTEITLANGEIRKRPLIETNGETGEIVWDKGRDFATVRKVLSMPQVNIVKKTEVQTGGFSKESILPKRNSDKLIARKKDWDPKKYGGFDSPTVAYSVLVVAKVEKGKSKKLKSVKELLGITIMERSSFEKNPIDFLEAKGYKEVKKDLIIKLPKYSLFELENGRKRMLASAGELQKGNELALPSKYVNFLYLASHYEKLKGSPEDNEQKQLFVEQHKHYLDEIIEQISEFSKRVILADANLDKVLSAYNKHRDKPIREQAENIIHLFTLTNLGAPAAFKYFDTTIDRKRYTSTKEVLDATLIHQSITGLYETRIDLSQLGGDGGGGGGSGGTLNIEDEYRLHETSKEPDVSLGSTWLSDFPQAWAETGGMGLAVRQAPLIIPLKATSTPVSIKQYPMSQEARLGIKPHIQRLLDQGILVPCQSPWNTPLLPVKKPGTNDYRPVQDLREVNKRVEDIHPTVPNPYNLLSGLPPSHQWYTVLDLKDAFFCLRLHPTSQPLFAFEWRDPEMGISGQLTWTRLPQGFKNSPTLFDEALHRDLAGFRIQHPDLILLQYVDDLLLAATSELDCQQGTRALLQTLGDLGYRASAKKAQICQKQVKYLGYLLKEGQRWLTEARKETVMGQPIPKTPRQLREFLGTAGFCRLWIPGFAEMAAPLYPLTKTGTLFNWGPDQQKAFQEIKQALLTAPALGLPDLTKPFELFVDEKQGYAKGVLTQKLGPWRRPVAYLSKKLDPVAAGWPPCLRMVAAIAVLTKDAGKLTMGQPLVILAPHAVEALVKQPPDRWLSNARMTHYQALLLDTDRVQFGPVVALNPATLLPLPEEGLQHDCLDILAEAHGTRSDLMDQPLPDADHTWYTDGSSFLQEGQRKAGAAVTTETEVIWARALPAGTSAQRAELIALTQALKMAEGKKLNVYTDSRYAFATAHIHGEIYRRRGLLTSEGKEIKNKDEILALLKALFLPKRLSIIHCPGHQKGNSAEARGNRMADQAAREVATRETPETSTLLAGKRTADGSEFEKRTADGSEFESPKKKAKVE

SEQ ID NO: 6112 - protein, 2090 aa, synthetic construct
MPAAKRVKLDGGDKKYSIGLDIGTNSVGWAVITDEYKVPSKKFKVLGNTDRHSIKKNLIGALLFDSGETAEATRLKRTARRRYTRRKNRICYLQEIFSNEMAKVDDSFFHRLEESFLVEEDKKHERHPIFGNIVDEVAYHEKYPTIYHLRKKLVDSTDKADLRLIYLALAHMIKFRGHFLIEGDLNPDNSDVDKLFIQLVQTYNQLFEENPINASGVDAKAILSARLSKSRRLENLIAQLPGEKKNGLFGNLIALSLGLTPNFKSNFDLAEDAKLQLSKDTYDDDLDNLLAQIGDQYADLFLAAKNLSDAILLSDILRVNTEITKAPLSASMIKRYDEHHQDLTLLKALVRQQLPEKYKEIFFDQSKNGYAGYIDGGASQEEFYKFIKPILEKMDGTEELLVKLNREDLLRKQRTFDNGSIPHQIHLGELHAILRRQEDFYPFLKDNREKIEKILTFRIPYYVGPLARGNSRFAWMTRKSEETITPWNFEEVVDKGASAQSFIERMTNFDKNLPNEKVLPKHSLLYEYFTVYNELTKVKYVTEGMRKPAFLSGEQKKAIVDLLFKTNRKVTVKQLKEDYFKKIECFDSVEISGVEDRFNASLGTYHDLLKIIKDKDFLDNEENEDILEDIVLTLTLFEDREMIEERLKTYAHLFDDKVMKQLKRRRYTGWGRLSRKLINGIRDKQSGKTILDFLKSDGFANRNFMQLIHDDSLTFKEDIQKAQVSGQGDSLHEHIANLAGSPAIKKGILQTVKVVDELVKVMGRHKPENIVIEMARENQTTQKGQKNSRERMKRIEEGIKELGSQILKEHPVENTQLQNEKLYLYYLQNGRDMYVDQELDINRLSDYDVDHIVPQSFLKDDSIDNKVLTRSDKARGKSDNVPSEEVVKKMKNYWRQLLNAKLITQRKFDNLTKAERGGLSELDKAGFIKRQLVETRQITKHVAQILDSRMNTKYDENDKLIREVKVITLKSKLVSDFRKDFQFYKVREINNYHHAHDAYLNAVVGTALIKKYPKLESEFVYGDYKVYDVRKMIAKSEQEIGKATAKYFFYSNIMNFFKTEITLANGEIRKRPLIETNGETGEIVWDKGRDFATVRKVLSMPQVNIVKKTEVQTGGFSKESILPKRNSDKLIARKKDWDPKKYGGFDSPTVAYSVLVVAKVEKGKSKKLKSVKELLGITIMERSSFEKNPIDFLEAKGYKEVKKDLIIKLPKYSLFELENGRKRMLASAGELQKGNELALPSKYVNFLYLASHYEKLKGSPEDNEQKQLFVEQHKHYLDEIIEQISEFSKRVILADANLDKVLSAYNKHRDKPIREQAENIIHLFTLTNLGAPAAFKYFDTTIDRKRYTSTKEVLDATLIHQSITGLYETRIDLSQLGGDGGGGGGSGGTLNIEDEYRLHETSKEPDVSLGSTWLSDFPQAWAETGGMGLAVRQAPLIIPLKATSTPVSIKQYPMSQEARLGIKPHIQRLLDQGILVPCQSPWNTPLLPVKKPGTNDYRPVQDLREVNKRVEDIHPTVPNPYNLLSGLPPSHQWYTVLDLKDAFFCLRLHPTSQPLFAFEWRDPEMGISGQLTWTRLPQGFKNSPTLFNEALHRDLAGFRIQHPDLILLQYVDDLLLAATSELDCQQGTRALLQTLGDLGYRASAKKAQICQKQVKYLGYLLKEGQRWLTEARKETVMGQPIPKTPRQLREFLGTAGFCRLWIPGFAEMAAPLYPLTKPGTLFNWGPDQQKAFQEIKQALLTAPALGLPDLTKPFELFVDEKQGYAKGVLTQKLGPWRRPVAYLSKKLDPVAAGWPPCLRMVAAIAVLTKDAGKLTMGQPLVILAPHAVEALVKQPPDRWLSNARMTHYQALLLDTDRVQFGPVVALNPATLLPLPEEGLQHDCLDILAEAHGTRSDLMDQPLPDADHTWYTDGSSFLQEGQRKAGAAVTTETEVIWARALPAGTSAQRAELIALTQALKMAEGKKLNVYTDSRYAFATAHIHGEIYRRRGWLTSEGKEIKNKDEILALLKALFLPKRLSIIHCPGHQKGNSAEARGNRMADQAAREVATRETPETSTLLAGKRTADGSEFEKRTADGSEFESPKKKAKVE

SEQ ID NO: 6113 - protein, 2110 aa, synthetic construct
MPAAKRVKLDGGDKKYSIGLDIGTNSVGWAVITDEYKVPSKKFKVLGNTDRHSIKKNLIGALLFDSGETAEATRLKRTARRRYTRRKNRICYLQEIFSNEMAKVDDSFFHRLEESFLVEEDKKHERHPIFGNIVDEVAYHEKYPTIYHLRKKLVDSTDKADLRLIYLALAHMIKFRGHFLIEGDLNPDNSDVDKLFIQLVQTYNQLFEENPINASGVDAKAILSARLSKSRRLENLIAQLPGEKKNGLFGNLIALSLGLTPNFKSNFDLAEDAKLQLSKDTYDDDLDNLLAQIGDQYADLFLAAKNLSDAILLSDILRVNTEITKAPLSASMIKRYDEHHQDLTLLKALVRQQLPEKYKEIFFDQSKNGYAGYIDGGASQEEFYKFIKPILEKMDGTEELLVKLNREDLLRKQRTFDNGSIPHQIHLGELHAILRRQEDFYPFLKDNREKIEKILTFRIPYYVGPLARGNSRFAWMTRKSEETITPWNFEEVVDKGASAQSFIERMTNFDKNLPNEKVLPKHSLLYEYFTVYNELTKVKYVTEGMRKPAFLSGEQKKAIVDLLFKTNRKVTVKQLKEDYFKKIECFDSVEISGVEDRFNASLGTYHDLLKIIKDKDFLDNEENEDILEDIVLTLTLFEDREMIEERLKTYAHLFDDKVMKQLKRRRYTGWGRLSRKLINGIRDKQSGKTILDFLKSDGFANRNFMQLIHDDSLTFKEDIQKAQVSGQGDSLHEHIANLAGSPAIKKGILQTVKVVDELVKVMGRHKPENIVIEMARENQTTQKGQKNSRERMKRIEEGIKELGSQILKEHPVENTQLQNEKLYLYYLQNGRDMYVDQELDINRLSDYDVDHIVPQSFLKDDSIDNKVLTRSDKARGKSDNVPSEEVVKKMKNYWRQLLNAKLITQRKFDNLTKAERGGLSELDKAGFIKRQLVETRQITKHVAQILDSRMNTKYDENDKLIREVKVITLKSKLVSDFRKDFQFYKVREINNYHHAHDAYLNAVVGTALIKKYPKLESEFVYGDYKVYDVRKMIAKSEQEIGKATAKYFFYSNIMNFFKTEITLANGEIRKRPLIETNGETGEIVWDKGRDFATVRKVLSMPQVNIVKKTEVQTGGFSKESILPKRNSDKLIARKKDWDPKKYGGFDSPTVAYSVLVVAKVEKGKSKKLKSVKELLGITIMERSSFEKNPIDFLEAKGYKEVKKDLIIKLPKYSLFELENGRKRMLASAGELQKGNELALPSKYVNFLYLASHYEKLKGSPEDNEQKQLFVEQHKHYLDEIIEQISEFSKRVILADANLDKVLSAYNKHRDKPIREQAENIIHLFTLTNLGAPAAFKYFDTTIDRKRYTSTKEVLDATLIHQSITGLYETRIDLSQLGGDGGGGGGSGGVQEISDSRPMLHIYLNGRRFLGLLDTGADKTCIAGRDWPANWPIHQTESSLQGLGMACGVARSSQPLRWQHEDKSGIIHPFVIPTLPFTLWGRDIMKDIKVRLMTDSPDDSQDLMIGAIESNLFADQISWKSDQPVWLNQWPLKQEKLQALQQLVTEQLQLGHLEESNSPWNTPVFVIKKKSGKWRLLQDLRAVNATMHDMGALQPGLPSPVAVPKGWEIIIIDLQDCFFNIKLHPEDCKRFAFSVPSPNFKRPYQRFQWKVLPQGMKNSPTLCQKFVDKAILTVRDKYQDSYIVHYMDDILLAHPSRSIVDEILTSMIQALNKHGLVVSTEKIQKYDNLKYLGTHIQGDSVSYQKLQIRTDKLRTLNDFQKLLGNINWIRPFLKLTTGELKPLFEILNGDSNPISTRKLTPEACKALQLMNERLSTARVKRLDLSQPWSLCILKTEYTPTACLWQDGVVEWIHLPHISPKVITPYDIFCTQLIIKGRHRSKELFSKDPDYIVVPYTKVQFDLLLQEKEDWPISLLGFLGEVHFHLPKDPLLTFTLQTAIIFPHMTSTTPLEKGIVIFTDGSANGRSVTYIQGREPIIKENTQNTAQQAEIVAVITAFEEVSQPFNLYTDSKYVTGLFPEIETATLSPRTKIYTELKHLQRLIHKRQEKFYIGHIRGHTGLPGPLAQGNAYADSLTRILTAAGKRTADGSEFEKRTADGSEFESPKKKAKVE

SEQ ID NO: 6114 - protein, 2170 aa, synthetic construct
MPAAKRVKLDGGDKKYSIGLDIGTNSVGWAVITDEYKVPSKKFKVLGNTDRHSIKKNLIGALLFDSGETAEATRLKRTARRRYTRRKNRICYLQEIFSNEMAKVDDSFFHRLEESFLVEEDKKHERHPIFGNIVDEVAYHEKYPTIYHLRKKLVDSTDKADLRLIYLALAHMIKFRGHFLIEGDLNPDNSDVDKLFIQLVQTYNQLFEENPINASGVDAKAILSARLSKSRRLENLIAQLPGEKKNGLFGNLIALSLGLTPNFKSNFDLAEDAKLQLSKDTYDDDLDNLLAQIGDQYADLFLAAKNLSDAILLSDILRVNTEITKAPLSASMIKRYDEHHQDLTLLKALVRQQLPEKYKEIFFDQSKNGYAGYIDGGASQEEFYKFIKPILEKMDGTEELLVKLNREDLLRKQRTFDNGSIPHQIHLGELHAILRRQEDFYPFLKDNREKIEKILTFRIPYYVGPLARGNSRFAWMTRKSEETITPWNFEEVVDKGASAQSFIERMTNFDKNLPNEKVLPKHSLLYEYFTVYNELTKVKYVTEGMRKPAFLSGEQKKAIVDLLFKTNRKVTVKQLKEDYFKKIECFDSVEISGVEDRFNASLGTYHDLLKIIKDKDFLDNEENEDILEDIVLTLTLFEDREMIEERLKTYAHLFDDKVMKQLKRRRYTGWGRLSRKLINGIRDKQSGKTILDFLKSDGFANRNFMQLIHDDSLTFKEDIQKAQVSGQGDSLHEHIANLAGSPAIKKGILQTVKVVDELVKVMGRHKPENIVIEMARENQTTQKGQKNSRERMKRIEEGIKELGSQILKEHPVENTQLQNEKLYLYYLQNGRDMYVDQELDINRLSDYDVDHIVPQSFLKDDSIDNKVLTRSDKARGKSDNVPSEEVVKKMKNYWRQLLNAKLITQRKFDNLTKAERGGLSELDKAGFIKRQLVETRQITKHVAQILDSRMNTKYDENDKLIREVKVITLKSKLVSDFRKDFQFYKVREINNYHHAHDAYLNAVVGTALIKKYPKLESEFVYGDYKVYDVRKMIAKSEQEIGKATAKYFFYSNIMNFFKTEITLANGEIRKRPLIETNGETGEIVWDKGRDFATVRKVLSMPQVNIVKKTEVQTGGFSKESILPKRNSDKLIARKKDWDPKKYGGFDSPTVAYSVLVVAKVEKGKSKKLKSVKELLGITIMERSSFEKNPIDFLEAKGYKEVKKDLIIKLPKYSLFELENGRKRMLASAGELQKGNELALPSKYVNFLYLASHYEKLKGSPEDNEQKQLFVEQHKHYLDEIIEQISEFSKRVILADANLDKVLSAYNKHRDKPIREQAENIIHLFTLTNLGAPAAFKYFDTTIDRKRYTSTKEVLDATLIHQSITGLYETRIDLSQLGGDGGGGGGSGGMDPLQLLQPLEAEIKGTKLKAHWNSGATITCVPEAFLEDERPIQTMLIKTIHGEKQQDVYYLTFKVQGRKVEAEVLASPYDYILLNPSDVPWLMKKPLQLTVLVPLHEYQERLLQQTALPKEQKELLQKLFLKYDALWQHWENQVGHRRIKPHNIATGTLAPRPQKQYPINPKAKPSIQIVIDDLLKQGVLIQQNSTMNTPVYPVPKPDGKWRMVLDYREVNKTIPLIAAQNQHSAGILSSIYRGKYKTTLDLTNGFWAHPITPESYWLTAFTWQGKQYCWTRLPQGFLNSPALFNADVVDLLKEIPNVQAYVDDIYISHDDPQEHLEQLEKIFSILLNAGYVVSLKKSEIAQREVEFLGFNITKEGRGLTDTFKQKLLNITPPKDLKQLQSILGKLNFARNFIPNYSELVKPLYTIVAPANGKFISWTEDNSNQLQHIISVLNQADNLEERNPETRLIIKVNSSPSAGYIRYYNEGSKRPIMYVNYIFSKAEAKFTQTEKLLTTMHKGLIKAMDLAMGQEILVYSPIVSMTKIQRTPLPERKALPVRWITWMTYLEDPRIQFHYDKSLPELQQIPNVTEDVIAKTKHPSEFAMVFYTDGSAIKHPDVNKSHSAGMGIAQVQFIPEYKIVHQWSIPLGDHTAQLAEIAAVEFACKKALKISGPVLIVTDSFYVAESANKELPYWKSNGFLNNKKKPLRHVSKWKSIAECLQLKPDIIIMHEKGHQQPMTTLHTEGNNLADKLATQGSYVVHAGKRTADGSEFEKRTADGSEFESPKKKAKVE

SEQ ID NO: 6115 - protein, 2088 aa, synthetic construct
MPAAKRVKLDGGDKKYSIGLDIGTNSVGWAVITDEYKVPSKKFKVLGNTDRHSIKKNLIGALLFDSGETAEATRLKRTARRRYTRRKNRICYLQEIFSNEMAKVDDSFFHRLEESFLVEEDKKHERHPIFGNIVDEVAYHEKYPTIYHLRKKLVDSTDKADLRLIYLALAHMIKFRGHFLIEGDLNPDNSDVDKLFIQLVQTYNQLFEENPINASGVDAKAILSARLSKSRRLENLIAQLPGEKKNGLFGNLIALSLGLTPNFKSNFDLAEDAKLQLSKDTYDDDLDNLLAQIGDQYADLFLAAKNLSDAILLSDILRVNTEITKAPLSASMIKRYDEHHQDLTLLKALVRQQLPEKYKEIFFDQSKNGYAGYIDGGASQEEFYKFIKPILEKMDGTEELLVKLNREDLLRKQRTFDNGSIPHQIHLGELHAILRRQEDFYPFLKDNREKIEKILTFRIPYYVGPLARGNSRFAWMTRKSEETITPWNFEEVVDKGASAQSFIERMTNFDKNLPNEKVLPKHSLLYEYFTVYNELTKVKYVTEGMRKPAFLSGEQKKAIVDLLFKTNRKVTVKQLKEDYFKKIECFDSVEISGVEDRFNASLGTYHDLLKIIKDKDFLDNEENEDILEDIVLTLTLFEDREMIEERLKTYAHLFDDKVMKQLKRRRYTGWGRLSRKLINGIRDKQSGKTILDFLKSDGFANRNFMQLIHDDSLTFKEDIQKAQVSGQGDSLHEHIANLAGSPAIKKGILQTVKVVDELVKVMGRHKPENIVIEMARENQTTQKGQKNSRERMKRIEEGIKELGSQILKEHPVENTQLQNEKLYLYYLQNGRDMYVDQELDINRLSDYDVDHIVPQSFLKDDSIDNKVLTRSDKARGKSDNVPSEEVVKKMKNYWRQLLNAKLITQRKFDNLTKAERGGLSELDKAGFIKRQLVETRQITKHVAQILDSRMNTKYDENDKLIREVKVITLKSKLVSDFRKDFQFYKVREINNYHHAHDAYLNAVVGTALIKKYPKLESEFVYGDYKVYDVRKMIAKSEQEIGKATAKYFFYSNIMNFFKTEITLANGEIRKRPLIETNGETGEIVWDKGRDFATVRKVLSMPQVNIVKKTEVQTGGFSKESILPKRNSDKLIARKKDWDPKKYGGFDSPTVAYSVLVVAKVEKGKSKKLKSVKELLGITIMERSSFEKNPIDFLEAKGYKEVKKDLIIKLPKYSLFELENGRKRMLASAGELQKGNELALPSKYVNFLYLASHYEKLKGSPEDNEQKQLFVEQHKHYLDEIIEQISEFSKRVILADANLDKVLSAYNKHRDKPIREQAENIIHLFTLTNLGAPAAFKYFDTTIDRKRYTSTKEVLDATLIHQSITGLYETRIDLSQLGGDGGGGGGSGGVLNLEEEYRLHEKPVPSSIDPSWLQLFPTVWAERAGMGLANQVPPVVVELRSGASPVAVRQYPMSKEAREGIRPHIQRFLDLGVLVPCQSPWNTPLLPVKKPGTNDYRPVQDLREINKRVQDIHPTVPNPYNLLSSLPPSHTWYSVLDLKDAFFCLKLHPNSQPLFAFEWRDPEKGNTGQLTWTRLPQGFKNSPTLFNEALHRDLAPFRALNPQVVLLQYVDDLLVAAPTYRDCKEGTQKLLQELSKLGYRVSAKKAQLCQKEVTYLGYLLKEGKRWLTPARKATVMKIPPPTTPRQVREFLGTAGFCRLWIPGFASLAAPLYPLTKPSIPFIWTEEHQKAFDRIKEALLSAPALALPDLTKPFTLYVDERAGVARGVLTQTLGPWRRPVAYLSKKLDPVASGWPTCLKAVAAVALLLKDADKLTLGQNVTVIASHSLESIVRQPPDRWMTNARMTHYQSLLLNERVSFAPPAVLNPATLLPVESEATPVHRCSEILAEETGTRRDLKDQPLPGVPAWYTDGSSFIAEGKRRAGAAIVDGKRTVWASSLPEGTSAQKAELVALTQALRLAEGKDINIYTDSRYAFATAHIHGAIYKQRGWLTSAGKDIKNKEEILALLEAIHLPKRVAIIHCPGHQKGNDPVATGNRRADEAAKQAALSTRVLAETTKPAGKRTADGSEFEKRTADGSEFESPKKKAKVE

SEQ ID NO: 6116 - protein, 2088 aa, synthetic construct
MPAAKRVKLDGGDKKYSIGLDIGTNSVGWAVITDEYKVPSKKFKVLGNTDRHSIKKNLIGALLFDSGETAEATRLKRTARRRYTRRKNRICYLQEIFSNEMAKVDDSFFHRLEESFLVEEDKKHERHPIFGNIVDEVAYHEKYPTIYHLRKKLVDSTDKADLRLIYLALAHMIKFRGHFLIEGDLNPDNSDVDKLFIQLVQTYNQLFEENPINASGVDAKAILSARLSKSRRLENLIAQLPGEKKNGLFGNLIALSLGLTPNFKSNFDLAEDAKLQLSKDTYDDDLDNLLAQIGDQYADLFLAAKNLSDAILLSDILRVNTEITKAPLSASMIKRYDEHHQDLTLLKALVRQQLPEKYKEIFFDQSKNGYAGYIDGGASQEEFYKFIKPILEKMDGTEELLVKLNREDLLRKQRTFDNGSIPHQIHLGELHAILRRQEDFYPFLKDNREKIEKILTFRIPYYVGPLARGNSRFAWMTRKSEETITPWNFEEVVDKGASAQSFIERMTNFDKNLPNEKVLPKHSLLYEYFTVYNELTKVKYVTEGMRKPAFLSGEQKKAIVDLLFKTNRKVTVKQLKEDYFKKIECFDSVEISGVEDRFNASLGTYHDLLKIIKDKDFLDNEENEDILEDIVLTLTLFEDREMIEERLKTYAHLFDDKVMKQLKRRRYTGWGRLSRKLINGIRDKQSGKTILDFLKSDGFANRNFMQLIHDDSLTFKEDIQKAQVSGQGDSLHEHIANLAGSPAIKKGILQTVKVVDELVKVMGRHKPENIVIEMARENQTTQKGQKNSRERMKRIEEGIKELGSQILKEHPVENTQLQNEKLYLYYLQNGRDMYVDQELDINRLSDYDVDHIVPQSFLKDDSIDNKVLTRSDKARGKSDNVPSEEVVKKMKNYWRQLLNAKLITQRKFDNLTKAERGGLSELDKAGFIKRQLVETRQITKHVAQILDSRMNTKYDENDKLIREVKVITLKSKLVSDFRKDFQFYKVREINNYHHAHDAYLNAVVGTALIKKYPKLESEFVYGDYKVYDVRKMIAKSEQEIGKATAKYFFYSNIMNFFKTEITLANGEIRKRPLIETNGETGEIVWDKGRDFATVRKVLSMPQVNIVKKTEVQTGGFSKESILPKRNSDKLIARKKDWDPKKYGGFDSPTVAYSVLVVAKVEKGKSKKLKSVKELLGITIMERSSFEKNPIDFLEAKGYKEVKKDLIIKLPKYSLFELENGRKRMLASAGELQKGNELALPSKYVNFLYLASHYEKLKGSPEDNEQKQLFVEQHKHYLDEIIEQISEFSKRVILADANLDKVLSAYNKHRDKPIREQAENIIHLFTLTNLGAPAAFKYFDTTIDRKRYTSTKEVLDATLIHQSITGLYETRIDLSQLGGDGGGGGGSGGVLNLEEEYRLHEKPVPSSIDPSWLQLFPTVWAERAGMGLANQVPPVVVELRSGASPVAVRQYPMSKEAREGIRPHIQRFLDLGVLVPCQSPWNTPLLPVKKPGTNDYRPVQDLREINKRVQDIHPTVPNPYNLLSSLPPSHTWYSVLDLKDAFFCLKLHPNSQPLFAFEWRDPEKGNTGQLTWTRLPQGFKNSPTLFNEALHRDLAPFRALNPQVVLLQYVDDLLVAAPTYRDCKEGTQKLLQELSKLGYRVSAKKAQLCQKEVTYLGYLLKEGKRWLTPARKATVMKIPPPTTPRQVREFLGKAGFCRLFIPGFASLAAPLYPLTKPSIPFIWTEEHQKAFDRIKEALLSAPALALPDLTKPFTLYVDERAGVARGVLTQTLGPWRRPVAYLSKKLDPVASGWPTCLKAVAAVALLLKDADKLTLGQNVTVIASHSLESIVRQPPDRWMTNARMTHYQSLLLNERVSFAPPAVLNPATLLPVESEATPVHRCSEILAEETGTRRDLKDQPLPGVPAWYTDGSSFIAEGKRRAGAAIVDGKRTVWASSLPEGTSAQKAELVALTQALRLAEGKDINIYTDSRYAFATAHIHGAIYKQRGWLTSAGKDIKNKEEILALLEAIHLPKRVAIIHCPGHQKGNDPVATGNRRADEAAKQAALSTRVLAETTKPAGKRTADGSEFEKRTADGSEFESPKKKAKVE

SEQ ID NO: 6117 - protein, 2090 aa, synthetic construct
MPAAKRVKLDGGDKKYSIGLDIGTNSVGWAVITDEYKVPSKKFKVLGNTDRHSIKKNLIGALLFDSGETAEATRLKRTARRRYTRRKNRICYLQEIFSNEMAKVDDSFFHRLEESFLVEEDKKHERHPIFGNIVDEVAYHEKYPTIYHLRKKLVDSTDKADLRLIYLALAHMIKFRGHFLIEGDLNPDNSDVDKLFIQLVQTYNQLFEENPINASGVDAKAILSARLSKSRRLENLIAQLPGEKKNGLFGNLIALSLGLTPNFKSNFDLAEDAKLQLSKDTYDDDLDNLLAQIGDQYADLFLAAKNLSDAILLSDILRVNTEITKAPLSASMIKRYDEHHQDLTLLKALVRQQLPEKYKEIFFDQSKNGYAGYIDGGASQEEFYKFIKPILEKMDGTEELLVKLNREDLLRKQRTFDNGSIPHQIHLGELHAILRRQEDFYPFLKDNREKIEKILTFRIPYYVGPLARGNSRFAWMTRKSEETITPWNFEEVVDKGASAQSFIERMTNFDKNLPNEKVLPKHSLLYEYFTVYNELTKVKYVTEGMRKPAFLSGEQKKAIVDLLFKTNRKVTVKQLKEDYFKKIECFDSVEISGVEDRFNASLGTYHDLLKIIKDKDFLDNEENEDILEDIVLTLTLFEDREMIEERLKTYAHLFDDKVMKQLKRRRYTGWGRLSRKLINGIRDKQSGKTILDFLKSDGFANRNFMQLIHDDSLTFKEDIQKAQVSGQGDSLHEHIANLAGSPAIKKGILQTVKVVDELVKVMGRHKPENIVIEMARENQTTQKGQKNSRERMKRIEEGIKELGSQILKEHPVENTQLQNEKLYLYYLQNGRDMYVDQELDINRLSDYDVDHIVPQSFLKDDSIDNKVLTRSDKARGKSDNVPSEEVVKKMKNYWRQLLNAKLITQRKFDNLTKAERGGLSELDKAGFIKRQLVETRQITKHVAQILDSRMNTKYDENDKLIREVKVITLKSKLVSDFRKDFQFYKVREINNYHHAHDAYLNAVVGTALIKKYPKLESEFVYGDYKVYDVRKMIAKSEQEIGKATAKYFFYSNIMNFFKTEITLANGEIRKRPLIETNGETGEIVWDKGRDFATVRKVLSMPQVNIVKKTEVQTGGFSKESILPKRNSDKLIARKKDWDPKKYGGFDSPTVAYSVLVVAKVEKGKSKKLKSVKELLGITIMERSSFEKNPIDFLEAKGYKEVKKDLIIKLPKYSLFELENGRKRMLASAGELQKGNELALPSKYVNFLYLASHYEKLKGSPEDNEQKQLFVEQHKHYLDEIIEQISEFSKRVILADANLDKVLSAYNKHRDKPIREQAENIIHLFTLTNLGAPAAFKYFDTTIDRKRYTSTKEVLDATLIHQSITGLYETRIDLSQLGGDGGGGGGSGGTLNIEDEYRLHETSKEPDVPLGSTWLSDFPQAWAETGGMGLAVRQAPLIIPLKATSTPVSIKQYPMSQEARLGIKPHIQRLLDQGILVPCQSPWNTPLLPVKKPGTNDYRPVQDLREVNKRVEDIHPTVPNPYNLLSGLPPSHQWYTVLDLKDAFFCLRLHPTSQPLFAFEWRDPEMGISGQLTWTRLPQGFKNSPTLFNEALHRDLADFRIQHPDLILLQYVDDLLLAATSEQDCQRGTRALLQTLGNLGYRASAKKAQICQKQVKYLGYLLKEGQRWLTEARKETVMGQPTPKTPRQLREFLGKAGFCRLFIPGFAEMAAPLYPLTKPGTLFNWGPDQQKAYQEIKQALLTAPALGLPDLTKPFELFVDEKQGYAKGVLTQKLGPWRRPVAYLSKKLDPVAAGWPPCLRMVAAIAVLTKDAGKLTMGQPLVILAPHAVEALVKQPPDRWLSNARMTHYQAMLLDTDRVQFGPVVALNPATLLPLPEKEAPHDCLEILAETHGTRPDLTDQPIPDADYTWYTDGSSFLQEGQRRAGAAVTTETEVIWARALPAGTSAQRAELIALTQALKMAEGKKLNVYTDSRYAFATAHVHGEIYRRRGWLTSEGREIKNKNEILALLKALFLPKRLSIIHCPGHQKGNSAEARGNRMADQAAREAAMKAVLETSTLLAGKRTADGSEFEKRTADGSEFESPKKKAKVE

SEQ ID NO: 6118 - protein, 2101 aa, synthetic construct
MPAAKRVKLDGGDKKYSIGLDIGTNSVGWAVITDEYKVPSKKFKVLGNTDRHSIKKNLIGALLFDSGETAEATRLKRTARRRYTRRKNRICYLQEIFSNEMAKVDDSFFHRLEESFLVEEDKKHERHPIFGNIVDEVAYHEKYPTIYHLRKKLVDSTDKADLRLIYLALAHMIKFRGHFLIEGDLNPDNSDVDKLFIQLVQTYNQLFEENPINASGVDAKAILSARLSKSRRLENLIAQLPGEKKNGLFGNLIALSLGLTPNFKSNFDLAEDAKLQLSKDTYDDDLDNLLAQIGDQYADLFLAAKNLSDAILLSDILRVNTEITKAPLSASMIKRYDEHHQDLTLLKALVRQQLPEKYKEIFFDQSKNGYAGYIDGGASQEEFYKFIKPILEKMDGTEELLVKLNREDLLRKQRTFDNGSIPHQIHLGELHAILRRQEDFYPFLKDNREKIEKILTFRIPYYVGPLARGNSRFAWMTRKSEETITPWNFEEVVDKGASAQSFIERMTNFDKNLPNEKVLPKHSLLYEYFTVYNELTKVKYVTEGMRKPAFLSGEQKKAIVDLLFKTNRKVTVKQLKEDYFKKIECFDSVEISGVEDRFNASLGTYHDLLKIIKDKDFLDNEENEDILEDIVLTLTLFEDREMIEERLKTYAHLFDDKVMKQLKRRRYTGWGRLSRKLINGIRDKQSGKTILDFLKSDGFANRNFMQLIHDDSLTFKEDIQKAQVSGQGDSLHEHIANLAGSPAIKKGILQTVKVVDELVKVMGRHKPENIVIEMARENQTTQKGQKNSRERMKRIEEGIKELGSQILKEHPVENTQLQNEKLYLYYLQNGRDMYVDQELDINRLSDYDVDHIVPQSFLKDDSIDNKVLTRSDKARGKSDNVPSEEVVKKMKNYWRQLLNAKLITQRKFDNLTKAERGGLSELDKAGFIKRQLVETRQITKHVAQILDSRMNTKYDENDKLIREVKVITLKSKLVSDFRKDFQFYKVREINNYHHAHDAYLNAVVGTALIKKYPKLESEFVYGDYKVYDVRKMIAKSEQEIGKATAKYFFYSNIMNFFKTEITLANGEIRKRPLIETNGETGEIVWDKGRDFATVRKVLSMPQVNIVKKTEVQTGGFSKESILPKRNSDKLIARKKDWDPKKYGGFDSPTVAYSVLVVAKVEKGKSKKLKSVKELLGITIMERSSFEKNPIDFLEAKGYKEVKKDLIIKLPKYSLFELENGRKRMLASAGELQKGNELALPSKYVNFLYLASHYEKLKGSPEDNEQKQLFVEQHKHYLDEIIEQISEFSKRVILADANLDKVLSAYNKHRDKPIREQAENIIHLFTLTNLGAPAAFKYFDTTIDRKRYTSTKEVLDATLIHQSITGLYETRIDLSQLGGDGGGGGGSGGGGSGGTVSLQDEHRLFDIPVTTSLPDVWLQDFPQAWAETGGLGRAKCQAPIIIDLKPTAVPVSIKQYPMSLEAHMGIRQHIIKFLELGVLRPCRSPWNTPLLPVKKPGTQDYRPVQDLREINKRTVDIHPTVPNPYNLLSTLKPDYSWYTVLDLKDAFFCLPLAPQSQELFAFEWKDPERGISGQLTWTRLPQGFKNSPTLFNEALHRDLTDFRTQHPEVTLLQYVDDLLLAAPTKKACTQGTRHLLQELGEKGYRASAKKAQICQTKVTYLGYILSEGKRWLTPGRIETVARIPPPRNPREVREFLGKAGFCRLFIPGFAELAAPLYALTKPSTPFTWQTEHQLAFEALKKALLSAPALGLPDTSKPFTLFLDERQGIAKGVLTQKLGPWKRPVAYLSKKLDPVAAGWPPCLRIMAATAMLVKDSAKLTLGQPLTVITPHTLEAIVRQPPDRWITNARLTHYQALLLDTDRVQFGPPVTLNPATLLPVPENQPSPHDCRQVLAETHGTREDLKDQELPDADHTWYTDGSSYLDSGTRRAGAAVVDGHNTIWAQSLPPGTSAQKAELIALTKALELSKGKKANIYTDSRYAFATAHTHGSIYERRGWLTSEGKEIKNKAEIIALLKALFLPQEVAIIHCPGHQKGQDPVAVGNRQADRVARQAAMAEVLTLATEPDNTSHITAGKRTADGSEFEKRTADGSEFESPKKKAKVE

SEQ ID NO: 6119 - protein, 2175 aa, synthetic construct
MPAAKRVKLDGGDKKYSIGLDIGTNSVGWAVITDEYKVPSKKFKVLGNTDRHSIKKNLIGALLFDSGETAEATRLKRTARRRYTRRKNRICYLQEIFSNEMAKVDDSFFHRLEESFLVEEDKKHERHPIFGNIVDEVAYHEKYPTIYHLRKKLVDSTDKADLRLIYLALAHMIKFRGHFLIEGDLNPDNSDVDKLFIQLVQTYNQLFEENPINASGVDAKAILSARLSKSRRLENLIAQLPGEKKNGLFGNLIALSLGLTPNFKSNFDLAEDAKLQLSKDTYDDDLDNLLAQIGDQYADLFLAAKNLSDAILLSDILRVNTEITKAPLSASMIKRYDEHHQDLTLLKALVRQQLPEKYKEIFFDQSKNGYAGYIDGGASQEEFYKFIKPILEKMDGTEELLVKLNREDLLRKQRTFDNGSIPHQIHLGELHAILRRQEDFYPFLKDNREKIEKILTFRIPYYVGPLARGNSRFAWMTRKSEETITPWNFEEVVDKGASAQSFIERMTNFDKNLPNEKVLPKHSLLYEYFTVYNELTKVKYVTEGMRKPAFLSGEQKKAIVDLLFKTNRKVTVKQLKEDYFKKIECFDSVEISGVEDRFNASLGTYHDLLKIIKDKDFLDNEENEDILEDIVLTLTLFEDREMIEERLKTYAHLFDDKVMKQLKRRRYTGWGRLSRKLINGIRDKQSGKTILDFLKSDGFANRNFMQLIHDDSLTFKEDIQKAQVSGQGDSLHEHIANLAGSPAIKKGILQTVKVVDELVKVMGRHKPENIVIEMARENQTTQKGQKNSRERMKRIEEGIKELGSQILKEHPVENTQLQNEKLYLYYLQNGRDMYVDQELDINRLSDYDVDHIVPQSFLKDDSIDNKVLTRSDKARGKSDNVPSEEVVKKMKNYWRQLLNAKLITQRKFDNLTKAERGGLSELDKAGFIKRQLVETRQITKHVAQILDSRMNTKYDENDKLIREVKVITLKSKLVSDFRKDFQFYKVREINNYHHAHDAYLNAVVGTALIKKYPKLESEFVYGDYKVYDVRKMIAKSEQEIGKATAKYFFYSNIMNFFKTEITLANGEIRKRPLIETNGETGEIVWDKGRDFATVRKVLSMPQVNIVKKTEVQTGGFSKESILPKRNSDKLIARKKDWDPKKYGGFDSPTVAYSVLVVAKVEKGKSKKLKSVKELLGITIMERSSFEKNPIDFLEAKGYKEVKKDLIIKLPKYSLFELENGRKRMLASAGELQKGNELALPSKYVNFLYLASHYEKLKGSPEDNEQKQLFVEQHKHYLDEIIEQISEFSKRVILADANLDKVLSAYNKHRDKPIREQAENIIHLFTLTNLGAPAAFKYFDTTIDRKRYTSTKEVLDATLIHQSITGLYETRIDLSQLGGDGGGGGGSGGGGSGGMNPLQLLQPLPAEIKGTKLLAHWNSGATITCIPESFLEDEQPIKKTLIKTIHGEKQQNVYYVTFKVKGRKVEAEVIASPYEYILLSPTDVPWLTQQPLQLTILVPLQEYQEKILSKTALPEDQKQQLKTLFVKYDNLWQHWENQVGHRKIRPHNIATGDYPPRPQKQYPINPKAKPSIQIVIDDLLKQGVLTPQNSTMNTPVYPVPKPDGRWRMVLDYREVNKTIPLTAAQNQHSAGILATIVRQKYKTTLDLANGFWAHPITPESYWLTAFTWQGKQYCWTRLPQGFLNSPALFNADVVDLLKEIPNVQVYVDDIYLSHDDPKEHVQQLEKVFQILLQAGYVVSLKKSEIGQKTVEFLGFNITKEGRGLTDTFKTKLLNITPPKDLKQLQSILGKLNFARNFIPNFAELVQPLYNLIAPAKGKYIEWSEENTKQLNMVIEALNTASNLEERLPEQRLVIKVNTSPSAGYVRYYNETGKKPIMYLNYVFSKAELKFSMLEKLLTTMHKALIKAMDLAMGQEILVYSPIVSMTKIQKTPLPERKALPIRWITWMTYLEDPRIQFHYDKTLPELKHIPDVYTSSQSPVKHPSQYEGVFYTDGSAIKSPDPTKSNNAGMGIVHATYKPEYQVLNQWSIPLGNHTAQMAEIAAVEFACKKALKIPGPVLVITDSFYVAESANKELPYWKSNGFVNNKKKPLKHISKWKSIAECLSMKPDITIQHEKGISLQIPVFILKGNALADKLATQGSYVVNAGKRTADGSEFEKRTADGSEFESPKKKAKVE

SEQ ID NO: 6120 - protein, 2217 aa, synthetic construct
MPAAKRVKLDGGDKKYSIGLDIGTNSVGWAVITDEYKVPSKKFKVLGNTDRHSIKKNLIGALLFDSGETAEATRLKRTARRRYTRRKNRICYLQEIFSNEMAKVDDSFFHRLEESFLVEEDKKHERHPIFGNIVDEVAYHEKYPTIYHLRKKLVDSTDKADLRLIYLALAHMIKFRGHFLIEGDLNPDNSDVDKLFIQLVQTYNQLFEENPINASGVDAKAILSARLSKSRRLENLIAQLPGEKKNGLFGNLIALSLGLTPNFKSNFDLAEDAKLQLSKDTYDDDLDNLLAQIGDQYADLFLAAKNLSDAILLSDILRVNTEITKAPLSASMIKRYDEHHQDLTLLKALVRQQLPEKYKEIFFDQSKNGYAGYIDGGASQEEFYKFIKPILEKMDGTEELLVKLNREDLLRKQRTFDNGSIPHQIHLGELHAILRRQEDFYPFLKDNREKIEKILTFRIPYYVGPLARGNSRFAWMTRKSEETITPWNFEEVVDKGASAQSFIERMTNFDKNLPNEKVLPKHSLLYEYFTVYNELTKVKYVTEGMRKPAFLSGEQKKAIVDLLFKTNRKVTVKQLKEDYFKKIECFDSVEISGVEDRFNASLGTYHDLLKIIKDKDFLDNEENEDILEDIVLTLTLFEDREMIEERLKTYAHLFDDKVMKQLKRRRYTGWGRLSRKLINGIRDKQSGKTILDFLKSDGFANRNFMQLIHDDSLTFKEDIQKAQVSGQGDSLHEHIANLAGSPAIKKGILQTVKVVDELVKVMGRHKPENIVIEMARENQTTQKGQKNSRERMKRIEEGIKELGSQILKEHPVENTQLQNEKLYLYYLQNGRDMYVDQELDINRLSDYDVDHIVPQSFLKDDSIDNKVLTRSDKARGKSDNVPSEEVVKKMKNYWRQLLNAKLITQRKFDNLTKAERGGLSELDKAGFIKRQLVETRQITKHVAQILDSRMNTKYDENDKLIREVKVITLKSKLVSDFRKDFQFYKVREINNYHHAHDAYLNAVVGTALIKKYPKLESEFVYGDYKVYDVRKMIAKSEQEIGKATAKYFFYSNIMNFFKTEITLANGEIRKRPLIETNGETGEIVWDKGRDFATVRKVLSMPQVNIVKKTEVQTGGFSKESILPKRNSDKLIARKKDWDPKKYGGFDSPTVAYSVLVVAKVEKGKSKKLKSVKELLGITIMERSSFEKNPIDFLEAKGYKEVKKDLIIKLPKYSLFELENGRKRMLASAGELQKGNELALPSKYVNFLYLASHYEKLKGSPEDNEQKQLFVEQHKHYLDEIIEQISEFSKRVILADANLDKVLSAYNKHRDKPIREQAENIIHLFTLTNLGAPAAFKYFDTTIDRKRYTSTKEVLDATLIHQSITGLYETRIDLSQLGGDGGGGGGSGGGGSGGTLGDQGSRGSDPLPEPRVTLTVEGIPTEFLVNTGAEHSVLTKPMGKMGSKRTVVAGATGSKVYPWTTKRLLKIGQKQVTHSFLVIPECPAPLLGRDLLTKLKAQIQFSTEGPQVTWEDRPAMCLVLNLEEEYRLHEKPVPPSIDPSWLQLFPMVWAEKAGMGLANQVPPVVVELKSDASPVAVRQYPMSKEAREGIRPHIQRFLDLGILVPCQSPWNTPLLPVKKPGTNDYRPVQDLREVNKRVQDIHPTVPNPYNLLSSLPPSHTWYSVLDLKDAFFCLKLHPNSQPLFAFEWRDPEKGNTGQLTWTRLPQGFKNSPTLFDEALHRDLASFRALNPQVVMLQYVDDLLVAAPTYRDCKEGTRRLLQELSKLGYRVSAKKAQLCREEVTYLGYLLKGGKRWLTPARKATVMKIPTPTTPRQVREFLGTAGFCRLWIPGFASLAAPLYPLTREKVPFTWTEAHQEAFGRIKEALLSAPALALPDLTKPFALYVDEKEGVARGVLTQTLGPWRRPVAYLSKKLDPVASGWPTCLKAIAAVALLLKDADKLTLGQNVLVIAPHNLESIVRQPPDRWMTNARMTHYQSLLLNERVSFAPPAILNPATLLPVESDDTPIHICSEILAEETGTRPDLRDQPLPGVPAWYTDGSSFIMDGRRQAGAAIVDNKRTVWASNLPEGTSAQKAELIALTQALRLAEGKSINIYTDSRYAFATAHVHGAIYKQRGLLTSAGKDIKNKEEILALLEAIHLPKRVAIIHCPGHQRGTDPVATGNRKADEAAKQAAQSTRILTETTKNAGKRTADGSEFEKRTADGSEFESPKKKAKVE

SEQ ID NO: 6121 - protein, 2126 aa, synthetic construct
MPAAKRVKLDGGDKKYSIGLDIGTNSVGWAVITDEYKVPSKKFKVLGNTDRHSIKKNLIGALLFDSGETAEATRLKRTARRRYTRRKNRICYLQEIFSNEMAKVDDSFFHRLEESFLVEEDKKHERHPIFGNIVDEVAYHEKYPTIYHLRKKLVDSTDKADLRLIYLALAHMIKFRGHFLIEGDLNPDNSDVDKLFIQLVQTYNQLFEENPINASGVDAKAILSARLSKSRRLENLIAQLPGEKKNGLFGNLIALSLGLTPNFKSNFDLAEDAKLQLSKDTYDDDLDNLLAQIGDQYADLFLAAKNLSDAILLSDILRVNTEITKAPLSASMIKRYDEHHQDLTLLKALVRQQLPEKYKEIFFDQSKNGYAGYIDGGASQEEFYKFIKPILEKMDGTEELLVKLNREDLLRKQRTFDNGSIPHQIHLGELHAILRRQEDFYPFLKDNREKIEKILTFRIPYYVGPLARGNSRFAWMTRKSEETITPWNFEEVVDKGASAQSFIERMTNFDKNLPNEKVLPKHSLLYEYFTVYNELTKVKYVTEGMRKPAFLSGEQKKAIVDLLFKTNRKVTVKQLKEDYFKKIECFDSVEISGVEDRFNASLGTYHDLLKIIKDKDFLDNEENEDILEDIVLTLTLFEDREMIEERLKTYAHLFDDKVMKQLKRRRYTGWGRLSRKLINGIRDKQSGKTILDFLKSDGFANRNFMQLIHDDSLTFKEDIQKAQVSGQGDSLHEHIANLAGSPAIKKGILQTVKVVDELVKVMGRHKPENIVIEMARENQTTQKGQKNSRERMKRIEEGIKELGSQILKEHPVENTQLQNEKLYLYYLQNGRDMYVDQELDINRLSDYDVDHIVPQSFLKDDSIDNKVLTRSDKARGKSDNVPSEEVVKKMKNYWRQLLNAKLITQRKFDNLTKAERGGLSELDKAGFIKRQLVETRQITKHVAQILDSRMNTKYDENDKLIREVKVITLKSKLVSDFRKDFQFYKVREINNYHHAHDAYLNAVVGTALIKKYPKLESEFVYGDYKVYDVRKMIAKSEQEIGKATAKYFFYSNIMNFFKTEITLANGEIRKRPLIETNGETGEIVWDKGRDFATVRKVLSMPQVNIVKKTEVQTGGFSKESILPKRNSDKLIARKKDWDPKKYGGFDSPTVAYSVLVVAKVEKGKSKKLKSVKELLGITIMERSSFEKNPIDFLEAKGYKEVKKDLIIKLPKYSLFELENGRKRMLASAGELQKGNELALPSKYVNFLYLASHYEKLKGSPEDNEQKQLFVEQHKHYLDEIIEQISEFSKRVILADANLDKVLSAYNKHRDKPIREQAENIIHLFTLTNLGAPAAFKYFDTTIDRKRYTSTKEVLDATLIHQSITGLYETRIDLSQLGGDGGGGGGSGGGGSGGLLGRDLLTKLKAQIQFSTEGPQVTWEDRPAMCLVLNLEEEYRLHEKPVPPSIDPSWLQLFPMVWAEKAGMGLANQVPPVVVELKSDASPVAVRQYPMSKEAREGIRPHIQRFLDLGILVPCQSPWNTPLLPVKKPGTNDYRPVQDLREVNKRVQDIHPTVPNPYNLLSSLPPSHTWYSVLDLKDAFFCLKLHPNSQPLFAFEWRDPEKGNTGQLTWTRLPQGFKNSPTLFNEALHRDLASFRALNPQVVMLQYVDDLLVAAPTYRDCKEGTRRLLQELSKLGYRVSAKKAQLCREEVTYLGYLLKGGKRWLTPARKATVMKIPTPTTPRQVREFLGTAGFCRLWIPGFASLAAPLYPLTRPKVPFTWTEAHQEAFGRIKEALLSAPALALPDLTKPFALYVDEKEGVARGVLTQTLGPWRRPVAYLSKKLDPVASGWPTCLKAIAAVALLLKDADKLTLGQNVLVIAPHNLESIVRQPPDRWMTNARMTHYQSLLLNERVSFAPPAILNPATLLPVESDDTPIHICSEILAEETGTRPDLRDQPLPGVPAWYTDGSSFIMDGRRQAGAAIVDNKRTVWASNLPEGTSAQKAELIALTQALRLAEGKSINIYTDSRYAFATAHVHGAIYKQRGWLTSAGKDIKNKEEILALLEAIHLPKRVAIIHCPGHQRGTDPVATGNRKADEAAKQAAQSTRILTETTKNAGKRTADGSEFEKRTADGSEFESPKKKAKVE

SEQ ID NO: 6122 - protein, 2217 aa, synthetic construct
MPAAKRVKLDGGDKKYSIGLDIGTNSVGWAVITDEYKVPSKKFKVLGNTDRHSIKKNLIGALLFDSGETAEATRLKRTARRRYTRRKNRICYLQEIFSNEMAKVDDSFFHRLEESFLVEEDKKHERHPIFGNIVDEVAYHEKYPTIYHLRKKLVDSTDKADLRLIYLALAHMIKFRGHFLIEGDLNPDNSDVDKLFIQLVQTYNQLFEENPINASGVDAKAILSARLSKSRRLENLIAQLPGEKKNGLFGNLIALSLGLTPNFKSNFDLAEDAKLQLSKDTYDDDLDNLLAQIGDQYADLFLAAKNLSDAILLSDILRVNTEITKAPLSASMIKRYDEHHQDLTLLKALVRQQLPEKYKEIFFDQSKNGYAGYIDGGASQEEFYKFIKPILEKMDGTEELLVKLNREDLLRKQRTFDNGSIPHQIHLGELHAILRRQEDFYPFLKDNREKIEKILTFRIPYYVGPLARGNSRFAWMTRKSEETITPWNFEEVVDKGASAQSFIERMTNFDKNLPNEKVLPKHSLLYEYFTVYNELTKVKYVTEGMRKPAFLSGEQKKAIVDLLFKTNRKVTVKQLKEDYFKKIECFDSVEISGVEDRFNASLGTYHDLLKIIKDKDFLDNEENEDILEDIVLTLTLFEDREMIEERLKTYAHLFDDKVMKQLKRRRYTGWGRLSRKLINGIRDKQSGKTILDFLKSDGFANRNFMQLIHDDSLTFKEDIQKAQVSGQGDSLHEHIANLAGSPAIKKGILQTVKVVDELVKVMGRHKPENIVIEMARENQTTQKGQKNSRERMKRIEEGIKELGSQILKEHPVENTQLQNEKLYLYYLQNGRDMYVDQELDINRLSDYDVDHIVPQSFLKDDSIDNKVLTRSDKARGKSDNVPSEEVVKKMKNYWRQLLNAKLITQRKFDNLTKAERGGLSELDKAGFIKRQLVETRQITKHVAQILDSRMNTKYDENDKLIREVKVITLKSKLVSDFRKDFQFYKVREINNYHHAHDAYLNAVVGTALIKKYPKLESEFVYGDYKVYDVRKMIAKSEQEIGKATAKYFFYSNIMNFFKTEITLANGEIRKRPLIETNGETGEIVWDKGRDFATVRKVLSMPQVNIVKKTEVQTGGFSKESILPKRNSDKLIARKKDWDPKKYGGFDSPTVAYSVLVVAKVEKGKSKKLKSVKELLGITIMERSSFEKNPIDFLEAKGYKEVKKDLIIKLPKYSLFELENGRKRMLASAGELQKGNELALPSKYVNFLYLASHYEKLKGSPEDNEQKQLFVEQHKHYLDEIIEQISEFSKRVILADANLDKVLSAYNKHRDKPIREQAENIIHLFTLTNLGAPAAFKYFDTTIDRKRYTSTKEVLDATLIHQSITGLYETRIDLSQLGGDGGGGGGSGGGGSGGTLGDQGSRGSDPLPEPRVTLTVEGIPTEFLVNTGAEHSVLTKPMGKMGSKRTVVAGATGSKVYPWTTKRLLKIGQKQVTHSFLVIPECPAPLLGRDLLTKLKAQIQFSTEGPQVTWEDRPAMCLVLNLEEEYRLHEKPVPPSIDPSWLQLFPMVWAEKAGMGLANQVPPVVVELKSDASPVAVRQYPMSKEAREGIRPHIQRFLDLGILVPCQSPWNTPLLPVKKPGTNDYRPVQDLREVNKRVQDIHPTVPNPYNLLSSLPPSHTWYSVLDLKDAFFCLKLHPNSQPLFAFEWRDPEKGNTGQLTWTRLPQGFKNSPTLFNEALHRDLASFRALNPQVVMLQYVDDLLVAAPTYRDCKEGTRRLLQELSKLGYRVSAKKAQLCREEVTYLGYLLKGGKRWLTPARKATVMKIPTPTTPRQVREFLGTAGFCRLWIPGFASLAAPLYPLTRPKVPFTWTEAHQEAFGRIKEALLSAPALALPDLTKPFALYVDEKEGVARGVLTQTLGPWRRPVAYLSKKLDPVASGWPTCLKAIAAVALLLKDADKLTLGQNVLVIAPHNLESIVRQPPDRWMTNARMTHYQSLLLNERVSFAPPAILNPATLLPVESDDTPIHICSEILAEETGTRPDLRDQPLPGVPAWYTDGSSFIMDGRRQAGAAIVDNKRTVWASNLPEGTSAQKAELIALTQALRLAEGKSINIYTDSRYAFATAHVHGAIYKQRGWLTSAGKDIKNKEEILALLEAIHLPKRVAIIHCPGHQRGTDPVATGNRKADEAAKQAAQSTRILTETTKNAGKRTADGSEFEKRTADGSEFESPKKKAKVE

SEQ ID NO: 6123 - protein, 2217 aa, synthetic construct
MPAAKRVKLDGGDKKYSIGLDIGTNSVGWAVITDEYKVPSKKFKVLGNTDRHSIKKNLIGALLFDSGETAEATRLKRTARRRYTRRKNRICYLQEIFSNEMAKVDDSFFHRLEESFLVEEDKKHERHPIFGNIVDEVAYHEKYPTIYHLRKKLVDSTDKADLRLIYLALAHMIKFRGHFLIEGDLNPDNSDVDKLFIQLVQTYNQLFEENPINASGVDAKAILSARLSKSRRLENLIAQLPGEKKNGLFGNLIALSLGLTPNFKSNFDLAEDAKLQLSKDTYDDDLDNLLAQIGDQYADLFLAAKNLSDAILLSDILRVNTEITKAPLSASMIKRYDEHHQDLTLLKALVRQQLPEKYKEIFFDQSKNGYAGYIDGGASQEEFYKFIKPILEKMDGTEELLVKLNREDLLRKQRTFDNGSIPHQIHLGELHAILRRQEDFYPFLKDNREKIEKILTFRIPYYVGPLARGNSRFAWMTRKSEETITPWNFEEVVDKGASAQSFIERMTNFDKNLPNEKVLPKHSLLYEYFTVYNELTKVKYVTEGMRKPAFLSGEQKKAIVDLLFKTNRKVTVKQLKEDYFKKIECFDSVEISGVEDRFNASLGTYHDLLKIIKDKDFLDNEENEDILEDIVLTLTLFEDREMIEERLKTYAHLFDDKVMKQLKRRRYTGWGRLSRKLINGIRDKQSGKTILDFLKSDGFANRNFMQLIHDDSLTFKEDIQKAQVSGQGDSLHEHIANLAGSPAIKKGILQTVKVVDELVKVMGRHKPENIVIEMARENQTTQKGQKNSRERMKRIEEGIKELGSQILKEHPVENTQLQNEKLYLYYLQNGRDMYVDQELDINRLSDYDVDHIVPQSFLKDDSIDNKVLTRSDKARGKSDNVPSEEVVKKMKNYWRQLLNAKLITQRKFDNLTKAERGGLSELDKAGFIKRQLVETRQITKHVAQILDSRMNTKYDENDKLIREVKVITLKSKLVSDFRKDFQFYKVREINNYHHAHDAYLNAVVGTALIKKYPKLESEFVYGDYKVYDVRKMIAKSEQEIGKATAKYFFYSNIMNFFKTEITLANGEIRKRPLIETNGETGEIVWDKGRDFATVRKVLSMPQVNIVKKTEVQTGGFSKESILPKRNSDKLIARKKDWDPKKYGGFDSPTVAYSVLVVAKVEKGKSKKLKSVKELLGITIMERSSFEKNPIDFLEAKGYKEVKKDLIIKLPKYSLFELENGRKRMLASAGELQKGNELALPSKYVNFLYLASHYEKLKGSPEDNEQKQLFVEQHKHYLDEIIEQISEFSKRVILADANLDKVLSAYNKHRDKPIREQAENIIHLFTLTNLGAPAAFKYFDTTIDRKRYTSTKEVLDATLIHQSITGLYETRIDLSQLGGDGGGGGGSGGGGSGGTLGDQGSRGSDPLPEPRVTLTVEGIPTEFLVNTGAEHSVLTKPMGKMGSKRTVVAGATGSKVYPWTTKRLLKIGQKQVTHSFLVIPECPAPLLGRDLLTKLKAQIQFSTEGPQVTWEDRPAMCLVLNLEEEYRLHEKPVPPSIDPSWLQLFPMVWAEKAGMGLANQVPPVVVELKSDASPVAVRQYPMSKEAREGIRPHIQRFLDLGILVPCQSPWNTPLLPVKKPGTNDYRPVQDLREVNKRVQDIHPTVPNPYNLLSSLPPSHTWYSVLDLKDAFFCLKLHPNSQPLFAFEWRDPEKGNTGQLTWTRLPQGFKNSPTLFNEALHRDLASFRALNPQVVMLQYVDDLLVAAPTYRDCKEGTRRLLQELSKLGYRVSAKKAQLCREEVTYLGYLLKGGKRWLTPARKATVMKIPTPTTPRQVREFLGKAGFCRLFIPGFASLAAPLYPLTRPKVPFTWTEAHQEAFGRIKEALLSAPALALPDLTKPFALYVDEKEGVARGVLTQTLGPWRRPVAYLSKKLDPVASGWPTCLKAIAAVALLLKDADKLTLGQNVLVIAPHNLESIVRQPPDRWMTNARMTHYQSLLLNERVSFAPPAILNPATLLPVESDDTPIHICSEILAEETGTRPDLRDQPLPGVPAWYTDGSSFIMDGRRQAGAAIVDNKRTVWASNLPEGTSAQKAELIALTQALRLAEGKSINIYTDSRYAFATAHVHGAIYKQRGWLTSAGKDIKNKEEILALLEAIHLPKRVAIIHCPGHQRGTDPVATGNRKADEAAKQAAQSTRILTETTKNAGKRTADGSEFEKRTADGSEFESPKKKAKVE

SEQ ID NO: 6124 - protein, 2095 aa, synthetic construct
MPAAKRVKLDGGDKKYSIGLDIGTNSVGWAVITDEYKVPSKKFKVLGNTDRHSIKKNLIGALLFDSGETAEATRLKRTARRRYTRRKNRICYLQEIFSNEMAKVDDSFFHRLEESFLVEEDKKHERHPIFGNIVDEVAYHEKYPTIYHLRKKLVDSTDKADLRLIYLALAHMIKFRGHFLIEGDLNPDNSDVDKLFIQLVQTYNQLFEENPINASGVDAKAILSARLSKSRRLENLIAQLPGEKKNGLFGNLIALSLGLTPNFKSNFDLAEDAKLQLSKDTYDDDLDNLLAQIGDQYADLFLAAKNLSDAILLSDILRVNTEITKAPLSASMIKRYDEHHQDLTLLKALVRQQLPEKYKEIFFDQSKNGYAGYIDGGASQEEFYKFIKPILEKMDGTEELLVKLNREDLLRKQRTFDNGSIPHQIHLGELHAILRRQEDFYPFLKDNREKIEKILTFRIPYYVGPLARGNSRFAWMTRKSEETITPWNFEEVVDKGASAQSFIERMTNFDKNLPNEKVLPKHSLLYEYFTVYNELTKVKYVTEGMRKPAFLSGEQKKAIVDLLFKTNRKVTVKQLKEDYFKKIECFDSVEISGVEDRFNASLGTYHDLLKIIKDKDFLDNEENEDILEDIVLTLTLFEDREMIEERLKTYAHLFDDKVMKQLKRRRYTGWGRLSRKLINGIRDKQSGKTILDFLKSDGFANRNFMQLIHDDSLTFKEDIQKAQVSGQGDSLHEHIANLAGSPAIKKGILQTVKVVDELVKVMGRHKPENIVIEMARENQTTQKGQKNSRERMKRIEEGIKELGSQILKEHPVENTQLQNEKLYLYYLQNGRDMYVDQELDINRLSDYDVDHIVPQSFLKDDSIDNKVLTRSDKARGKSDNVPSEEVVKKMKNYWRQLLNAKLITQRKFDNLTKAERGGLSELDKAGFIKRQLVETRQITKHVAQILDSRMNTKYDENDKLIREVKVITLKSKLVSDFRKDFQFYKVREINNYHHAHDAYLNAVVGTALIKKYPKLESEFVYGDYKVYDVRKMIAKSEQEIGKATAKYFFYSNIMNFFKTEITLANGEIRKRPLIETNGETGEIVWDKGRDFATVRKVLSMPQVNIVKKTEVQTGGFSKESILPKRNSDKLIARKKDWDPKKYGGFDSPTVAYSVLVVAKVEKGKSKKLKSVKELLGITIMERSSFEKNPIDFLEAKGYKEVKKDLIIKLPKYSLFELENGRKRMLASAGELQKGNELALPSKYVNFLYLASHYEKLKGSPEDNEQKQLFVEQHKHYLDEIIEQISEFSKRVILADANLDKVLSAYNKHRDKPIREQAENIIHLFTLTNLGAPAAFKYFDTTIDRKRYTSTKEVLDATLIHQSITGLYETRIDLSQLGGDGGGGGGSGGGGSGGTLNLEDEYRLYETSAEPEVSPGSTWLSDFPQAWAETGGMGLAVRQAPLIIPLKATSTPVSIKQYPMSQEAKLGIKPHIQRLLDQGILVPCQSPWNTPLLPVKKPGTNDYRPVQDLREVNKRVEDIHPTVPNPYNLLSGLPPSHRWYTVLDLKDAFFCLRLHPTSQPLFAFEWRDPGMGISGQLTWTRLPQGFKNSPTLFNEALHRDLADFRIQHPDLILLQYVDDILLAATSELDCQQGTRALLLTLGNLGYRASAKKAQLCQKQVKYLGYLLKEGQRWLTEARKETVMGQPTPKTPRQLREFLGTAGFCRLWIPGFAEMAAPLYPLTKPGTLFNWGPDQQKAYQEIKQALLTAPALGLPDLTKPFELFVDEKQGYAKGVLTQKLGPWRRPVAYLSKKLDPVAAGWPPCLRMVAAIAVLRKDAGKLTMGQPLVILAPHAVEALVKQPPDRWLSNARMTHYQAMLLDTDRVQFGPVVALNPATLLPLPEEGAPHDCLEILAETHGTRPDLTDQPIPDADHTWYTDGSSFLQEGQRKAGAAVTTETEVIWARALPAGTSAQRAELIALTQALKMAEGKRLNVYTDSRYAFATAHIHGEIYRRRGWLTSEGREIKNKSEILALLKALFLPKRLSIIHCLGHQKGDSAEARGNRLADQAAREAAIKTPPDTSTLLAGKRTADGSEFEKRTADGSEFESPKKKAKVE

SEQ ID NO: 6125 - protein, 2095 aa, synthetic construct
MPAAKRVKLDGGDKKYSIGLDIGTNSVGWAVITDEYKVPSKKFKVLGNTDRHSIKKNLIGALLFDSGETAEATRLKRTARRRYTRRKNRICYLQEIFSNEMAKVDDSFFHRLEESFLVEEDKKHERHPIFGNIVDEVAYHEKYPTIYHLRKKLVDSTDKADLRLIYLALAHMIKFRGHFLIEGDLNPDNSDVDKLFIQLVQTYNQLFEENPINASGVDAKAILSARLSKSRRLENLIAQLPGEKKNGLFGNLIALSLGLTPNFKSNFDLAEDAKLQLSKDTYDDDLDNLLAQIGDQYADLFLAAKNLSDAILLSDILRVNTEITKAPLSASMIKRYDEHHQDLTLLKALVRQQLPEKYKEIFFDQSKNGYAGYIDGGASQEEFYKFIKPILEKMDGTEELLVKLNREDLLRKQRTFDNGSIPHQIHLGELHAILRRQEDFYPFLKDNREKIEKILTFRIPYYVGPLARGNSRFAWMTRKSEETITPWNFEEVVDKGASAQSFIERMTNFDKNLPNEKVLPKHSLLYEYFTVYNELTKVKYVTEGMRKPAFLSGEQKKAIVDLLFKTNRKVTVKQLKEDYFKKIECFDSVEISGVEDRFNASLGTYHDLLKIIKDKDFLDNEENEDILEDIVLTLTLFEDREMIEERLKTYAHLFDDKVMKQLKRRRYTGWGRLSRKLINGIRDKQSGKTILDFLKSDGFANRNFMQLIHDDSLTFKEDIQKAQVSGQGDSLHEHIANLAGSPAIKKGILQTVKVVDELVKVMGRHKPENIVIEMARENQTTQKGQKNSRERMKRIEEGIKELGSQILKEHPVENTQLQNEKLYLYYLQNGRDMYVDQELDINRLSDYDVDHIVPQSFLKDDSIDNKVLTRSDKARGKSDNVPSEEVVKKMKNYWRQLLNAKLITQRKFDNLTKAERGGLSELDKAGFIKRQLVETRQITKHVAQILDSRMNTKYDENDKLIREVKVITLKSKLVSDFRKDFQFYKVREINNYHHAHDAYLNAVVGTALIKKYPKLESEFVYGDYKVYDVRKMIAKSEQEIGKATAKYFFYSNIMNFFKTEITLANGEIRKRPLIETNGETGEIVWDKGRDFATVRKVLSMPQVNIVKKTEVQTGGFSKESILPKRNSDKLIARKKDWDPKKYGGFDSPTVAYSVLVVAKVEKGKSKKLKSVKELLGITIMERSSFEKNPIDFLEAKGYKEVKKDLIIKLPKYSLFELENGRKRMLASAGELQKGNELALPSKYVNFLYLASHYEKLKGSPEDNEQKQLFVEQHKHYLDEIIEQISEFSKRVILADANLDKVLSAYNKHRDKPIREQAENIIHLFTLTNLGAPAAFKYFDTTIDRKRYTSTKEVLDATLIHQSITGLYETRIDLSQLGGDGGGGGGSGGGGSGGTLNLEDEYRLYETSAEPEVSPGSTWLSDFPQAWAETGGMGLAVRQAPLIIPLKATSTPVSIKQYPMSQEAKLGIKPHIQRLLDQGILVPCQSPWNTPLLPVKKPGTNDYRPVQDLREVNKRVEDIHPTVPNPYNLLSGLPPSHRWYTVLDLKDAFFCLRLHPTSQPLFAFEWRDPGMGISGQLTWTRLPQGFKNSPTLFNEALHRDLADFRIQHPDLILLQYVDDILLAATSELDCQQGTRALLLTLGNLGYRASAKKAQLCQKQVKYLGYLLKEGQRWLTEARKETVMGQPTPKTPRQLREFLGKAGFCRLFIPGFAEMAAPLYPLTKPGTLFNWGPDQQKAYQEIKQALLTAPALGLPDLTKPFELFVDEKQGYAKGVLTQKLGPWRRPVAYLSKKLDPVAAGWPPCLRMVAAIAVLRKDAGKLTMGQPLVILAPHAVEALVKQPPDRWLSNARMTHYQAMLLDTDRVQFGPVVALNPATLLPLPEEGAPHDCLEILAETHGTRPDLTDQPIPDADHTWYTDGSSFLQEGQRKAGAAVTTETEVIWARALPAGTSAQRAELIALTQALKMAEGKRLNVYTDSRYAFATAHIHGEIYRRRGWLTSEGREIKNKSEILALLKALFLPKRLSIIHCLGHQKGDSAEARGNRLADQAAREAAIKTPPDTSTLLAGKRTADGSEFEKRTADGSEFESPKKKAKVE

SEQ ID NO: 6126 - protein, 2095 aa, synthetic construct
MPAAKRVKLDGGDKKYSIGLDIGTNSVGWAVITDEYKVPSKKFKVLGNTDRHSIKKNLIGALLFDSGETAEATRLKRTARRRYTRRKNRICYLQEIFSNEMAKVDDSFFHRLEESFLVEEDKKHERHPIFGNIVDEVAYHEKYPTIYHLRKKLVDSTDKADLRLIYLALAHMIKFRGHFLIEGDLNPDNSDVDKLFIQLVQTYNQLFEENPINASGVDAKAILSARLSKSRRLENLIAQLPGEKKNGLFGNLIALSLGLTPNFKSNFDLAEDAKLQLSKDTYDDDLDNLLAQIGDQYADLFLAAKNLSDAILLSDILRVNTEITKAPLSASMIKRYDEHHQDLTLLKALVRQQLPEKYKEIFFDQSKNGYAGYIDGGASQEEFYKFIKPILEKMDGTEELLVKLNREDLLRKQRTFDNGSIPHQIHLGELHAILRRQEDFYPFLKDNREKIEKILTFRIPYYVGPLARGNSRFAWMTRKSEETITPWNFEEVVDKGASAQSFIERMTNFDKNLPNEKVLPKHSLLYEYFTVYNELTKVKYVTEGMRKPAFLSGEQKKAIVDLLFKTNRKVTVKQLKEDYFKKIECFDSVEISGVEDRFNASLGTYHDLLKIIKDKDFLDNEENEDILEDIVLTLTLFEDREMIEERLKTYAHLFDDKVMKQLKRRRYTGWGRLSRKLINGIRDKQSGKTILDFLKSDGFANRNFMQLIHDDSLTFKEDIQKAQVSGQGDSLHEHIANLAGSPAIKKGILQTVKVVDELVKVMGRHKPENIVIEMARENQTTQKGQKNSRERMKRIEEGIKELGSQILKEHPVENTQLQNEKLYLYYLQNGRDMYVDQELDINRLSDYDVDHIVPQSFLKDDSIDNKVLTRSDKARGKSDNVPSEEVVKKMKNYWRQLLNAKLITQRKFDNLTKAERGGLSELDKAGFIKRQLVETRQITKHVAQILDSRMNTKYDENDKLIREVKVITLKSKLVSDFRKDFQFYKVREINNYHHAHDAYLNAVVGTALIKKYPKLESEFVYGDYKVYDVRKMIAKSEQEIGKATAKYFFYSNIMNFFKTEITLANGEIRKRPLIETNGETGEIVWDKGRDFATVRKVLSMPQVNIVKKTEVQTGGFSKESILPKRNSDKLIARKKDWDPKKYGGFDSPTVAYSVLVVAKVEKGKSKKLKSVKELLGITIMERSSFEKNPIDFLEAKGYKEVKKDLIIKLPKYSLFELENGRKRMLASAGELQKGNELALPSKYVNFLYLASHYEKLKGSPEDNEQKQLFVEQHKHYLDEIIEQISEFSKRVILADANLDKVLSAYNKHRDKPIREQAENIIHLFTLTNLGAPAAFKYFDTTIDRKRYTSTKEVLDATLIHQSITGLYETRIDLSQLGGDGGGGGGSGGGGSGGTLGIEDEYRLHETSTEPDVSLGSTWLSDFPQAWAETGGMGLAVRQAPLIIPLKATSTPVSIQQYPMSHEARLGIKPHIQRLLDQGILVPCQSPWNTPLLPVKKPGTNDYRPVQDLREVNKRVEDIHPTVPNPYNLLSGLPPSHQWYTVLDLKDAFFCLRLHPTSQPLFAFEWRDPGMGISGQLTWTRLPQGFKNSPTLFNEALHRDLADFRIQHPDLILLQYVDDILLAATSELDCQQGTRALLQTLGDLGYRASAKKAQICQKQVKYLGYLLREGQRWLTEARKETVMGQPVPKTPRQLREFLGTAGFCRLWIPGFAEMAAPLYPLTKPGTLFSWGPDQQKAYQEIKQALLTAPALGLPDLTKPFELFVDEKQGYAKGVLTQKLGPWRRPVAYLSKKLDPVAAGWPPCLRMVAAIAVLTKDAGKLTMGQPLVILAPHAVEALVKQPPDRWLSNARMTHYQAMLLDTDRVQFGPVVALNPATLLPLPEEGAPHDCLEILAETHGTRPDLTDQPIPDADHTWYTDGSSFLQEGQRKAGAAVTTETEVIWAGALPAGTSAQRAELIALTQALKMAEGKRLNVYTDSRYAFATAHIHGEIYRRRGWLTSEGREIKNKSEILALLKALFLPKRLSIIHCLGHQKGDSAEARGNRLADQAAREAAIKTPPDTSTLLAGKRTADGSEFEKRTADGSEFESPKKKAKVE

SEQ ID NO: 6127 - protein, 2095 aa, synthetic construct
MPAAKRVKLDGGDKKYSIGLDIGTNSVGWAVITDEYKVPSKKFKVLGNTDRHSIKKNLIGALLFDSGETAEATRLKRTARRRYTRRKNRICYLQEIFSNEMAKVDDSFFHRLEESFLVEEDKKHERHPIFGNIVDEVAYHEKYPTIYHLRKKLVDSTDKADLRLIYLALAHMIKFRGHFLIEGDLNPDNSDVDKLFIQLVQTYNQLFEENPINASGVDAKAILSARLSKSRRLENLIAQLPGEKKNGLFGNLIALSLGLTPNFKSNFDLAEDAKLQLSKDTYDDDLDNLLAQIGDQYADLFLAAKNLSDAILLSDILRVNTEITKAPLSASMIKRYDEHHQDLTLLKALVRQQLPEKYKEIFFDQSKNGYAGYIDGGASQEEFYKFIKPILEKMDGTEELLVKLNREDLLRKQRTFDNGSIPHQIHLGELHAILRRQEDFYPFLKDNREKIEKILTFRIPYYVGPLARGNSRFAWMTRKSEETITPWNFEEVVDKGASAQSFIERMTNFDKNLPNEKVLPKHSLLYEYFTVYNELTKVKYVTEGMRKPAFLSGEQKKAIVDLLFKTNRKVTVKQLKEDYFKKIECFDSVEISGVEDRFNASLGTYHDLLKIIKDKDFLDNEENEDILEDIVLTLTLFEDREMIEERLKTYAHLFDDKVMKQLKRRRYTGWGRLSRKLINGIRDKQSGKTILDFLKSDGFANRNFMQLIHDDSLTFKEDIQKAQVSGQGDSLHEHIANLAGSPAIKKGILQTVKVVDELVKVMGRHKPENIVIEMARENQTTQKGQKNSRERMKRIEEGIKELGSQILKEHPVENTQLQNEKLYLYYLQNGRDMYVDQELDINRLSDYDVDHIVPQSFLKDDSIDNKVLTRSDKARGKSDNVPSEEVVKKMKNYWRQLLNAKLITQRKFDNLTKAERGGLSELDKAGFIKRQLVETRQITKHVAQILDSRMNTKYDENDKLIREVKVITLKSKLVSDFRKDFQFYKVREINNYHHAHDAYLNAVVGTALIKKYPKLESEFVYGDYKVYDVRKMIAKSEQEIGKATAKYFFYSNIMNFFKTEITLANGEIRKRPLIETNGETGEIVWDKGRDFATVRKVLSMPQVNIVKKTEVQTGGFSKESILPKRNSDKLIARKKDWDPKKYGGFDSPTVAYSVLVVAKVEKGKSKKLKSVKELLGITIMERSSFEKNPIDFLEAKGYKEVKKDLIIKLPKYSLFELENGRKRMLASAGELQKGNELALPSKYVNFLYLASHYEKLKGSPEDNEQKQLFVEQHKHYLDEIIEQISEFSKRVILADANLDKVLSAYNKHRDKPIREQAENIIHLFTLTNLGAPAAFKYFDTTIDRKRYTSTKEVLDATLIHQSITGLYETRIDLSQLGGDGGGGGGSGGGGSGGTLNIEDEYRLHETSKGPDVPLGSTWLSDFPQAWAETGGMGLAFRQAPLIISLKATSTPVSIKQYPMSQEARLGIKPHIQRLLDQGILVPCQSPWNTPLLPVKKPGTNDYRPVQDLREVNKRVEDIHPTVPNPYNLLSGLPPSHQWYTVLDLKDAFFCLRLHPTSQSLFAFEWKDPEMGISGQLTWTRLPQGFKNSPTLFNEALHRDLADFRIQHPDLILLQYVDDLLLAATSELDCQQGTRALLQTLGDLGYRASAKKAQICQKQVKYLGYLLKEGQRWLTEARKETVMGQPTPKTPRQLREFLGTAGLCRLWIPGFAEMAAPLYPLTKPGTLFKWGPDQQKAYQEIKQALLTAPALGLPDLTKPFELFVDEKQGYAKGVLTQKLGPWRRPVAYLSKKLDPVAAGWPPCLRMVAAIAVLTKDVGKLTMGQPLVILAPHAVEALVKQPPDRWLSNARMTHYQALLLDTDRVQFGPIVALNPATLLPLPEEGLQHDCLDILAEAHGTRPDLTDQPLPDADHTWYTDGSSFLQEGQRRAGAAVTTETEVIWAKALPAGTSAQRAELIALTQALKMAAGKKLNVYTDSRYAFATAHIHGEIYRRRGWLTSEGKEIKNKDEILALLKALFLPKRLSIIHCPGHQKGNHAEARGNRMADQAAREVATRETPETSTLLAGKRTADGSEFEKRTADGSEFESPKKKAKVE

SEQ ID NO: 6128 - protein, 2086 aa, synthetic construct
MPAAKRVKLDGGDKKYSIGLDIGTNSVGWAVITDEYKVPSKKFKVLGNTDRHSIKKNLIGALLFDSGETAEATRLKRTARRRYTRRKNRICYLQEIFSNEMAKVDDSFFHRLEESFLVEEDKKHERHPIFGNIVDEVAYHEKYPTIYHLRKKLVDSTDKADLRLIYLALAHMIKFRGHFLIEGDLNPDNSDVDKLFIQLVQTYNQLFEENPINASGVDAKAILSARLSKSRRLENLIAQLPGEKKNGLFGNLIALSLGLTPNFKSNFDLAEDAKLQLSKDTYDDDLDNLLAQIGDQYADLFLAAKNLSDAILLSDILRVNTEITKAPLSASMIKRYDEHHQDLTLLKALVRQQLPEKYKEIFFDQSKNGYAGYIDGGASQEEFYKFIKPILEKMDGTEELLVKLNREDLLRKQRTFDNGSIPHQIHLGELHAILRRQEDFYPFLKDNREKIEKILTFRIPYYVGPLARGNSRFAWMTRKSEETITPWNFEEVVDKGASAQSFIERMTNFDKNLPNEKVLPKHSLLYEYFTVYNELTKVKYVTEGMRKPAFLSGEQKKAIVDLLFKTNRKVTVKQLKEDYFKKIECFDSVEISGVEDRFNASLGTYHDLLKIIKDKDFLDNEENEDILEDIVLTLTLFEDREMIEERLKTYAHLFDDKVMKQLKRRRYTGWGRLSRKLINGIRDKQSGKTILDFLKSDGFANRNFMQLIHDDSLTFKEDIQKAQVSGQGDSLHEHIANLAGSPAIKKGILQTVKVVDELVKVMGRHKPENIVIEMARENQTTQKGQKNSRERMKRIEEGIKELGSQILKEHPVENTQLQNEKLYLYYLQNGRDMYVDQELDINRLSDYDVDHIVPQSFLKDDSIDNKVLTRSDKARGKSDNVPSEEVVKKMKNYWRQLLNAKLITQRKFDNLTKAERGGLSELDKAGFIKRQLVETRQITKHVAQILDSRMNTKYDENDKLIREVKVITLKSKLVSDFRKDFQFYKVREINNYHHAHDAYLNAVVGTALIKKYPKLESEFVYGDYKVYDVRKMIAKSEQEIGKATAKYFFYSNIMNFFKTEITLANGEIRKRPLIETNGETGEIVWDKGRDFATVRKVLSMPQVNIVKKTEVQTGGFSKESILPKRNSDKLIARKKDWDPKKYGGFDSPTVAYSVLVVAKVEKGKSKKLKSVKELLGITIMERSSFEKNPIDFLEAKGYKEVKKDLIIKLPKYSLFELENGRKRMLASAGELQKGNELALPSKYVNFLYLASHYEKLKGSPEDNEQKQLFVEQHKHYLDEIIEQISEFSKRVILADANLDKVLSAYNKHRDKPIREQAENIIHLFTLTNLGAPAAFKYFDTTIDRKRYTSTKEVLDATLIHQSITGLYETRIDLSQLGGDGGGGGGSGGGGSGGVPWLMKKPLQLTVLVPLHEYQERLLQQTALPKEQKELLQKLFLKYDALWQHWENQVGHRRIKPHNIATGTLAPRPQKQYPINPKAKPSIQIVIDDLLKQGVLIQQNSTMNTPVYPVPKPDGKWRMVLDYREVNKTIPLIAAQNQHSAGILSSIYRGKYKTTLDLTNGFWAHPITPESYWLTAFTWQGKQYCWTRLPQGFLNSPALFTADVVDLLKEIPNVQAYVDDIYISHDDPQEHLEQLEKIFSILLNAGYVVSLKKSEIAQREVEFLGFNITKEGRGLTDTFKQKLLNITPPKDLKQLQSILGLLNFARNFIPNYSELVKPLYTIVANANGKFISWTEDNSNQLQHIISVLNQADNLEERNPETRLIIKVNSSPSAGYIRYYNEGSKRPIMYVNYIFSKAEAKFTQTEKLLTTMHKGLIKAMDLAMGQEILVYSPIVSMTKIQRTPLPERKALPVRWITWMTYLEDPRIQFHYDKSLPELQQIPNVTEDVIAKTKHPSEFAMVFYTDGSAIKHPDVNKSHSAGMGIAQVQFIPEYKIVHQWSIPLGDHTAQLAEIAAVEFACKKALKISGPVLIVTDSFYVAESANKELPYWKSNGFLNNKKKPLRHVSKWKSIAECLQLKPDIIIMHEKGHQQPMTTLHTEGNNLADKLATQGSYVVHAGKRTADGSEFEKRTADGSEFESPKKKAKVE

SEQ ID NO: 6129 - protein, 2102 aa, synthetic construct
MPAAKRVKLDGGDKKYSIGLDIGTNSVGWAVITDEYKVPSKKFKVLGNTDRHSIKKNLIGALLFDSGETAEATRLKRTARRRYTRRKNRICYLQEIFSNEMAKVDDSFFHRLEESFLVEEDKKHERHPIFGNIVDEVAYHEKYPTIYHLRKKLVDSTDKADLRLIYLALAHMIKFRGHFLIEGDLNPDNSDVDKLFIQLVQTYNQLFEENPINASGVDAKAILSARLSKSRRLENLIAQLPGEKKNGLFGNLIALSLGLTPNFKSNFDLAEDAKLQLSKDTYDDDLDNLLAQIGDQYADLFLAAKNLSDAILLSDILRVNTEITKAPLSASMIKRYDEHHQDLTLLKALVRQQLPEKYKEIFFDQSKNGYAGYIDGGASQEEFYKFIKPILEKMDGTEELLVKLNREDLLRKQRTFDNGSIPHQIHLGELHAILRRQEDFYPFLKDNREKIEKILTFRIPYYVGPLARGNSRFAWMTRKSEETITPWNFEEVVDKGASAQSFIERMTNFDKNLPNEKVLPKHSLLYEYFTVYNELTKVKYVTEGMRKPAFLSGEQKKAIVDLLFKTNRKVTVKQLKEDYFKKIECFDSVEISGVEDRFNASLGTYHDLLKIIKDKDFLDNEENEDILEDIVLTLTLFEDREMIEERLKTYAHLFDDKVMKQLKRRRYTGWGRLSRKLINGIRDKQSGKTILDFLKSDGFANRNFMQLIHDDSLTFKEDIQKAQVSGQGDSLHEHIANLAGSPAIKKGILQTVKVVDELVKVMGRHKPENIVIEMARENQTTQKGQKNSRERMKRIEEGIKELGSQILKEHPVENTQLQNEKLYLYYLQNGRDMYVDQELDINRLSDYDVDHIVPQSFLKDDSIDNKVLTRSDKARGKSDNVPSEEVVKKMKNYWRQLLNAKLITQRKFDNLTKAERGGLSELDKAGFIKRQLVETRQITKHVAQILDSRMNTKYDENDKLIREVKVITLKSKLVSDFRKDFQFYKVREINNYHHAHDAYLNAVVGTALIKKYPKLESEFVYGDYKVYDVRKMIAKSEQEIGKATAKYFFYSNIMNFFKTEITLANGEIRKRPLIETNGETGEIVWDKGRDFATVRKVLSMPQVNIVKKTEVQTGGFSKESILPKRNSDKLIARKKDWDPKKYGGFDSPTVAYSVLVVAKVEKGKSKKLKSVKELLGITIMERSSFEKNPIDFLEAKGYKEVKKDLIIKLPKYSLFELENGRKRMLASAGELQKGNELALPSKYVNFLYLASHYEKLKGSPEDNEQKQLFVEQHKHYLDEIIEQISEFSKRVILADANLDKVLSAYNKHRDKPIREQAENIIHLFTLTNLGAPAAFKYFDTTIDRKRYTSTKEVLDATLIHQSITGLYETRIDLSQLGGDGGGGGGSGGGGSGGGGSGGTAPLEEEYRLFLEAPIQNVTLLEQWKREIPKVWAEINPPGLASTQAPIHVQLLSTALPVRVRQYPITLEAKRSLRETIRKFRAAGILRPVHSPWNTPLLPVRKSGTSEYRMVQDLREVNKRVETIHPTVPNPYTLLSLLPPDRIWYSVLDLKDAFFCIPLAPESQLIFAFEWADAEEGESGQLTWTRLPQGFKNSPTLFNEALNRDLQGFRLDHPSVSLLQYVDDLLIAADTQAACLSATRDLLMTLAELGYRVSGKKAQLCQEEVTYLGFKIHKGSRSLSNSRTQAILQIPVPKTKRQVREFLGTIGYCRLWIPGFAELAQPLYAATRPGNDPLVWGEKEEEAFQSLKLALTQPPALALPSLDKPFQLFVEETSGAAKGVLTQALGPWKRPVAYLSKRLDPVAAGWPRCLRAIAAAALLTREASKLTFGQDIEITSSHNLESLLRSPPDKWLTNARITQYQVLLLDPPRVRFKQTAALNPATLLPETDDTLPIHHCLDTLDSLTSTRPDLTDQPLAQAEATLFTDGSSYIRDGKRYAGAAVVTLDSVIWAEPLPIGTSAQKAELIALTKALEWSKDKSVNIYTDSRYAFATLHVHGMIYRERGWLTAGGKAIKNAPEILALLTAVWLPKRVAVMHCKGHQKDDAPTSTGNRRADEVAREVAIRPLSTQATISAGKRTADGSEFEKRTADGSEFESPKKKAKVE

SEQ ID NO: 6130 - protein, 2102 aa, synthetic construct
MPAAKRVKLDGGDKKYSIGLDIGTNSVGWAVITDEYKVPSKKFKVLGNTDRHSIKKNLIGALLFDSGETAEATRLKRTARRRYTRRKNRICYLQEIFSNEMAKVDDSFFHRLEESFLVEEDKKHERHPIFGNIVDEVAYHEKYPTIYHLRKKLVDSTDKADLRLIYLALAHMIKFRGHFLIEGDLNPDNSDVDKLFIQLVQTYNQLFEENPINASGVDAKAILSARLSKSRRLENLIAQLPGEKKNGLFGNLIALSLGLTPNFKSNFDLAEDAKLQLSKDTYDDDLDNLLAQIGDQYADLFLAAKNLSDAILLSDILRVNTEITKAPLSASMIKRYDEHHQDLTLLKALVRQQLPEKYKEIFFDQSKNGYAGYIDGGASQEEFYKFIKPILEKMDGTEELLVKLNREDLLRKQRTFDNGSIPHQIHLGELHAILRRQEDFYPFLKDNREKIEKILTFRIPYYVGPLARGNSRFAWMTRKSEETITPWNFEEVVDKGASAQSFIERMTNFDKNLPNEKVLPKHSLLYEYFTVYNELTKVKYVTEGMRKPAFLSGEQKKAIVDLLFKTNRKVTVKQLKEDYFKKIECFDSVEISGVEDRFNASLGTYHDLLKIIKDKDFLDNEENEDILEDIVLTLTLFEDREMIEERLKTYAHLFDDKVMKQLKRRRYTGWGRLSRKLINGIRDKQSGKTILDFLKSDGFANRNFMQLIHDDSLTFKEDIQKAQVSGQGDSLHEHIANLAGSPAIKKGILQTVKVVDELVKVMGRHKPENIVIEMARENQTTQKGQKNSRERMKRIEEGIKELGSQILKEHPVENTQLQNEKLYLYYLQNGRDMYVDQELDINRLSDYDVDHIVPQSFLKDDSIDNKVLTRSDKARGKSDNVPSEEVVKKMKNYWRQLLNAKLITQRKFDNLTKAERGGLSELDKAGFIKRQLVETRQITKHVAQILDSRMNTKYDENDKLIREVKVITLKSKLVSDFRKDFQFYKVREINNYHHAHDAYLNAVVGTALIKKYPKLESEFVYGDYKVYDVRKMIAKSEQEIGKATAKYFFYSNIMNFFKTEITLANGEIRKRPLIETNGETGEIVWDKGRDFATVRKVLSMPQVNIVKKTEVQTGGFSKESILPKRNSDKLIARKKDWDPKKYGGFDSPTVAYSVLVVAKVEKGKSKKLKSVKELLGITIMERSSFEKNPIDFLEAKGYKEVKKDLIIKLPKYSLFELENGRKRMLASAGELQKGNELALPSKYVNFLYLASHYEKLKGSPEDNEQKQLFVEQHKHYLDEIIEQISEFSKRVILADANLDKVLSAYNKHRDKPIREQAENIIHLFTLTNLGAPAAFKYFDTTIDRKRYTSTKEVLDATLIHQSITGLYETRIDLSQLGGDGGGGGGSGGGGSGGGGSGGTAPLEEEYRLFLEAPIQNVTLLEQWKREIPKVWAEINPPGLASTQAPIHVQLLSTALPVRVRQYPITLEAKRSLRETIRKFRAAGILRPVHSPWNTPLLPVRKSGTSEYRMVQDLREVNKRVETIHPTVPNPYTLLSLLPPDRIWYSVLDLKDAFFCIPLAPESQLIFAFEWADAEEGESGQLTWTRLPQGFKNSPTLFNEALNRDLQGFRLDHPSVSLLQYVDDLLIAADTQAACLSATRDLLMTLAELGYRVSGKKAQLCQEEVTYLGFKIHKGSRSLSNSRTQAILQIPVPKTKRQVREFLGKIGYCRLFIPGFAELAQPLYAATRPGNDPLVWGEKEEEAFQSLKLALTQPPALALPSLDKPFQLFVEETSGAAKGVLTQALGPWKRPVAYLSKRLDPVAAGWPRCLRAIAAAALLTREASKLTFGQDIEITSSHNLESLLRSPPDKWLTNARITQYQVLLLDPPRVRFKQTAALNPATLLPETDDTLPIHHCLDTLDSLTSTRPDLTDQPLAQAEATLFTDGSSYIRDGKRYAGAAVVTLDSVIWAEPLPIGTSAQKAELIALTKALEWSKDKSVNIYTDSRYAFATLHVHGMIYRERGWLTAGGKAIKNAPEILALLTAVWLPKRVAVMHCKGHQKDDAPTSTGNRRADEVAREVAIRPLSTQATISAGKRTADGSEFEKRTADGSEFESPKKKAKVE

SEQ ID NO: 6131 - protein, 2106 aa, synthetic construct
MPAAKRVKLDGGDKKYSIGLDIGTNSVGWAVITDEYKVPSKKFKVLGNTDRHSIKKNLIGALLFDSGETAEATRLKRTARRRYTRRKNRICYLQEIFSNEMAKVDDSFFHRLEESFLVEEDKKHERHPIFGNIVDEVAYHEKYPTIYHLRKKLVDSTDKADLRLIYLALAHMIKFRGHFLIEGDLNPDNSDVDKLFIQLVQTYNQLFEENPINASGVDAKAILSARLSKSRRLENLIAQLPGEKKNGLFGNLIALSLGLTPNFKSNFDLAEDAKLQLSKDTYDDDLDNLLAQIGDQYADLFLAAKNLSDAILLSDILRVNTEITKAPLSASMIKRYDEHHQDLTLLKALVRQQLPEKYKEIFFDQSKNGYAGYIDGGASQEEFYKFIKPILEKMDGTEELLVKLNREDLLRKQRTFDNGSIPHQIHLGELHAILRRQEDFYPFLKDNREKIEKILTFRIPYYVGPLARGNSRFAWMTRKSEETITPWNFEEVVDKGASAQSFIERMTNFDKNLPNEKVLPKHSLLYEYFTVYNELTKVKYVTEGMRKPAFLSGEQKKAIVDLLFKTNRKVTVKQLKEDYFKKIECFDSVEISGVEDRFNASLGTYHDLLKIIKDKDFLDNEENEDILEDIVLTLTLFEDREMIEERLKTYAHLFDDKVMKQLKRRRYTGWGRLSRKLINGIRDKQSGKTILDFLKSDGFANRNFMQLIHDDSLTFKEDIQKAQVSGQGDSLHEHIANLAGSPAIKKGILQTVKVVDELVKVMGRHKPENIVIEMARENQTTQKGQKNSRERMKRIEEGIKELGSQILKEHPVENTQLQNEKLYLYYLQNGRDMYVDQELDINRLSDYDVDHIVPQSFLKDDSIDNKVLTRSDKARGKSDNVPSEEVVKKMKNYWRQLLNAKLITQRKFDNLTKAERGGLSELDKAGFIKRQLVETRQITKHVAQILDSRMNTKYDENDKLIREVKVITLKSKLVSDFRKDFQFYKVREINNYHHAHDAYLNAVVGTALIKKYPKLESEFVYGDYKVYDVRKMIAKSEQEIGKATAKYFFYSNIMNFFKTEITLANGEIRKRPLIETNGETGEIVWDKGRDFATVRKVLSMPQVNIVKKTEVQTGGFSKESILPKRNSDKLIARKKDWDPKKYGGFDSPTVAYSVLVVAKVEKGKSKKLKSVKELLGITIMERSSFEKNPIDFLEAKGYKEVKKDLIIKLPKYSLFELENGRKRMLASAGELQKGNELALPSKYVNFLYLASHYEKLKGSPEDNEQKQLFVEQHKHYLDEIIEQISEFSKRVILADANLDKVLSAYNKHRDKPIREQAENIIHLFTLTNLGAPAAFKYFDTTIDRKRYTSTKEVLDATLIHQSITGLYETRIDLSQLGGDGGGGGGSGGGGSGGGGSGGTVSLQDEHRLFDIPVTTSLPDVWLQDFPQAWAETGGLGRAKCQAPIIIDLKPTAVPVSIKQYPMSLEAHMGIRQHIIKFLELGVLRPCRSPWNTPLLPVKKPGTQDYRPVQDLREINKRTVDIHPTVPNPYNLLSTLKPDYSWYTVLDLKDAFFCLPLAPQSQELFAFEWKDPERGISGQLTWTRLPQGFKNSPTLFNEALHRDLTDFRTQHPEVTLLQYVDDLLLAAPTKKACTQGTRHLLQELGEKGYRASAKKAQICQTKVTYLGYILSEGKRWLTPGRIETVARIPPPRNPREVREFLGTAGFCRLWIPGFAELAAPLYALTKPSTPFTWQTEHQLAFEALKKALLSAPALGLPDTSKPFTLFLDERQGIAKGVLTQKLGPWKRPVAYLSKKLDPVAAGWPPCLRIMAATAMLVKDSAKLTLGQPLTVITPHTLEAIVRQPPDRWITNARLTHYQALLLDTDRVQFGPPVTLNPATLLPVPENQPSPHDCRQVLAETHGTREDLKDQELPDADHTWYTDGSSYLDSGTRRAGAAVVDGHNTIWAQSLPPGTSAQKAELIALTKALELSKGKKANIYTDSRYAFATAHTHGSIYERRGWLTSEGKEIKNKAEIIALLKALFLPQEVAIIHCPGHQKGQDPVAVGNRQADRVARQAAMAEVLTLATEPDNTSHITAGKRTADGSEFEKRTADGSEFESPKKKAKVE

SEQ ID NO: 6132 - protein, 2091 aa, synthetic construct
MPAAKRVKLDGGDKKYSIGLDIGTNSVGWAVITDEYKVPSKKFKVLGNTDRHSIKKNLIGALLFDSGETAEATRLKRTARRRYTRRKNRICYLQEIFSNEMAKVDDSFFHRLEESFLVEEDKKHERHPIFGNIVDEVAYHEKYPTIYHLRKKLVDSTDKADLRLIYLALAHMIKFRGHFLIEGDLNPDNSDVDKLFIQLVQTYNQLFEENPINASGVDAKAILSARLSKSRRLENLIAQLPGEKKNGLFGNLIALSLGLTPNFKSNFDLAEDAKLQLSKDTYDDDLDNLLAQIGDQYADLFLAAKNLSDAILLSDILRVNTEITKAPLSASMIKRYDEHHQDLTLLKALVRQQLPEKYKEIFFDQSKNGYAGYIDGGASQEEFYKFIKPILEKMDGTEELLVKLNREDLLRKQRTFDNGSIPHQIHLGELHAILRRQEDFYPFLKDNREKIEKILTFRIPYYVGPLARGNSRFAWMTRKSEETITPWNFEEVVDKGASAQSFIERMTNFDKNLPNEKVLPKHSLLYEYFTVYNELTKVKYVTEGMRKPAFLSGEQKKAIVDLLFKTNRKVTVKQLKEDYFKKIECFDSVEISGVEDRFNASLGTYHDLLKIIKDKDFLDNEENEDILEDIVLTLTLFEDREMIEERLKTYAHLFDDKVMKQLKRRRYTGWGRLSRKLINGIRDKQSGKTILDFLKSDGFANRNFMQLIHDDSLTFKEDIQKAQVSGQGDSLHEHIANLAGSPAIKKGILQTVKVVDELVKVMGRHKPENIVIEMARENQTTQKGQKNSRERMKRIEEGIKELGSQILKEHPVENTQLQNEKLYLYYLQNGRDMYVDQELDINRLSDYDVDHIVPQSFLKDDSIDNKVLTRSDKARGKSDNVPSEEVVKKMKNYWRQLLNAKLITQRKFDNLTKAERGGLSELDKAGFIKRQLVETRQITKHVAQILDSRMNTKYDENDKLIREVKVITLKSKLVSDFRKDFQFYKVREINNYHHAHDAYLNAVVGTALIKKYPKLESEFVYGDYKVYDVRKMIAKSEQEIGKATAKYFFYSNIMNFFKTEITLANGEIRKRPLIETNGETGEIVWDKGRDFATVRKVLSMPQVNIVKKTEVQTGGFSKESILPKRNSDKLIARKKDWDPKKYGGFDSPTVAYSVLVVAKVEKGKSKKLKSVKELLGITIMERSSFEKNPIDFLEAKGYKEVKKDLIIKLPKYSLFELENGRKRMLASAGELQKGNELALPSKYVNFLYLASHYEKLKGSPEDNEQKQLFVEQHKHYLDEIIEQISEFSKRVILADANLDKVLSAYNKHRDKPIREQAENIIHLFTLTNLGAPAAFKYFDTTIDRKRYTSTKEVLDATLIHQSITGLYETRIDLSQLGGDGGGGGGSGGGGSGGGGSGGVPWLTQQPLQLTILVPLQEYQEKILSKTALPEDQKQQLKTLFVKYDNLWQHWENQVGHRKIRPHNIATGDYPPRPQKQYPINPKAKPSIQIVIDDLLKQGVLTPQNSTMNTPVYPVPKPDGRWRMVLDYREVNKTIPLTAAQNQHSAGILATIVRQKYKTTLDLANGFWAHPITPESYWLTAFTWQGKQYCWTRLPQGFLNSPALFNADVVDLLKEIPNVQVYVDDIYLSHDDPKEHVQQLEKVFQILLQAGYVVSLKKSEIGQKTVEFLGFNITKEGRGLTDTFKTKLLNITPPKDLKQLQSILGLLNFARNFIPNFAELVQPLYNLIAPAKGKYIEWSEENTKQLNMVIEALNTASNLEERLPEQRLVIKVNTSPSAGYVRYYNETGKKPIMYLNYVFSKAELKFSMLEKLLTTMHKALIKAMDLAMGQEILVYSPIVSMTKIQKTPLPERKALPIRWITWMTYLEDPRIQFHYDKTLPELKHIPDVYTSSQSPVKHPSQYEGVFYTDGSAIKSPDPTKSNNAGMGIVHATYKPEYQVLNQWSIPLGNHTAQMAEIAAVEFACKKALKIPGPVLVITDSFYVAESANKELPYWKSNGFVNNKKKPLKHISKWKSIAECLSMKPDITIQHEKGISLQIPVFILKGNALADKLATQGSYVVNAGKRTADGSEFEKRTADGSEFESPKKKAKVE

SEQ ID NO: 6133 - protein, 2222 aa, synthetic construct
MPAAKRVKLDGGDKKYSIGLDIGTNSVGWAVITDEYKVPSKKFKVLGNTDRHSIKKNLIGALLFDSGETAEATRLKRTARRRYTRRKNRICYLQEIFSNEMAKVDDSFFHRLEESFLVEEDKKHERHPIFGNIVDEVAYHEKYPTIYHLRKKLVDSTDKADLRLIYLALAHMIKFRGHFLIEGDLNPDNSDVDKLFIQLVQTYNQLFEENPINASGVDAKAILSARLSKSRRLENLIAQLPGEKKNGLFGNLIALSLGLTPNFKSNFDLAEDAKLQLSKDTYDDDLDNLLAQIGDQYADLFLAAKNLSDAILLSDILRVNTEITKAPLSASMIKRYDEHHQDLTLLKALVRQQLPEKYKEIFFDQSKNGYAGYIDGGASQEEFYKFIKPILEKMDGTEELLVKLNREDLLRKQRTFDNGSIPHQIHLGELHAILRRQEDFYPFLKDNREKIEKILTFRIPYYVGPLARGNSRFAWMTRKSEETITPWNFEEVVDKGASAQSFIERMTNFDKNLPNEKVLPKHSLLYEYFTVYNELTKVKYVTEGMRKPAFLSGEQKKAIVDLLFKTNRKVTVKQLKEDYFKKIECFDSVEISGVEDRFNASLGTYHDLLKIIKDKDFLDNEENEDILEDIVLTLTLFEDREMIEERLKTYAHLFDDKVMKQLKRRRYTGWGRLSRKLINGIRDKQSGKTILDFLKSDGFANRNFMQLIHDDSLTFKEDIQKAQVSGQGDSLHEHIANLAGSPAIKKGILQTVKVVDELVKVMGRHKPENIVIEMARENQTTQKGQKNSRERMKRIEEGIKELGSQILKEHPVENTQLQNEKLYLYYLQNGRDMYVDQELDINRLSDYDVDHIVPQSFLKDDSIDNKVLTRSDKARGKSDNVPSEEVVKKMKNYWRQLLNAKLITQRKFDNLTKAERGGLSELDKAGFIKRQLVETRQITKHVAQILDSRMNTKYDENDKLIREVKVITLKSKLVSDFRKDFQFYKVREINNYHHAHDAYLNAVVGTALIKKYPKLESEFVYGDYKVYDVRKMIAKSEQEIGKATAKYFFYSNIMNFFKTEITLANGEIRKRPLIETNGETGEIVWDKGRDFATVRKVLSMPQVNIVKKTEVQTGGFSKESILPKRNSDKLIARKKDWDPKKYGGFDSPTVAYSVLVVAKVEKGKSKKLKSVKELLGITIMERSSFEKNPIDFLEAKGYKEVKKDLIIKLPKYSLFELENGRKRMLASAGELQKGNELALPSKYVNFLYLASHYEKLKGSPEDNEQKQLFVEQHKHYLDEIIEQISEFSKRVILADANLDKVLSAYNKHRDKPIREQAENIIHLFTLTNLGAPAAFKYFDTTIDRKRYTSTKEVLDATLIHQSITGLYETRIDLSQLGGDGGGGGGSGGGGSGGGGSGGTLGDQGSRGSDPLPEPRVTLTVEGIPTEFLVNTGAEHSVLTKPMGKMGSKRTVVAGATGSKVYPWTTKRLLKIGQKQVTHSFLVIPECPAPLLGRDLLTKLKAQIQFSTEGPQVTWEDRPAMCLVLNLEEEYRLHEKPVPPSIDPSWLQLFPMVWAEKAGMGLANQVPPVVVELKSDASPVAVRQYPMSKEAREGIRPHIQRFLDLGILVPCQSPWNTPLLPVKKPGTNDYRPVQDLREVNKRVQDIHPTVPNPYNLLSSLPPSHTWYSVLDLKDAFFCLKLHPNSQPLFAFEWRDPEKGNTGQLTWTRLPQGFKNSPTLFNEALHRDLASFRALNPQVVMLQYVDDLLVAAPTYRDCKEGTRRLLQELSKLGYRVSAKKAQLCREEVTYLGYLLKGGKRWLTPARKATVMKIPTPTTPRQVREFLGKAGFCRLFIPGFASLAAPLYPLTRPKVPFTWTEAHQEAFGRIKEALLSAPALALPDLTKPFALYVDEKEGVARGVLTQTLGPWRRPVAYLSKKLDPVASGWPTCLKAIAAVALLLKDADKLTLGQNVLVIAPHNLESIVRQPPDRWMTNARMTHYQSLLLNERVSFAPPAILNPATLLPVESDDTPIHICSEILAEETGTRPDLRDQPLPGVPAWYTDGSSFIMDGRRQAGAAIVDNKRTVWASNLPEGTSAQKAELIALTQALRLAEGKSINIYTDSRYAFATAHVHGAIYKQRGWLTSAGKDIKNKEEILALLEAIHLPKRVAIIHCPGHQRGTDPVATGNRKADEAAKQAAQSTRILTETTKNAGKRTADGSEFEKRTADGSEFESPKKKAKVE

SEQ ID NO: 6134 - protein, 2100 aa, synthetic construct
MPAAKRVKLDGGDKKYSIGLDIGTNSVGWAVITDEYKVPSKKFKVLGNTDRHSIKKNLIGALLFDSGETAEATRLKRTARRRYTRRKNRICYLQEIFSNEMAKVDDSFFHRLEESFLVEEDKKHERHPIFGNIVDEVAYHEKYPTIYHLRKKLVDSTDKADLRLIYLALAHMIKFRGHFLIEGDLNPDNSDVDKLFIQLVQTYNQLFEENPINASGVDAKAILSARLSKSRRLENLIAQLPGEKKNGLFGNLIALSLGLTPNFKSNFDLAEDAKLQLSKDTYDDDLDNLLAQIGDQYADLFLAAKNLSDAILLSDILRVNTEITKAPLSASMIKRYDEHHQDLTLLKALVRQQLPEKYKEIFFDQSKNGYAGYIDGGASQEEFYKFIKPILEKMDGTEELLVKLNREDLLRKQRTFDNGSIPHQIHLGELHAILRRQEDFYPFLKDNREKIEKILTFRIPYYVGPLARGNSRFAWMTRKSEETITPWNFEEVVDKGASAQSFIERMTNFDKNLPNEKVLPKHSLLYEYFTVYNELTKVKYVTEGMRKPAFLSGEQKKAIVDLLFKTNRKVTVKQLKEDYFKKIECFDSVEISGVEDRFNASLGTYHDLLKIIKDKDFLDNEENEDILEDIVLTLTLFEDREMIEERLKTYAHLFDDKVMKQLKRRRYTGWGRLSRKLINGIRDKQSGKTILDFLKSDGFANRNFMQLIHDDSLTFKEDIQKAQVSGQGDSLHEHIANLAGSPAIKKGILQTVKVVDELVKVMGRHKPENIVIEMARENQTTQKGQKNSRERMKRIEEGIKELGSQILKEHPVENTQLQNEKLYLYYLQNGRDMYVDQELDINRLSDYDVDHIVPQSFLKDDSIDNKVLTRSDKARGKSDNVPSEEVVKKMKNYWRQLLNAKLITQRKFDNLTKAERGGLSELDKAGFIKRQLVETRQITKHVAQILDSRMNTKYDENDKLIREVKVITLKSKLVSDFRKDFQFYKVREINNYHHAHDAYLNAVVGTALIKKYPKLESEFVYGDYKVYDVRKMIAKSEQEIGKATAKYFFYSNIMNFFKTEITLANGEIRKRPLIETNGETGEIVWDKGRDFATVRKVLSMPQVNIVKKTEVQTGGFSKESILPKRNSDKLIARKKDWDPKKYGGFDSPTVAYSVLVVAKVEKGKSKKLKSVKELLGITIMERSSFEKNPIDFLEAKGYKEVKKDLIIKLPKYSLFELENGRKRMLASAGELQKGNELALPSKYVNFLYLASHYEKLKGSPEDNEQKQLFVEQHKHYLDEIIEQISEFSKRVILADANLDKVLSAYNKHRDKPIREQAENIIHLFTLTNLGAPAAFKYFDTTIDRKRYTSTKEVLDATLIHQSITGLYETRIDLSQLGGDGGGGGGSGGGGSGGGGSGGTLNLEDEYRLYETSAEPEVSPGSTWLSDFPQAWAETGGMGLAVRQAPLIIPLKATSTPVSIKQYPMSQEAKLGIKPHIQRLLDQGILVPCQSPWNTPLLPVKKPGTNDYRPVQDLREVNKRVEDIHPTVPNPYNLLSGLPPSHRWYTVLDLKDAFFCLRLHPTSQPLFAFEWRDPGMGISGQLTWTRLPQGFKNSPTLFNEALHRDLADFRIQHPDLILLQYVDDILLAATSELDCQQGTRALLLTLGNLGYRASAKKAQLCQKQVKYLGYLLKEGQRWLTEARKETVMGQPTPKTPRQLREFLGTAGFCRLWIPGFAEMAAPLYPLTKPGTLFNWGPDQQKAYQEIKQALLTAPALGLPDLTKPFELFVDEKQGYAKGVLTQKLGPWRRPVAYLSKKLDPVAAGWPPCLRMVAAIAVLRKDAGKLTMGQPLVILAPHAVEALVKQPPDRWLSNARMTHYQAMLLDTDRVQFGPVVALNPATLLPLPEEGAPHDCLEILAETHGTRPDLTDQPIPDADHTWYTDGSSFLQEGQRKAGAAVTTETEVIWARALPAGTSAQRAELIALTQALKMAEGKRLNVYTDSRYAFATAHIHGEIYRRRGWLTSEGREIKNKSEILALLKALFLPKRLSIIHCLGHQKGDSAEARGNRLADQAAREAAIKTPPDTSTLLAGKRTADGSEFEKRTADGSEFESPKKKAKVE

SEQ ID NO: 6135 - protein, 2100 aa, synthetic construct
MPAAKRVKLDGGDKKYSIGLDIGTNSVGWAVITDEYKVPSKKFKVLGNTDRHSIKKNLIGALLFDSGETAEATRLKRTARRRYTRRKNRICYLQEIFSNEMAKVDDSFFHRLEESFLVEEDKKHERHPIFGNIVDEVAYHEKYPTIYHLRKKLVDSTDKADLRLIYLALAHMIKFRGHFLIEGDLNPDNSDVDKLFIQLVQTYNQLFEENPINASGVDAKAILSARLSKSRRLENLIAQLPGEKKNGLFGNLIALSLGLTPNFKSNFDLAEDAKLQLSKDTYDDDLDNLLAQIGDQYADLFLAAKNLSDAILLSDILRVNTEITKAPLSASMIKRYDEHHQDLTLLKALVRQQLPEKYKEIFFDQSKNGYAGYIDGGASQEEFYKFIKPILEKMDGTEELLVKLNREDLLRKQRTFDNGSIPHQIHLGELHAILRRQEDFYPFLKDNREKIEKILTFRIPYYVGPLARGNSRFAWMTRKSEETITPWNFEEVVDKGASAQSFIERMTNFDKNLPNEKVLPKHSLLYEYFTVYNELTKVKYVTEGMRKPAFLSGEQKKAIVDLLFKTNRKVTVKQLKEDYFKKIECFDSVEISGVEDRFNASLGTYHDLLKIIKDKDFLDNEENEDILEDIVLTLTLFEDREMIEERLKTYAHLFDDKVMKQLKRRRYTGWGRLSRKLINGIRDKQSGKTILDFLKSDGFANRNFMQLIHDDSLTFKEDIQKAQVSGQGDSLHEHIANLAGSPAIKKGILQTVKVVDELVKVMGRHKPENIVIEMARENQTTQKGQKNSRERMKRIEEGIKELGSQILKEHPVENTQLQNEKLYLYYLQNGRDMYVDQELDINRLSDYDVDHIVPQSFLKDDSIDNKVLTRSDKARGKSDNVPSEEVVKKMKNYWRQLLNAKLITQRKFDNLTKAERGGLSELDKAGFIKRQLVETRQITKHVAQILDSRMNTKYDENDKLIREVKVITLKSKLVSDFRKDFQFYKVREINNYHHAHDAYLNAVVGTALIKKYPKLESEFVYGDYKVYDVRKMIAKSEQEIGKATAKYFFYSNIMNFFKTEITLANGEIRKRPLIETNGETGEIVWDKGRDFATVRKVLSMPQVNIVKKTEVQTGGFSKESILPKRNSDKLIARKKDWDPKKYGGFDSPTVAYSVLVVAKVEKGKSKKLKSVKELLGITIMERSSFEKNPIDFLEAKGYKEVKKDLIIKLPKYSLFELENGRKRMLASAGELQKGNELALPSKYVNFLYLASHYEKLKGSPEDNEQKQLFVEQHKHYLDEIIEQISEFSKRVILADANLDKVLSAYNKHRDKPIREQAENIIHLFTLTNLGAPAAFKYFDTTIDRKRYTSTKEVLDATLIHQSITGLYETRIDLSQLGGDGGGGGGSGGGGSGGGGSGGTLNIEDEYRLHETSKEPDVSLGSTWLSDFPQAWAETGGMGLAVRQAPLIIPLKATSTPVSIKQYPMSQEARLGIKPHIQRLLDQGILVPCQSPWNTPLLPVKKPGTNDYRPVQDLREVNKRVEDIHPTVPNPYNLLSGLPPSHQWYTVLDLKDAFFCLRLHPTSQPLFAFEWRDPEMGISGQLTWTRLPQGFKNSPTLFDEALHRDLAGFRIQHPDLILLQYVDDLLLAATSELDCQQGTRALLQTLGDLGYRASAKKAQICQKQVKYLGYLLKEGQRWLTEARKETVMGQPIPKTPRQLREFLGTAGFCRLWIPGFAEMAAPLYPLTKTGTLFNWGPDQQKAFQEIKQALLTAPALGLPDLTKPFELFVDEKQGYAKGVLTQKLGPWRRPVAYLSKKLDPVAAGWPPCLRMVAAIAVLTKDAGKLTMGQPLVILAPHAVEALVKQPPDRWLSNARMTHYQALLLDTDRVQFGPVVALNPATLLPLPEEGLQHDCLDILAEAHGTRSDLMDQPLPDADHTWYTDGSSFLQEGQRKAGAAVTTETEVIWARALPAGTSAQRAELIALTQALKMAEGKKLNVYTDSRYAFATAHIHGEIYRRRGLLTSEGKEIKNKDEILALLKALFLPKRLSIIHCPGHQKGNSAEARGNRMADQAAREVATRETPETSTLLAGKRTADGSEFEKRTADGSEFESPKKKAKVE

SEQ ID NO: 6136 - protein, 2100 aa, synthetic construct
MPAAKRVKLDGGDKKYSIGLDIGTNSVGWAVITDEYKVPSKKFKVLGNTDRHSIKKNLIGALLFDSGETAEATRLKRTARRRYTRRKNRICYLQEIFSNEMAKVDDSFFHRLEESFLVEEDKKHERHPIFGNIVDEVAYHEKYPTIYHLRKKLVDSTDKADLRLIYLALAHMIKFRGHFLIEGDLNPDNSDVDKLFIQLVQTYNQLFEENPINASGVDAKAILSARLSKSRRLENLIAQLPGEKKNGLFGNLIALSLGLTPNFKSNFDLAEDAKLQLSKDTYDDDLDNLLAQIGDQYADLFLAAKNLSDAILLSDILRVNTEITKAPLSASMIKRYDEHHQDLTLLKALVRQQLPEKYKEIFFDQSKNGYAGYIDGGASQEEFYKFIKPILEKMDGTEELLVKLNREDLLRKQRTFDNGSIPHQIHLGELHAILRRQEDFYPFLKDNREKIEKILTFRIPYYVGPLARGNSRFAWMTRKSEETITPWNFEEVVDKGASAQSFIERMTNFDKNLPNEKVLPKHSLLYEYFTVYNELTKVKYVTEGMRKPAFLSGEQKKAIVDLLFKTNRKVTVKQLKEDYFKKIECFDSVEISGVEDRFNASLGTYHDLLKIIKDKDFLDNEENEDILEDIVLTLTLFEDREMIEERLKTYAHLFDDKVMKQLKRRRYTGWGRLSRKLINGIRDKQSGKTILDFLKSDGFANRNFMQLIHDDSLTFKEDIQKAQVSGQGDSLHEHIANLAGSPAIKKGILQTVKVVDELVKVMGRHKPENIVIEMARENQTTQKGQKNSRERMKRIEEGIKELGSQILKEHPVENTQLQNEKLYLYYLQNGRDMYVDQELDINRLSDYDVDHIVPQSFLKDDSIDNKVLTRSDKARGKSDNVPSEEVVKKMKNYWRQLLNAKLITQRKFDNLTKAERGGLSELDKAGFIKRQLVETRQITKHVAQILDSRMNTKYDENDKLIREVKVITLKSKLVSDFRKDFQFYKVREINNYHHAHDAYLNAVVGTALIKKYPKLESEFVYGDYKVYDVRKMIAKSEQEIGKATAKYFFYSNIMNFFKTEITLANGEIRKRPLIETNGETGEIVWDKGRDFATVRKVLSMPQVNIVKKTEVQTGGFSKESILPKRNSDKLIARKKDWDPKKYGGFDSPTVAYSVLVVAKVEKGKSKKLKSVKELLGITIMERSSFEKNPIDFLEAKGYKEVKKDLIIKLPKYSLFELENGRKRMLASAGELQKGNELALPSKYVNFLYLASHYEKLKGSPEDNEQKQLFVEQHKHYLDEIIEQISEFSKRVILADANLDKVLSAYNKHRDKPIREQAENIIHLFTLTNLGAPAAFKYFDTTIDRKRYTSTKEVLDATLIHQSITGLYETRIDLSQLGGDGGGGGGSGGGGSGGGGSGGTLNIEDEHRLHETSKEPDVSLGSTWLSDFPQAWAETGGMGLAVRQAPLIIPLKATSTPVSIKQYPMSQEARLGIKPHIQRLLDQGILVPCQSPWNTPLLPVKKPGTNDYRPVQDLREVNKRVEDIHPTVPNPYNLLSGLPPSHQWYTVLDLKDAFFCLRLHPTSQPLFAFEWRDPEMGISGQLTWTRLPQGFKNSPTLFDEALHRDLADFRIQHPDLILLQYVDDLLLAATSELDCQQGTRALLQTLGNLGYRASAKKAQICQKQVKYLGYLLKEGQRWLTEARKETVMGQPTPKTPRQLREFLGTAGFCRLWIPGFAEMAAPLYPLTKTGTLFNWGPDQQKAYQEIKQALLTAPALGLPDLTKPFELFVDEKQGYAKGVLTQKLGPWRRPVAYLSKKLDPVAAGWPPCLRMVAAIAVLTKDAGKLTMGQPLVILAPHAVEALVKQPPDRWLSNARMTHYQALLLDTDRVQFGPVVALNPATLLPLPEEGLQHNCLDILAEAHGTRPDLTDQPLPDADHTWYTDGSSLLQEGQRKAGAAVTTETEVIWAKALPAGTSAQRAELIALTQALKMAEGKKLNVYTDSRYAFATAHIHGEIYRRRGLLTSEGKEIKNKDEILALLKALFLPKRLSIIHCPGHQKGHSAEARGNRMADQAARKAAITETPDTSTLLAGKRTADGSEFEKRTADGSEFESPKKKAKVE

SEQ ID NO: 6137 - protein, 2180 aa, synthetic construct
MPAAKRVKLDGGDKKYSIGLDIGTNSVGWAVITDEYKVPSKKFKVLGNTDRHSIKKNLIGALLFDSGETAEATRLKRTARRRYTRRKNRICYLQEIFSNEMAKVDDSFFHRLEESFLVEEDKKHERHPIFGNIVDEVAYHEKYPTIYHLRKKLVDSTDKADLRLIYLALAHMIKFRGHFLIEGDLNPDNSDVDKLFIQLVQTYNQLFEENPINASGVDAKAILSARLSKSRRLENLIAQLPGEKKNGLFGNLIALSLGLTPNFKSNFDLAEDAKLQLSKDTYDDDLDNLLAQIGDQYADLFLAAKNLSDAILLSDILRVNTEITKAPLSASMIKRYDEHHQDLTLLKALVRQQLPEKYKEIFFDQSKNGYAGYIDGGASQEEFYKFIKPILEKMDGTEELLVKLNREDLLRKQRTFDNGSIPHQIHLGELHAILRRQEDFYPFLKDNREKIEKILTFRIPYYVGPLARGNSRFAWMTRKSEETITPWNFEEVVDKGASAQSFIERMTNFDKNLPNEKVLPKHSLLYEYFTVYNELTKVKYVTEGMRKPAFLSGEQKKAIVDLLFKTNRKVTVKQLKEDYFKKIECFDSVEISGVEDRFNASLGTYHDLLKIIKDKDFLDNEENEDILEDIVLTLTLFEDREMIEERLKTYAHLFDDKVMKQLKRRRYTGWGRLSRKLINGIRDKQSGKTILDFLKSDGFANRNFMQLIHDDSLTFKEDIQKAQVSGQGDSLHEHIANLAGSPAIKKGILQTVKVVDELVKVMGRHKPENIVIEMARENQTTQKGQKNSRERMKRIEEGIKELGSQILKEHPVENTQLQNEKLYLYYLQNGRDMYVDQELDINRLSDYDVDHIVPQSFLKDDSIDNKVLTRSDKARGKSDNVPSEEVVKKMKNYWRQLLNAKLITQRKFDNLTKAERGGLSELDKAGFIKRQLVETRQITKHVAQILDSRMNTKYDENDKLIREVKVITLKSKLVSDFRKDFQFYKVREINNYHHAHDAYLNAVVGTALIKKYPKLESEFVYGDYKVYDVRKMIAKSEQEIGKATAKYFFYSNIMNFFKTEITLANGEIRKRPLIETNGETGEIVWDKGRDFATVRKVLSMPQVNIVKKTEVQTGGFSKESILPKRNSDKLIARKKDWDPKKYGGFDSPTVAYSVLVVAKVEKGKSKKLKSVKELLGITIMERSSFEKNPIDFLEAKGYKEVKKDLIIKLPKYSLFELENGRKRMLASAGELQKGNELALPSKYVNFLYLASHYEKLKGSPEDNEQKQLFVEQHKHYLDEIIEQISEFSKRVILADANLDKVLSAYNKHRDKPIREQAENIIHLFTLTNLGAPAAFKYFDTTIDRKRYTSTKEVLDATLIHQSITGLYETRIDLSQLGGDGGGGGGSGGGGSGGGGSGGMDPLQLLQPLEAEIKGTKLKAHWNSGATITCVPEAFLEDERPIQTMLIKTIHGEKQQDVYYLTFKVQGRKVEAEVLASPYDYILLNPSDVPWLMKKPLQLTVLVPLHEYQERLLQQTALPKEQKELLQKLFLKYDALWQHWENQVGHRRIKPHNIATGTLAPRPQKQYPINPKAKPSIQIVIDDLLKQGVLIQQNSTMNTPVYPVPKPDGKWRMVLDYREVNKTIPLIAAQNQHSAGILSSIYRGKYKTTLDLTNGFWAHPITPESYWLTAFTWQGKQYCWTRLPQGFLNSPALFNADVVDLLKEIPNVQAYVDDIYISHDDPQEHLEQLEKIFSILLNAGYVVSLKKSEIAQREVEFLGFNITKEGRGLTDTFKQKLLNITPPKDLKQLQSILGLLNFARNFIPNYSELVKPLYTIVAPANGKFISWTEDNSNQLQHIISVLNQADNLEERNPETRLIIKVNSSPSAGYIRYYNEGSKRPIMYVNYIFSKAEAKFTQTEKLLTTMHKGLIKAMDLAMGQEILVYSPIVSMTKIQRTPLPERKALPVRWITWMTYLEDPRIQFHYDKSLPELQQIPNVTEDVIAKTKHPSEFAMVFYTDGSAIKHPDVNKSHSAGMGIAQVQFIPEYKIVHQWSIPLGDHTAQLAEIAAVEFACKKALKISGPVLIVTDSFYVAESANKELPYWKSNGFLNNKKKPLRHVSKWKSIAECLQLKPDIIIMHEKGHQQPMTTLHTEGNNLADKLATQGSYVVHAGKRTADGSEFEKRTADGSEFESPKKKAKVE

SEQ ID NO: 6138 - protein, 2091 aa, synthetic construct
MPAAKRVKLDGGDKKYSIGLDIGTNSVGWAVITDEYKVPSKKFKVLGNTDRHSIKKNLIGALLFDSGETAEATRLKRTARRRYTRRKNRICYLQEIFSNEMAKVDDSFFHRLEESFLVEEDKKHERHPIFGNIVDEVAYHEKYPTIYHLRKKLVDSTDKADLRLIYLALAHMIKFRGHFLIEGDLNPDNSDVDKLFIQLVQTYNQLFEENPINASGVDAKAILSARLSKSRRLENLIAQLPGEKKNGLFGNLIALSLGLTPNFKSNFDLAEDAKLQLSKDTYDDDLDNLLAQIGDQYADLFLAAKNLSDAILLSDILRVNTEITKAPLSASMIKRYDEHHQDLTLLKALVRQQLPEKYKEIFFDQSKNGYAGYIDGGASQEEFYKFIKPILEKMDGTEELLVKLNREDLLRKQRTFDNGSIPHQIHLGELHAILRRQEDFYPFLKDNREKIEKILTFRIPYYVGPLARGNSRFAWMTRKSEETITPWNFEEVVDKGASAQSFIERMTNFDKNLPNEKVLPKHSLLYEYFTVYNELTKVKYVTEGMRKPAFLSGEQKKAIVDLLFKTNRKVTVKQLKEDYFKKIECFDSVEISGVEDRFNASLGTYHDLLKIIKDKDFLDNEENEDILEDIVLTLTLFEDREMIEERLKTYAHLFDDKVMKQLKRRRYTGWGRLSRKLINGIRDKQSGKTILDFLKSDGFANRNFMQLIHDDSLTFKEDIQKAQVSGQGDSLHEHIANLAGSPAIKKGILQTVKVVDELVKVMGRHKPENIVIEMARENQTTQKGQKNSRERMKRIEEGIKELGSQILKEHPVENTQLQNEKLYLYYLQNGRDMYVDQELDINRLSDYDVDHIVPQSFLKDDSIDNKVLTRSDKARGKSDNVPSEEVVKKMKNYWRQLLNAKLITQRKFDNLTKAERGGLSELDKAGFIKRQLVETRQITKHVAQILDSRMNTKYDENDKLIREVKVITLKSKLVSDFRKDFQFYKVREINNYHHAHDAYLNAVVGTALIKKYPKLESEFVYGDYKVYDVRKMIAKSEQEIGKATAKYFFYSNIMNFFKTEITLANGEIRKRPLIETNGETGEIVWDKGRDFATVRKVLSMPQVNIVKKTEVQTGGFSKESILPKRNSDKLIARKKDWDPKKYGGFDSPTVAYSVLVVAKVEKGKSKKLKSVKELLGITIMERSSFEKNPIDFLEAKGYKEVKKDLIIKLPKYSLFELENGRKRMLASAGELQKGNELALPSKYVNFLYLASHYEKLKGSPEDNEQKQLFVEQHKHYLDEIIEQISEFSKRVILADANLDKVLSAYNKHRDKPIREQAENIIHLFTLTNLGAPAAFKYFDTTIDRKRYTSTKEVLDATLIHQSITGLYETRIDLSQLGGDGGGGGGSGGGGSGGGGSGGIPWLMKKPLQLTTLVPLQEYEERLLKQTMLTGSYKEKLQSLFLKYDALWQHWENQVGHRRIKPHHIATGTVNPRPQKQYPINPKAKASIQTVINDLLKQGVLIQQNSIMNTPVYPVPKPDGKWRMVLDYREVNKTIPLIAAQNQHSAGILSSIFRGKYKTTLDLSNGFWAHSITPESYWLTAFTWLGQQYCWTRLPQGFLNSPALFNADVVDLLKEVPNVQVYVDDIYISHDDPREHLEQLEKVFSLLLNAGYVVSLKKSEIAQHEVEFLGFNITKEGRGLTETFKQKLLNITPPRDLKQLQSILGLLNFARNFIPNFSELVKPLYNIIATAPGKYITWTTDNSQQLQNIISMLNSAENLEERNPEVRLIMKVNTSPSAGYIRFYNEFAKRPIMYLNYVYTKAEVKFTNTEKLLTTIHKGLIKALDLGMGQEILVYSPIVSMTKIQKTPLPERKALPIRWITWMSYLEDPRIQFHYDKTLPELQQVPTVTDDIIAKIKHPSEFSMVFYTDGSAIKHPNVNKSHNAGMGIAQVQFKPEFTVINTWSIPLGDHTAQLAEVAAVEFACKKALKIDGPVLIVTDSFYVAESVNKELPYWQSNGFFNNKKKPLKHVSKWKSIADCIQLKPDIIIIHEKGHQPTASTFHTEGNNLADKLATQGSYVVNAGKRTADGSEFEKRTADGSEFESPKKKAKVE

SEQ ID NO: 6139 - protein, 2091 aa, synthetic construct
MPAAKRVKLDGGDKKYSIGLDIGTNSVGWAVITDEYKVPSKKFKVLGNTDRHSIKKNLIGALLFDSGETAEATRLKRTARRRYTRRKNRICYLQEIFSNEMAKVDDSFFHRLEESFLVEEDKKHERHPIFGNIVDEVAYHEKYPTIYHLRKKLVDSTDKADLRLIYLALAHMIKFRGHFLIEGDLNPDNSDVDKLFIQLVQTYNQLFEENPINASGVDAKAILSARLSKSRRLENLIAQLPGEKKNGLFGNLIALSLGLTPNFKSNFDLAEDAKLQLSKDTYDDDLDNLLAQIGDQYADLFLAAKNLSDAILLSDILRVNTEITKAPLSASMIKRYDEHHQDLTLLKALVRQQLPEKYKEIFFDQSKNGYAGYIDGGASQEEFYKFIKPILEKMDGTEELLVKLNREDLLRKQRTFDNGSIPHQIHLGELHAILRRQEDFYPFLKDNREKIEKILTFRIPYYVGPLARGNSRFAWMTRKSEETITPWNFEEVVDKGASAQSFIERMTNFDKNLPNEKVLPKHSLLYEYFTVYNELTKVKYVTEGMRKPAFLSGEQKKAIVDLLFKTNRKVTVKQLKEDYFKKIECFDSVEISGVEDRFNASLGTYHDLLKIIKDKDFLDNEENEDILEDIVLTLTLFEDREMIEERLKTYAHLFDDKVMKQLKRRRYTGWGRLSRKLINGIRDKQSGKTILDFLKSDGFANRNFMQLIHDDSLTFKEDIQKAQVSGQGDSLHEHIANLAGSPAIKKGILQTVKVVDELVKVMGRHKPENIVIEMARENQTTQKGQKNSRERMKRIEEGIKELGSQILKEHPVENTQLQNEKLYLYYLQNGRDMYVDQELDINRLSDYDVDHIVPQSFLKDDSIDNKVLTRSDKARGKSDNVPSEEVVKKMKNYWRQLLNAKLITQRKFDNLTKAERGGLSELDKAGFIKRQLVETRQITKHVAQILDSRMNTKYDENDKLIREVKVITLKSKLVSDFRKDFQFYKVREINNYHHAHDAYLNAVVGTALIKKYPKLESEFVYGDYKVYDVRKMIAKSEQEIGKATAKYFFYSNIMNFFKTEITLANGEIRKRPLIETNGETGEIVWDKGRDFATVRKVLSMPQVNIVKKTEVQTGGFSKESILPKRNSDKLIARKKDWDPKKYGGFDSPTVAYSVLVVAKVEKGKSKKLKSVKELLGITIMERSSFEKNPIDFLEAKGYKEVKKDLIIKLPKYSLFELENGRKRMLASAGELQKGNELALPSKYVNFLYLASHYEKLKGSPEDNEQKQLFVEQHKHYLDEIIEQISEFSKRVILADANLDKVLSAYNKHRDKPIREQAENIIHLFTLTNLGAPAAFKYFDTTIDRKRYTSTKEVLDATLIHQSITGLYETRIDLSQLGGDGGGGGGSGGGGSGGGGSGGIPWLMKKPLQLTTLVPLQEYEERLLKQTMLTGSYKEKLQSLFLKYDALWQHWENQVGHRRIKPHHIATGTVNPRPQKQYPINPKAKASIQTVINDLLKQGVLIQQNSIMNTPVYPVPKPDGKWRMVLDYREVNKTIPLIAAQNQHSAGILSSIFRGKYKTTLDLSNGFWAHSITPESYWLTAFTWLGQQYCWTRLPQGFLNSPALFNADVVDLLKEVPNVQVYVDDIYISHDDPREHLEQLEKVFSLLLNAGYVVSLKKSEIAQHEVEFLGFNITKEGRGLTETFKQKLLNITPPRDLKQLQSILGKLNFARNFIPNFSELVKPLYNIIATAPGKYITWTTDNSQQLQNIISMLNSAENLEERNPEVRLIMKVNTSPSAGYIRFYNEFAKRPIMYLNYVYTKAEVKFTNTEKLLTTIHKGLIKALDLGMGQEILVYSPIVSMTKIQKTPLPERKALPIRWITWMSYLEDPRIQFHYDKTLPELQQVPTVTDDIIAKIKHPSEFSMVFYTDGSAIKHPNVNKSHNAGMGIAQVQFKPEFTVINTWSIPLGDHTAQLAEVAAVEFACKKALKIDGPVLIVTDSFYVAESVNKELPYWQSNGFFNNKKKPLKHVSKWKSIADCIQLKPDIIIIHEKGHQPTASTFHTEGNNLADKLATQGSYVVNAGKRTADGSEFEKRTADGSEFESPKKKAKVE

SEQ ID NO: 6140 - protein, 2098 aa, synthetic construct
MPAAKRVKLDGGDKKYSIGLDIGTNSVGWAVITDEYKVPSKKFKVLGNTDRHSIKKNLIGALLFDSGETAEATRLKRTARRRYTRRKNRICYLQEIFSNEMAKVDDSFFHRLEESFLVEEDKKHERHPIFGNIVDEVAYHEKYPTIYHLRKKLVDSTDKADLRLIYLALAHMIKFRGHFLIEGDLNPDNSDVDKLFIQLVQTYNQLFEENPINASGVDAKAILSARLSKSRRLENLIAQLPGEKKNGLFGNLIALSLGLTPNFKSNFDLAEDAKLQLSKDTYDDDLDNLLAQIGDQYADLFLAAKNLSDAILLSDILRVNTEITKAPLSASMIKRYDEHHQDLTLLKALVRQQLPEKYKEIFFDQSKNGYAGYIDGGASQEEFYKFIKPILEKMDGTEELLVKLNREDLLRKQRTFDNGSIPHQIHLGELHAILRRQEDFYPFLKDNREKIEKILTFRIPYYVGPLARGNSRFAWMTRKSEETITPWNFEEVVDKGASAQSFIERMTNFDKNLPNEKVLPKHSLLYEYFTVYNELTKVKYVTEGMRKPAFLSGEQKKAIVDLLFKTNRKVTVKQLKEDYFKKIECFDSVEISGVEDRFNASLGTYHDLLKIIKDKDFLDNEENEDILEDIVLTLTLFEDREMIEERLKTYAHLFDDKVMKQLKRRRYTGWGRLSRKLINGIRDKQSGKTILDFLKSDGFANRNFMQLIHDDSLTFKEDIQKAQVSGQGDSLHEHIANLAGSPAIKKGILQTVKVVDELVKVMGRHKPENIVIEMARENQTTQKGQKNSRERMKRIEEGIKELGSQILKEHPVENTQLQNEKLYLYYLQNGRDMYVDQELDINRLSDYDVDHIVPQSFLKDDSIDNKVLTRSDKARGKSDNVPSEEVVKKMKNYWRQLLNAKLITQRKFDNLTKAERGGLSELDKAGFIKRQLVETRQITKHVAQILDSRMNTKYDENDKLIREVKVITLKSKLVSDFRKDFQFYKVREINNYHHAHDAYLNAVVGTALIKKYPKLESEFVYGDYKVYDVRKMIAKSEQEIGKATAKYFFYSNIMNFFKTEITLANGEIRKRPLIETNGETGEIVWDKGRDFATVRKVLSMPQVNIVKKTEVQTGGFSKESILPKRNSDKLIARKKDWDPKKYGGFDSPTVAYSVLVVAKVEKGKSKKLKSVKELLGITIMERSSFEKNPIDFLEAKGYKEVKKDLIIKLPKYSLFELENGRKRMLASAGELQKGNELALPSKYVNFLYLASHYEKLKGSPEDNEQKQLFVEQHKHYLDEIIEQISEFSKRVILADANLDKVLSAYNKHRDKPIREQAENIIHLFTLTNLGAPAAFKYFDTTIDRKRYTSTKEVLDATLIHQSITGLYETRIDLSQLGGDGGGGGGSGGGGSGGGGSGGVLNLEEEYRLHEKPVPSSIDPSWLQLFPTVWAERAGMGLANQVPPVVVELRSGASPVAVRQYPMSKEAREGIRPHIQRFLDLGVLVPCQSPWNTPLLPVKKPGTNDYRPVQDLREINKRVQDIHPTVPNPYNLLSSLPPSHTWYSVLDLKDAFFCLKLHPNSQPLFAFEWRDPEKGNTGQLTWTRLPQGFKNSPTLFNEALHRDLAPFRALNPQVVLLQYVDDLLVAAPTYRDCKEGTQKLLQELSKLGYRVSAKKAQLCQKEVTYLGYLLKEGKRWLTPARKATVMKIPPPTTPRQVREFLGTAGFCRLWIPGFASLAAPLYPLTKPSIPFIWTEEHQKAFDRIKEALLSAPALALPDLTKPFTLYVDERAGVARGVLTQTLGPWRRPVAYLSKKLDPVASGWPTCLKAVAAVALLLKDADKLTLGQNVTVIASHSLESIVRQPPDRWMTNARMTHYQSLLLNERVSFAPPAVLNPATLLPVESEATPVHRCSEILAEETGTRRDLKDQPLPGVPAWYTDGSSFIAEGKRRAGAAIVDGKRTVWASSLPEGTSAQKAELVALTQALRLAEGKDINIYTDSRYAFATAHIHGAIYKQRGWLTSAGKDIKNKEEILALLEAIHLPKRVAIIHCPGHQKGNDPVATGNRRADEAAKQAALSTRVLAETTKPAGKRTADGSEFEKRTADGSEFESPKKKAKVE

SEQ ID NO: 6141 - protein, 2098 aa, synthetic construct
MPAAKRVKLDGGDKKYSIGLDIGTNSVGWAVITDEYKVPSKKFKVLGNTDRHSIKKNLIGALLFDSGETAEATRLKRTARRRYTRRKNRICYLQEIFSNEMAKVDDSFFHRLEESFLVEEDKKHERHPIFGNIVDEVAYHEKYPTIYHLRKKLVDSTDKADLRLIYLALAHMIKFRGHFLIEGDLNPDNSDVDKLFIQLVQTYNQLFEENPINASGVDAKAILSARLSKSRRLENLIAQLPGEKKNGLFGNLIALSLGLTPNFKSNFDLAEDAKLQLSKDTYDDDLDNLLAQIGDQYADLFLAAKNLSDAILLSDILRVNTEITKAPLSASMIKRYDEHHQDLTLLKALVRQQLPEKYKEIFFDQSKNGYAGYIDGGASQEEFYKFIKPILEKMDGTEELLVKLNREDLLRKQRTFDNGSIPHQIHLGELHAILRRQEDFYPFLKDNREKIEKILTFRIPYYVGPLARGNSRFAWMTRKSEETITPWNFEEVVDKGASAQSFIERMTNFDKNLPNEKVLPKHSLLYEYFTVYNELTKVKYVTEGMRKPAFLSGEQKKAIVDLLFKTNRKVTVKQLKEDYFKKIECFDSVEISGVEDRFNASLGTYHDLLKIIKDKDFLDNEENEDILEDIVLTLTLFEDREMIEERLKTYAHLFDDKVMKQLKRRRYTGWGRLSRKLINGIRDKQSGKTILDFLKSDGFANRNFMQLIHDDSLTFKEDIQKAQVSGQGDSLHEHIANLAGSPAIKKGILQTVKVVDELVKVMGRHKPENIVIEMARENQTTQKGQKNSRERMKRIEEGIKELGSQILKEHPVENTQLQNEKLYLYYLQNGRDMYVDQELDINRLSDYDVDHIVPQSFLKDDSIDNKVLTRSDKARGKSDNVPSEEVVKKMKNYWRQLLNAKLITQRKFDNLTKAERGGLSELDKAGFIKRQLVETRQITKHVAQILDSRMNTKYDENDKLIREVKVITLKSKLVSDFRKDFQFYKVREINNYHHAHDAYLNAVVGTALIKKYPKLESEFVYGDYKVYDVRKMIAKSEQEIGKATAKYFFYSNIMNFFKTEITLANGEIRKRPLIETNGETGEIVWDKGRDFATVRKVLSMPQVNIVKKTEVQTGGFSKESILPKRNSDKLIARKKDWDPKKYGGFDSPTVAYSVLVVAKVEKGKSKKLKSVKELLGITIMERSSFEKNPIDFLEAKGYKEVKKDLIIKLPKYSLFELENGRKRMLASAGELQKGNELALPSKYVNFLYLASHYEKLKGSPEDNEQKQLFVEQHKHYLDEIIEQISEFSKRVILADANLDKVLSAYNKHRDKPIREQAENIIHLFTLTNLGAPAAFKYFDTTIDRKRYTSTKEVLDATLIHQSITGLYETRIDLSQLGGDGGGGGGSGGGGSGGGGSGGVLNLEEEYRLHEKPVPSSIDPSWLQLFPTVWAERAGMGLANQVPPVVVELRSGASPVAVRQYPMSKEAREGIRPHIQRFLDLGVLVPCQSPWNTPLLPVKKPGTNDYRPVQDLREINKRVQDIHPTVPNPYNLLSSLPPSHTWYSVLDLKDAFFCLKLHPNSQPLFAFEWRDPEKGNTGQLTWTRLPQGFKNSPTLFNEALHRDLAPFRALNPQVVLLQYVDDLLVAAPTYRDCKEGTQKLLQELSKLGYRVSAKKAQLCQKEVTYLGYLLKEGKRWLTPARKATVMKIPPPTTPRQVREFLGKAGFCRLFIPGFASLAAPLYPLTKPSIPFIWTEEHQKAFDRIKEALLSAPALALPDLTKPFTLYVDERAGVARGVLTQTLGPWRRPVAYLSKKLDPVASGWPTCLKAVAAVALLLKDADKLTLGQNVTVIASHSLESIVRQPPDRWMTNARMTHYQSLLLNERVSFAPPAVLNPATLLPVESEATPVHRCSEILAEETGTRRDLKDQPLPGVPAWYTDGSSFIAEGKRRAGAAIVDGKRTVWASSLPEGTSAQKAELVALTQALRLAEGKDINIYTDSRYAFATAHIHGAIYKQRGWLTSAGKDIKNKEEILALLEAIHLPKRVAIIHCPGHQKGNDPVATGNRRADEAAKQAALSTRVLAETTKPAGKRTADGSEFEKRTADGSEFESPKKKAKVE

SEQ ID NO: 6142 - protein, 2100 aa, synthetic construct
MPAAKRVKLDGGDKKYSIGLDIGTNSVGWAVITDEYKVPSKKFKVLGNTDRHSIKKNLIGALLFDSGETAEATRLKRTARRRYTRRKNRICYLQEIFSNEMAKVDDSFFHRLEESFLVEEDKKHERHPIFGNIVDEVAYHEKYPTIYHLRKKLVDSTDKADLRLIYLALAHMIKFRGHFLIEGDLNPDNSDVDKLFIQLVQTYNQLFEENPINASGVDAKAILSARLSKSRRLENLIAQLPGEKKNGLFGNLIALSLGLTPNFKSNFDLAEDAKLQLSKDTYDDDLDNLLAQIGDQYADLFLAAKNLSDAILLSDILRVNTEITKAPLSASMIKRYDEHHQDLTLLKALVRQQLPEKYKEIFFDQSKNGYAGYIDGGASQEEFYKFIKPILEKMDGTEELLVKLNREDLLRKQRTFDNGSIPHQIHLGELHAILRRQEDFYPFLKDNREKIEKILTFRIPYYVGPLARGNSRFAWMTRKSEETITPWNFEEVVDKGASAQSFIERMTNFDKNLPNEKVLPKHSLLYEYFTVYNELTKVKYVTEGMRKPAFLSGEQKKAIVDLLFKTNRKVTVKQLKEDYFKKIECFDSVEISGVEDRFNASLGTYHDLLKIIKDKDFLDNEENEDILEDIVLTLTLFEDREMIEERLKTYAHLFDDKVMKQLKRRRYTGWGRLSRKLINGIRDKQSGKTILDFLKSDGFANRNFMQLIHDDSLTFKEDIQKAQVSGQGDSLHEHIANLAGSPAIKKGILQTVKVVDELVKVMGRHKPENIVIEMARENQTTQKGQKNSRERMKRIEEGIKELGSQILKEHPVENTQLQNEKLYLYYLQNGRDMYVDQELDINRLSDYDVDHIVPQSFLKDDSIDNKVLTRSDKARGKSDNVPSEEVVKKMKNYWRQLLNAKLITQRKFDNLTKAERGGLSELDKAGFIKRQLVETRQITKHVAQILDSRMNTKYDENDKLIREVKVITLKSKLVSDFRKDFQFYKVREINNYHHAHDAYLNAVVGTALIKKYPKLESEFVYGDYKVYDVRKMIAKSEQEIGKATAKYFFYSNIMNFFKTEITLANGEIRKRPLIETNGETGEIVWDKGRDFATVRKVLSMPQVNIVKKTEVQTGGFSKESILPKRNSDKLIARKKDWDPKKYGGFDSPTVAYSVLVVAKVEKGKSKKLKSVKELLGITIMERSSFEKNPIDFLEAKGYKEVKKDLIIKLPKYSLFELENGRKRMLASAGELQKGNELALPSKYVNFLYLASHYEKLKGSPEDNEQKQLFVEQHKHYLDEIIEQISEFSKRVILADANLDKVLSAYNKHRDKPIREQAENIIHLFTLTNLGAPAAFKYFDTTIDRKRYTSTKEVLDATLIHQSITGLYETRIDLSQLGGDGGGGGGSGGGGSGGGGSGGTLNIEDEYRLHETSKEPDVPLGSTWLSDFPQAWAETGGMGLAVRQAPLIIPLKATSTPVSIKQYPMSQEARLGIKPHIQRLLDQGILVPCQSPWNTPLLPVKKPGTNDYRPVQDLREVNKRVEDIHPTVPNPYNLLSGLPPSHQWYTVLDLKDAFFCLRLHPTSQPLFAFEWRDPEMGISGQLTWTRLPQGFKNSPTLFNEALHRDLADFRIQHPDLILLQYVDDLLLAATSEQDCQRGTRALLQTLGNLGYRASAKKAQICQKQVKYLGYLLKEGQRWLTEARKETVMGQPTPKTPRQLREFLGTAGFCRLWIPGFAEMAAPLYPLTKPGTLFNWGPDQQKAYQEIKQALLTAPALGLPDLTKPFELFVDEKQGYAKGVLTQKLGPWRRPVAYLSKKLDPVAAGWPPCLRMVAAIAVLTKDAGKLTMGQPLVILAPHAVEALVKQPPDRWLSNARMTHYQAMLLDTDRVQFGPVVALNPATLLPLPEKEAPHDCLEILAETHGTRPDLTDQPIPDADYTWYTDGSSFLQEGQRRAGAAVTTETEVIWARALPAGTSAQRAELIALTQALKMAEGKKLNVYTDSRYAFATAHVHGEIYRRRGWLTSEGREIKNKNEILALLKALFLPKRLSIIHCPGHQKGNSAEARGNRMADQAAREAAMKAVLETSTLLAGKRTADGSEFEKRTADGSEFESPKKKAKVE

SEQ ID NO: 6143 - protein, 2107 aa, synthetic construct
MPAAKRVKLDGGDKKYSIGLDIGTNSVGWAVITDEYKVPSKKFKVLGNTDRHSIKKNLIGALLFDSGETAEATRLKRTARRRYTRRKNRICYLQEIFSNEMAKVDDSFFHRLEESFLVEEDKKHERHPIFGNIVDEVAYHEKYPTIYHLRKKLVDSTDKADLRLIYLALAHMIKFRGHFLIEGDLNPDNSDVDKLFIQLVQTYNQLFEENPINASGVDAKAILSARLSKSRRLENLIAQLPGEKKNGLFGNLIALSLGLTPNFKSNFDLAEDAKLQLSKDTYDDDLDNLLAQIGDQYADLFLAAKNLSDAILLSDILRVNTEITKAPLSASMIKRYDEHHQDLTLLKALVRQQLPEKYKEIFFDQSKNGYAGYIDGGASQEEFYKFIKPILEKMDGTEELLVKLNREDLLRKQRTFDNGSIPHQIHLGELHAILRRQEDFYPFLKDNREKIEKILTFRIPYYVGPLARGNSRFAWMTRKSEETITPWNFEEVVDKGASAQSFIERMTNFDKNLPNEKVLPKHSLLYEYFTVYNELTKVKYVTEGMRKPAFLSGEQKKAIVDLLFKTNRKVTVKQLKEDYFKKIECFDSVEISGVEDRFNASLGTYHDLLKIIKDKDFLDNEENEDILEDIVLTLTLFEDREMIEERLKTYAHLFDDKVMKQLKRRRYTGWGRLSRKLINGIRDKQSGKTILDFLKSDGFANRNFMQLIHDDSLTFKEDIQKAQVSGQGDSLHEHIANLAGSPAIKKGILQTVKVVDELVKVMGRHKPENIVIEMARENQTTQKGQKNSRERMKRIEEGIKELGSQILKEHPVENTQLQNEKLYLYYLQNGRDMYVDQELDINRLSDYDVDHIVPQSFLKDDSIDNKVLTRSDKARGKSDNVPSEEVVKKMKNYWRQLLNAKLITQRKFDNLTKAERGGLSELDKAGFIKRQLVETRQITKHVAQILDSRMNTKYDENDKLIREVKVITLKSKLVSDFRKDFQFYKVREINNYHHAHDAYLNAVVGTALIKKYPKLESEFVYGDYKVYDVRKMIAKSEQEIGKATAKYFFYSNIMNFFKTEITLANGEIRKRPLIETNGETGEIVWDKGRDFATVRKVLSMPQVNIVKKTEVQTGGFSKESILPKRNSDKLIARKKDWDPKKYGGFDSPTVAYSVLVVAKVEKGKSKKLKSVKELLGITIMERSSFEKNPIDFLEAKGYKEVKKDLIIKLPKYSLFELENGRKRMLASAGELQKGNELALPSKYVNFLYLASHYEKLKGSPEDNEQKQLFVEQHKHYLDEIIEQISEFSKRVILADANLDKVLSAYNKHRDKPIREQAENIIHLFTLTNLGAPAAFKYFDTTIDRKRYTSTKEVLDATLIHQSITGLYETRIDLSQLGGDGGGGGGSGGGGSGGGGSGGGGSGGTAPLEEEYRLFLEAPIQNVTLLEQWKREIPKVWAEINPPGLASTQAPIHVQLLSTALPVRVRQYPITLEAKRSLRETIRKFRAAGILRPVHSPWNTPLLPVRKSGTSEYRMVQDLREVNKRVETIHPTVPNPYTLLSLLPPDRIWYSVLDLKDAFFCIPLAPESQLIFAFEWADAEEGESGQLTWTRLPQGFKNSPTLFDEALNRDLQGFRLDHPSVSLLQYVDDLLIAADTQAACLSATRDLLMTLAELGYRVSGKKAQLCQEEVTYLGFKIHKGSRSLSNSRTQAILQIPVPKTKRQVREFLGTIGYCRLWIPGFAELAQPLYAATRGGNDPLVWGEKEEEAFQSLKLALTQPPALALPSLDKPFQLFVEETSGAAKGVLTQALGPWKRPVAYLSKRLDPVAAGWPRCLRAIAAAALLTREASKLTFGQDIEITSSHNLESLLRSPPDKWLTNARITQYQVLLLDPPRVRFKQTAALNPATLLPETDDTLPIHHCLDTLDSLTSTRPDLTDQPLAQAEATLFTDGSSYIRDGKRYAGAAVVTLDSVIWAEPLPIGTSAQKAELIALTKALEWSKDKSVNIYTDSRYAFATLHVHGMIYRERGLLTAGGKAIKNAPEILALLTAVWLPKRVAVMHCKGHQKDDAPTSTGNRRADEVAREVAIRPLSTQATISAGKRTADGSEFEKRTADGSEFESPKKKAKVE

SEQ ID NO: 6144 - protein, 2107 aa, synthetic construct
MPAAKRVKLDGGDKKYSIGLDIGTNSVGWAVITDEYKVPSKKFKVLGNTDRHSIKKNLIGALLFDSGETAEATRLKRTARRRYTRRKNRICYLQEIFSNEMAKVDDSFFHRLEESFLVEEDKKHERHPIFGNIVDEVAYHEKYPTIYHLRKKLVDSTDKADLRLIYLALAHMIKFRGHFLIEGDLNPDNSDVDKLFIQLVQTYNQLFEENPINASGVDAKAILSARLSKSRRLENLIAQLPGEKKNGLFGNLIALSLGLTPNFKSNFDLAEDAKLQLSKDTYDDDLDNLLAQIGDQYADLFLAAKNLSDAILLSDILRVNTEITKAPLSASMIKRYDEHHQDLTLLKALVRQQLPEKYKEIFFDQSKNGYAGYIDGGASQEEFYKFIKPILEKMDGTEELLVKLNREDLLRKQRTFDNGSIPHQIHLGELHAILRRQEDFYPFLKDNREKIEKILTFRIPYYVGPLARGNSRFAWMTRKSEETITPWNFEEVVDKGASAQSFIERMTNFDKNLPNEKVLPKHSLLYEYFTVYNELTKVKYVTEGMRKPAFLSGEQKKAIVDLLFKTNRKVTVKQLKEDYFKKIECFDSVEISGVEDRFNASLGTYHDLLKIIKDKDFLDNEENEDILEDIVLTLTLFEDREMIEERLKTYAHLFDDKVMKQLKRRRYTGWGRLSRKLINGIRDKQSGKTILDFLKSDGFANRNFMQLIHDDSLTFKEDIQKAQVSGQGDSLHEHIANLAGSPAIKKGILQTVKVVDELVKVMGRHKPENIVIEMARENQTTQKGQKNSRERMKRIEEGIKELGSQILKEHPVENTQLQNEKLYLYYLQNGRDMYVDQELDINRLSDYDVDHIVPQSFLKDDSIDNKVLTRSDKARGKSDNVPSEEVVKKMKNYWRQLLNAKLITQRKFDNLTKAERGGLSELDKAGFIKRQLVETRQITKHVAQILDSRMNTKYDENDKLIREVKVITLKSKLVSDFRKDFQFYKVREINNYHHAHDAYLNAVVGTALIKKYPKLESEFVYGDYKVYDVRKMIAKSEQEIGKATAKYFFYSNIMNFFKTEITLANGEIRKRPLIETNGETGEIVWDKGRDFATVRKVLSMPQVNIVKKTEVQTGGFSKESILPKRNSDKLIARKKDWDPKKYGGFDSPTVAYSVLVVAKVEKGKSKKLKSVKELLGITIMERSSFEKNPIDFLEAKGYKEVKKDLIIKLPKYSLFELENGRKRMLASAGELQKGNELALPSKYVNFLYLASHYEKLKGSPEDNEQKQLFVEQHKHYLDEIIEQISEFSKRVILADANLDKVLSAYNKHRDKPIREQAENIIHLFTLTNLGAPAAFKYFDTTIDRKRYTSTKEVLDATLIHQSITGLYETRIDLSQLGGDGGGGGGSGGGGSGGGGSGGGGSGGTAPLEEEYRLFLEAPIQNVTLLEQWKREIPKVWAEINPPGLASTQAPIHVQLLSTALPVRVRQYPITLEAKRSLRETIRKFRAAGILRPVHSPWNTPLLPVRKSGTSEYRMVQDLREVNKRVETIHPTVPNPYTLLSLLPPDRIWYSVLDLKDAFFCIPLAPESQLIFAFEWADAEEGESGQLTWTRLPQGFKNSPTLFNEALNRDLQGFRLDHPSVSLLQYVDDLLIAADTQAACLSATRDLLMTLAELGYRVSGKKAQLCQEEVTYLGFKIHKGSRSLSNSRTQAILQIPVPKTKRQVREFLGTIGYCRLWIPGFAELAQPLYAATRPGNDPLVWGEKEEEAFQSLKLALTQPPALALPSLDKPFQLFVEETSGAAKGVLTQALGPWKRPVAYLSKRLDPVAAGWPRCLRAIAAAALLTREASKLTFGQDIEITSSHNLESLLRSPPDKWLTNARITQYQVLLLDPPRVRFKQTAALNPATLLPETDDTLPIHHCLDTLDSLTSTRPDLTDQPLAQAEATLFTDGSSYIRDGKRYAGAAVVTLDSVIWAEPLPIGTSAQKAELIALTKALEWSKDKSVNIYTDSRYAFATLHVHGMIYRERGWLTAGGKAIKNAPEILALLTAVWLPKRVAVMHCKGHQKDDAPTSTGNRRADEVAREVAIRPLSTQATISAGKRTADGSEFEKRTADGSEFESPKKKAKVE

SEQ ID NO: 6145 - protein, 2096 aa, synthetic construct
MPAAKRVKLDGGDKKYSIGLDIGTNSVGWAVITDEYKVPSKKFKVLGNTDRHSIKKNLIGALLFDSGETAEATRLKRTARRRYTRRKNRICYLQEIFSNEMAKVDDSFFHRLEESFLVEEDKKHERHPIFGNIVDEVAYHEKYPTIYHLRKKLVDSTDKADLRLIYLALAHMIKFRGHFLIEGDLNPDNSDVDKLFIQLVQTYNQLFEENPINASGVDAKAILSARLSKSRRLENLIAQLPGEKKNGLFGNLIALSLGLTPNFKSNFDLAEDAKLQLSKDTYDDDLDNLLAQIGDQYADLFLAAKNLSDAILLSDILRVNTEITKAPLSASMIKRYDEHHQDLTLLKALVRQQLPEKYKEIFFDQSKNGYAGYIDGGASQEEFYKFIKPILEKMDGTEELLVKLNREDLLRKQRTFDNGSIPHQIHLGELHAILRRQEDFYPFLKDNREKIEKILTFRIPYYVGPLARGNSRFAWMTRKSEETITPWNFEEVVDKGASAQSFIERMTNFDKNLPNEKVLPKHSLLYEYFTVYNELTKVKYVTEGMRKPAFLSGEQKKAIVDLLFKTNRKVTVKQLKEDYFKKIECFDSVEISGVEDRFNASLGTYHDLLKIIKDKDFLDNEENEDILEDIVLTLTLFEDREMIEERLKTYAHLFDDKVMKQLKRRRYTGWGRLSRKLINGIRDKQSGKTILDFLKSDGFANRNFMQLIHDDSLTFKEDIQKAQVSGQGDSLHEHIANLAGSPAIKKGILQTVKVVDELVKVMGRHKPENIVIEMARENQTTQKGQKNSRERMKRIEEGIKELGSQILKEHPVENTQLQNEKLYLYYLQNGRDMYVDQELDINRLSDYDVDHIVPQSFLKDDSIDNKVLTRSDKARGKSDNVPSEEVVKKMKNYWRQLLNAKLITQRKFDNLTKAERGGLSELDKAGFIKRQLVETRQITKHVAQILDSRMNTKYDENDKLIREVKVITLKSKLVSDFRKDFQFYKVREINNYHHAHDAYLNAVVGTALIKKYPKLESEFVYGDYKVYDVRKMIAKSEQEIGKATAKYFFYSNIMNFFKTEITLANGEIRKRPLIETNGETGEIVWDKGRDFATVRKVLSMPQVNIVKKTEVQTGGFSKESILPKRNSDKLIARKKDWDPKKYGGFDSPTVAYSVLVVAKVEKGKSKKLKSVKELLGITIMERSSFEKNPIDFLEAKGYKEVKKDLIIKLPKYSLFELENGRKRMLASAGELQKGNELALPSKYVNFLYLASHYEKLKGSPEDNEQKQLFVEQHKHYLDEIIEQISEFSKRVILADANLDKVLSAYNKHRDKPIREQAENIIHLFTLTNLGAPAAFKYFDTTIDRKRYTSTKEVLDATLIHQSITGLYETRIDLSQLGGDGGGGGGSGGGGSGGGGSGGGGSGGVPWILKKPLELTIKLDLEEQQGTLLNNSILSKKGKEELKQLFEKYSALWQSWENQVGHRRIRPHKIATGTVKPTPQKQYHINPKAKPDIQIVINDLLKQGVLIQKESTMNTPVYPVPKPNGRWRMVLDYRAVNKVTPLIAVQNQHSYGILGSLFKGRYKTTIDLSNGFWAHPIVPEDYWITAFTWQGKQYCWTVLPQGFLNSPGLFNGDVVDLLQGIPNVEVYVDDVYISHDSEKEHLEYLDILFNRLKEAGYIISLKKSNIANSIVDFLGFQITNEGRGLTDTFKEKLENITAPTTLKQLQSILGLLNFARNFIPDFTELIAPLYALIPKSPKNYVPWQIEHSTTLETLITKLNGAEYLQGRKGDKTLIMKVNASYTTGYIRYYNEGEKKPISYVSIVFSKTELKFTELEKLLTTVHKGLLKALDLSMGQNIHVYSPIVSMQNIQKTPQTAKKALASRWLSWLSYLEDPRIRFFYDPQMPALKDLPAVDTGKDNKKHPSNFQHIFYTDGSAITSPTKEGHLNAGMGIVYFINKDGNLQKQQEWSISLGNHTAQFAEIAAFEFALKKCLPLGGNILVVTDSNYVAKAYNEELDVWASNGFVNNRKKPLKHISKWKSVADLKRLRPDVVVTHEPGHQKLDSSPHAYGNNLADQLATQASFKVHAGKRTADGSEFEKRTADGSEFESPKKKAKVE

SEQ ID NO: 6146 - protein, 2104 aa, synthetic construct
MPAAKRVKLDGGDKKYSIGLDIGTNSVGWAVITDEYKVPSKKFKVLGNTDRHSIKKNLIGALLFDSGETAEATRLKRTARRRYTRRKNRICYLQEIFSNEMAKVDDSFFHRLEESFLVEEDKKHERHPIFGNIVDEVAYHEKYPTIYHLRKKLVDSTDKADLRLIYLALAHMIKFRGHFLIEGDLNPDNSDVDKLFIQLVQTYNQLFEENPINASGVDAKAILSARLSKSRRLENLIAQLPGEKKNGLFGNLIALSLGLTPNFKSNFDLAEDAKLQLSKDTYDDDLDNLLAQIGDQYADLFLAAKNLSDAILLSDILRVNTEITKAPLSASMIKRYDEHHQDLTLLKALVRQQLPEKYKEIFFDQSKNGYAGYIDGGASQEEFYKFIKPILEKMDGTEELLVKLNREDLLRKQRTFDNGSIPHQIHLGELHAILRRQEDFYPFLKDNREKIEKILTFRIPYYVGPLARGNSRFAWMTRKSEETITPWNFEEVVDKGASAQSFIERMTNFDKNLPNEKVLPKHSLLYEYFTVYNELTKVKYVTEGMRKPAFLSGEQKKAIVDLLFKTNRKVTVKQLKEDYFKKIECFDSVEISGVEDRFNASLGTYHDLLKIIKDKDFLDNEENEDILEDIVLTLTLFEDREMIEERLKTYAHLFDDKVMKQLKRRRYTGWGRLSRKLINGIRDKQSGKTILDFLKSDGFANRNFMQLIHDDSLTFKEDIQKAQVSGQGDSLHEHIANLAGSPAIKKGILQTVKVVDELVKVMGRHKPENIVIEMARENQTTQKGQKNSRERMKRIEEGIKELGSQILKEHPVENTQLQNEKLYLYYLQNGRDMYVDQELDINRLSDYDVDHIVPQSFLKDDSIDNKVLTRSDKARGKSDNVPSEEVVKKMKNYWRQLLNAKLITQRKFDNLTKAERGGLSELDKAGFIKRQLVETRQITKHVAQILDSRMNTKYDENDKLIREVKVITLKSKLVSDFRKDFQFYKVREINNYHHAHDAYLNAVVGTALIKKYPKLESEFVYGDYKVYDVRKMIAKSEQEIGKATAKYFFYSNIMNFFKTEITLANGEIRKRPLIETNGETGEIVWDKGRDFATVRKVLSMPQVNIVKKTEVQTGGFSKESILPKRNSDKLIARKKDWDPKKYGGFDSPTVAYSVLVVAKVEKGKSKKLKSVKELLGITIMERSSFEKNPIDFLEAKGYKEVKKDLIIKLPKYSLFELENGRKRMLASAGELQKGNELALPSKYVNFLYLASHYEKLKGSPEDNEQKQLFVEQHKHYLDEIIEQISEFSKRVILADANLDKVLSAYNKHRDKPIREQAENIIHLFTLTNLGAPAAFKYFDTTIDRKRYTSTKEVLDATLIHQSITGLYETRIDLSQLGGDGGGGGGSGGGGSGGGGSGGGGSGGTLQLEEEYRLFEPESTQKQEMDIWLKNFPQAWAETGGMGTAHCQAPVLIQLKATATPISIRQYPMPHEAYQGIKPHIRRMLDQGILKPCQSPWNTPLLPVKKPGTEDYRPVQDLREVNKRVEDIHPTVPNPYNLLSTLPPSHPWYTVLDLKDAFFCLRLHSESQLLFAFEWRDPEIGLSGQLTWTRLPQGFKNSPTLFDEALHSDLADFRVRYPALVLLQYVDDLLLAAATRTECLEGTKALLETLGNKGYRASAKKAQICLQEVTYLGYSLKDGQRWLTKARKEAILSIPVPKNSRQVREFLGTAGYCRLWIPGFAELAAPLYPLTRPGTLFQWGTEQQLAFEDIKKALLSSPALGLPDITKPFELFIDENSGFAKGVLVQKLGPWKRPVAYLSKKLDTVASGWPPCLRMVAAIAILVKDAGKLTLGQPLTILTSHPVEALVRQPPNKWLSNARMTHYQAMLLDAERVHFGPTVSLNPATLLPLPSGGNHHDCLQILAETHGTRPDLTDQPLPDADLTWYTDGSSFIRNGEREAGAAVTTESEVIWAAPLPPGTSAQRAELIALTQALKMAEGKKLTVYTDSRYAFATTHVHGEIYRRRGLLTSEGKEIKNKNEILALLEALFLPKRLSIIHCPGHQKGDSPQAKGNRLADDTAKKAATETHSSLTVLPAGKRTADGSEFEKRTADGSEFESPKKKAKVE

SEQ ID NO: 6147 - protein, 2104 aa, synthetic construct
MPAAKRVKLDGGDKKYSIGLDIGTNSVGWAVITDEYKVPSKKFKVLGNTDRHSIKKNLIGALLFDSGETAEATRLKRTARRRYTRRKNRICYLQEIFSNEMAKVDDSFFHRLEESFLVEEDKKHERHPIFGNIVDEVAYHEKYPTIYHLRKKLVDSTDKADLRLIYLALAHMIKFRGHFLIEGDLNPDNSDVDKLFIQLVQTYNQLFEENPINASGVDAKAILSARLSKSRRLENLIAQLPGEKKNGLFGNLIALSLGLTPNFKSNFDLAEDAKLQLSKDTYDDDLDNLLAQIGDQYADLFLAAKNLSDAILLSDILRVNTEITKAPLSASMIKRYDEHHQDLTLLKALVRQQLPEKYKEIFFDQSKNGYAGYIDGGASQEEFYKFIKPILEKMDGTEELLVKLNREDLLRKQRTFDNGSIPHQIHLGELHAILRRQEDFYPFLKDNREKIEKILTFRIPYYVGPLARGNSRFAWMTRKSEETITPWNFEEVVDKGASAQSFIERMTNFDKNLPNEKVLPKHSLLYEYFTVYNELTKVKYVTEGMRKPAFLSGEQKKAIVDLLFKTNRKVTVKQLKEDYFKKIECFDSVEISGVEDRFNASLGTYHDLLKIIKDKDFLDNEENEDILEDIVLTLTLFEDREMIEERLKTYAHLFDDKVMKQLKRRRYTGWGRLSRKLINGIRDKQSGKTILDFLKSDGFANRNFMQLIHDDSLTFKEDIQKAQVSGQGDSLHEHIANLAGSPAIKKGILQTVKVVDELVKVMGRHKPENIVIEMARENQTTQKGQKNSRERMKRIEEGIKELGSQILKEHPVENTQLQNEKLYLYYLQNGRDMYVDQELDINRLSDYDVDHIVPQSFLKDDSIDNKVLTRSDKARGKSDNVPSEEVVKKMKNYWRQLLNAKLITQRKFDNLTKAERGGLSELDKAGFIKRQLVETRQITKHVAQILDSRMNTKYDENDKLIREVKVITLKSKLVSDFRKDFQFYKVREINNYHHAHDAYLNAVVGTALIKKYPKLESEFVYGDYKVYDVRKMIAKSEQEIGKATAKYFFYSNIMNFFKTEITLANGEIRKRPLIETNGETGEIVWDKGRDFATVRKVLSMPQVNIVKKTEVQTGGFSKESILPKRNSDKLIARKKDWDPKKYGGFDSPTVAYSVLVVAKVEKGKSKKLKSVKELLGITIMERSSFEKNPIDFLEAKGYKEVKKDLIIKLPKYSLFELENGRKRMLASAGELQKGNELALPSKYVNFLYLASHYEKLKGSPEDNEQKQLFVEQHKHYLDEIIEQISEFSKRVILADANLDKVLSAYNKHRDKPIREQAENIIHLFTLTNLGAPAAFKYFDTTIDRKRYTSTKEVLDATLIHQSITGLYETRIDLSQLGGDGGGGGGSGGGGSGGGGSGGGGSGGTLQLEEEYRLFEPESTQKQEMDIWLKNFPQAWAETGGMGTAHCQAPVLIQLKATATPISIRQYPMPHEAYQGIKPHIRRMLDQGILKPCQSPWNTPLLPVKKPGTEDYRPVQDLREVNKRVEDIHPTVPNPYNLLSTLPPSHPWYTVLDLKDAFFCLRLHSESQLLFAFEWRDPEIGLSGQLTWTRLPQGFKNSPTLFNEALHSDLADFRVRYPALVLLQYVDDLLLAAATRTECLEGTKALLETLGNKGYRASAKKAQICLQEVTYLGYSLKDGQRWLTKARKEAILSIPVPKNSRQVREFLGTAGYCRLWIPGFAELAAPLYPLTRPGTLFQWGTEQQLAFEDIKKALLSSPALGLPDITKPFELFIDENSGFAKGVLVQKLGPWKRPVAYLSKKLDTVASGWPPCLRMVAAIAILVKDAGKLTLGQPLTILTSHPVEALVRQPPNKWLSNARMTHYQAMLLDAERVHFGPTVSLNPATLLPLPSGGNHHDCLQILAETHGTRPDLTDQPLPDADLTWYTDGSSFIRNGEREAGAAVTTESEVIWAAPLPPGTSAQRAELIALTQALKMAEGKKLTVYTDSRYAFATTHVHGEIYRRRGWLTSEGKEIKNKNEILALLEALFLPKRLSIIHCPGHQKGDSPQAKGNRLADDTAKKAATETHSSLTVLPAGKRTADGSEFEKRTADGSEFESPKKKAKVE

SEQ ID NO: 6148 - protein, 2104 aa, synthetic construct
MPAAKRVKLDGGDKKYSIGLDIGTNSVGWAVITDEYKVPSKKFKVLGNTDRHSIKKNLIGALLFDSGETAEATRLKRTARRRYTRRKNRICYLQEIFSNEMAKVDDSFFHRLEESFLVEEDKKHERHPIFGNIVDEVAYHEKYPTIYHLRKKLVDSTDKADLRLIYLALAHMIKFRGHFLIEGDLNPDNSDVDKLFIQLVQTYNQLFEENPINASGVDAKAILSARLSKSRRLENLIAQLPGEKKNGLFGNLIALSLGLTPNFKSNFDLAEDAKLQLSKDTYDDDLDNLLAQIGDQYADLFLAAKNLSDAILLSDILRVNTEITKAPLSASMIKRYDEHHQDLTLLKALVRQQLPEKYKEIFFDQSKNGYAGYIDGGASQEEFYKFIKPILEKMDGTEELLVKLNREDLLRKQRTFDNGSIPHQIHLGELHAILRRQEDFYPFLKDNREKIEKILTFRIPYYVGPLARGNSRFAWMTRKSEETITPWNFEEVVDKGASAQSFIERMTNFDKNLPNEKVLPKHSLLYEYFTVYNELTKVKYVTEGMRKPAFLSGEQKKAIVDLLFKTNRKVTVKQLKEDYFKKIECFDSVEISGVEDRFNASLGTYHDLLKIIKDKDFLDNEENEDILEDIVLTLTLFEDREMIEERLKTYAHLFDDKVMKQLKRRRYTGWGRLSRKLINGIRDKQSGKTILDFLKSDGFANRNFMQLIHDDSLTFKEDIQKAQVSGQGDSLHEHIANLAGSPAIKKGILQTVKVVDELVKVMGRHKPENIVIEMARENQTTQKGQKNSRERMKRIEEGIKELGSQILKEHPVENTQLQNEKLYLYYLQNGRDMYVDQELDINRLSDYDVDHIVPQSFLKDDSIDNKVLTRSDKARGKSDNVPSEEVVKKMKNYWRQLLNAKLITQRKFDNLTKAERGGLSELDKAGFIKRQLVETRQITKHVAQILDSRMNTKYDENDKLIREVKVITLKSKLVSDFRKDFQFYKVREINNYHHAHDAYLNAVVGTALIKKYPKLESEFVYGDYKVYDVRKMIAKSEQEIGKATAKYFFYSNIMNFFKTEITLANGEIRKRPLIETNGETGEIVWDKGRDFATVRKVLSMPQVNIVKKTEVQTGGFSKESILPKRNSDKLIARKKDWDPKKYGGFDSPTVAYSVLVVAKVEKGKSKKLKSVKELLGITIMERSSFEKNPIDFLEAKGYKEVKKDLIIKLPKYSLFELENGRKRMLASAGELQKGNELALPSKYVNFLYLASHYEKLKGSPEDNEQKQLFVEQHKHYLDEIIEQISEFSKRVILADANLDKVLSAYNKHRDKPIREQAENIIHLFTLTNLGAPAAFKYFDTTIDRKRYTSTKEVLDATLIHQSITGLYETRIDLSQLGGDGGGGGGSGGGGSGGGGSGGGGSGGTLQLEEEYRLFEPESTQKQEMDIWLKNFPQAWAETGGMGTAHCQAPVLIQLKATATPISIRQYPMPHEAYQGIKPHIRRMLDQGILKPCQSPWNTPLLPVKKPGTEDYRPVQDLREVNKRVEDIHPTVPNPYNLLSTLPPSHPWYTVLDLKDAFFCLRLHSESQLLFAFEWRDPEIGLSGQLTWTRLPQGFKNSPTLFNEALHSDLADFRVRYPALVLLQYVDDLLLAAATRTECLEGTKALLETLGNKGYRASAKKAQICLQEVTYLGYSLKDGQRWLTKARKEAILSIPVPKNSRQVREFLGKAGYCRLFIPGFAELAAPLYPLTRPGTLFQWGTEQQLAFEDIKKALLSSPALGLPDITKPFELFIDENSGFAKGVLVQKLGPWKRPVAYLSKKLDTVASGWPPCLRMVAAIAILVKDAGKLTLGQPLTILTSHPVEALVRQPPNKWLSNARMTHYQAMLLDAERVHFGPTVSLNPATLLPLPSGGNHHDCLQILAETHGTRPDLTDQPLPDADLTWYTDGSSFIRNGEREAGAAVTTESEVIWAAPLPPGTSAQRAELIALTQALKMAEGKKLTVYTDSRYAFATTHVHGEIYRRRGWLTSEGKEIKNKNEILALLEALFLPKRLSIIHCPGHQKGDSPQAKGNRLADDTAKKAATETHSSLTVLPAGKRTADGSEFEKRTADGSEFESPKKKAKVE

SEQ ID NO: 6149 - protein, 2185 aa, synthetic construct
MPAAKRVKLDGGDKKYSIGLDIGTNSVGWAVITDEYKVPSKKFKVLGNTDRHSIKKNLIGALLFDSGETAEATRLKRTARRRYTRRKNRICYLQEIFSNEMAKVDDSFFHRLEESFLVEEDKKHERHPIFGNIVDEVAYHEKYPTIYHLRKKLVDSTDKADLRLIYLALAHMIKFRGHFLIEGDLNPDNSDVDKLFIQLVQTYNQLFEENPINASGVDAKAILSARLSKSRRLENLIAQLPGEKKNGLFGNLIALSLGLTPNFKSNFDLAEDAKLQLSKDTYDDDLDNLLAQIGDQYADLFLAAKNLSDAILLSDILRVNTEITKAPLSASMIKRYDEHHQDLTLLKALVRQQLPEKYKEIFFDQSKNGYAGYIDGGASQEEFYKFIKPILEKMDGTEELLVKLNREDLLRKQRTFDNGSIPHQIHLGELHAILRRQEDFYPFLKDNREKIEKILTFRIPYYVGPLARGNSRFAWMTRKSEETITPWNFEEVVDKGASAQSFIERMTNFDKNLPNEKVLPKHSLLYEYFTVYNELTKVKYVTEGMRKPAFLSGEQKKAIVDLLFKTNRKVTVKQLKEDYFKKIECFDSVEISGVEDRFNASLGTYHDLLKIIKDKDFLDNEENEDILEDIVLTLTLFEDREMIEERLKTYAHLFDDKVMKQLKRRRYTGWGRLSRKLINGIRDKQSGKTILDFLKSDGFANRNFMQLIHDDSLTFKEDIQKAQVSGQGDSLHEHIANLAGSPAIKKGILQTVKVVDELVKVMGRHKPENIVIEMARENQTTQKGQKNSRERMKRIEEGIKELGSQILKEHPVENTQLQNEKLYLYYLQNGRDMYVDQELDINRLSDYDVDHIVPQSFLKDDSIDNKVLTRSDKARGKSDNVPSEEVVKKMKNYWRQLLNAKLITQRKFDNLTKAERGGLSELDKAGFIKRQLVETRQITKHVAQILDSRMNTKYDENDKLIREVKVITLKSKLVSDFRKDFQFYKVREINNYHHAHDAYLNAVVGTALIKKYPKLESEFVYGDYKVYDVRKMIAKSEQEIGKATAKYFFYSNIMNFFKTEITLANGEIRKRPLIETNGETGEIVWDKGRDFATVRKVLSMPQVNIVKKTEVQTGGFSKESILPKRNSDKLIARKKDWDPKKYGGFDSPTVAYSVLVVAKVEKGKSKKLKSVKELLGITIMERSSFEKNPIDFLEAKGYKEVKKDLIIKLPKYSLFELENGRKRMLASAGELQKGNELALPSKYVNFLYLASHYEKLKGSPEDNEQKQLFVEQHKHYLDEIIEQISEFSKRVILADANLDKVLSAYNKHRDKPIREQAENIIHLFTLTNLGAPAAFKYFDTTIDRKRYTSTKEVLDATLIHQSITGLYETRIDLSQLGGDGGGGGGSGGGGSGGGGSGGGGSGGMNPLQLLQPLPAEIKGTKLLAHWNSGATITCIPESFLEDEQPIKKTLIKTIHGEKQQNVYYVTFKVKGRKVEAEVIASPYEYILLSPTDVPWLTQQPLQLTILVPLQEYQEKILSKTALPEDQKQQLKTLFVKYDNLWQHWENQVGHRKIRPHNIATGDYPPRPQKQYPINPKAKPSIQIVIDDLLKQGVLTPQNSTMNTPVYPVPKPDGRWRMVLDYREVNKTIPLTAAQNQHSAGILATIVRQKYKTTLDLANGFWAHPITPESYWLTAFTWQGKQYCWTRLPQGFLNSPALFNADVVDLLKEIPNVQVYVDDIYLSHDDPKEHVQQLEKVFQILLQAGYVVSLKKSEIGQKTVEFLGFNITKEGRGLTDTFKTKLLNITPPKDLKQLQSILGLLNFARNFIPNFAELVQPLYNLIAPAKGKYIEWSEENTKQLNMVIEALNTASNLEERLPEQRLVIKVNTSPSAGYVRYYNETGKKPIMYLNYVFSKAELKFSMLEKLLTTMHKALIKAMDLAMGQEILVYSPIVSMTKIQKTPLPERKALPIRWITWMTYLEDPRIQFHYDKTLPELKHIPDVYTSSQSPVKHPSQYEGVFYTDGSAIKSPDPTKSNNAGMGIVHATYKPEYQVLNQWSIPLGNHTAQMAEIAAVEFACKKALKIPGPVLVITDSFYVAESANKELPYWKSNGFVNNKKKPLKHISKWKSIAECLSMKPDITIQHEKGISLQIPVFILKGNALADKLATQGSYVVNAGKRTADGSEFEKRTADGSEFESPKKKAKVE

SEQ ID NO: 6150 - protein, 2185 aa, synthetic construct
MPAAKRVKLDGGDKKYSIGLDIGTNSVGWAVITDEYKVPSKKFKVLGNTDRHSIKKNLIGALLFDSGETAEATRLKRTARRRYTRRKNRICYLQEIFSNEMAKVDDSFFHRLEESFLVEEDKKHERHPIFGNIVDEVAYHEKYPTIYHLRKKLVDSTDKADLRLIYLALAHMIKFRGHFLIEGDLNPDNSDVDKLFIQLVQTYNQLFEENPINASGVDAKAILSARLSKSRRLENLIAQLPGEKKNGLFGNLIALSLGLTPNFKSNFDLAEDAKLQLSKDTYDDDLDNLLAQIGDQYADLFLAAKNLSDAILLSDILRVNTEITKAPLSASMIKRYDEHHQDLTLLKALVRQQLPEKYKEIFFDQSKNGYAGYIDGGASQEEFYKFIKPILEKMDGTEELLVKLNREDLLRKQRTFDNGSIPHQIHLGELHAILRRQEDFYPFLKDNREKIEKILTFRIPYYVGPLARGNSRFAWMTRKSEETITPWNFEEVVDKGASAQSFIERMTNFDKNLPNEKVLPKHSLLYEYFTVYNELTKVKYVTEGMRKPAFLSGEQKKAIVDLLFKTNRKVTVKQLKEDYFKKIECFDSVEISGVEDRFNASLGTYHDLLKIIKDKDFLDNEENEDILEDIVLTLTLFEDREMIEERLKTYAHLFDDKVMKQLKRRRYTGWGRLSRKLINGIRDKQSGKTILDFLKSDGFANRNFMQLIHDDSLTFKEDIQKAQVSGQGDSLHEHIANLAGSPAIKKGILQTVKVVDELVKVMGRHKPENIVIEMARENQTTQKGQKNSRERMKRIEEGIKELGSQILKEHPVENTQLQNEKLYLYYLQNGRDMYVDQELDINRLSDYDVDHIVPQSFLKDDSIDNKVLTRSDKARGKSDNVPSEEVVKKMKNYWRQLLNAKLITQRKFDNLTKAERGGLSELDKAGFIKRQLVETRQITKHVAQILDSRMNTKYDENDKLIREVKVITLKSKLVSDFRKDFQFYKVREINNYHHAHDAYLNAVVGTALIKKYPKLESEFVYGDYKVYDVRKMIAKSEQEIGKATAKYFFYSNIMNFFKTEITLANGEIRKRPLIETNGETGEIVWDKGRDFATVRKVLSMPQVNIVKKTEVQTGGFSKESILPKRNSDKLIARKKDWDPKKYGGFDSPTVAYSVLVVAKVEKGKSKKLKSVKELLGITIMERSSFEKNPIDFLEAKGYKEVKKDLIIKLPKYSLFELENGRKRMLASAGELQKGNELALPSKYVNFLYLASHYEKLKGSPEDNEQKQLFVEQHKHYLDEIIEQISEFSKRVILADANLDKVLSAYNKHRDKPIREQAENIIHLFTLTNLGAPAAFKYFDTTIDRKRYTSTKEVLDATLIHQSITGLYETRIDLSQLGGDGGGGGGSGGGGSGGGGSGGGGSGGMNPLQLLQPLPAEIKGTKLLAHWNSGATITCIPESFLEDEQPIKKTLIKTIHGEKQQNVYYVTFKVKGRKVEAEVIASPYEYILLSPTDVPWLTQQPLQLTILVPLQEYQEKILSKTALPEDQKQQLKTLFVKYDNLWQHWENQVGHRKIRPHNIATGDYPPRPQKQYPINPKAKPSIQIVIDDLLKQGVLTPQNSTMNTPVYPVPKPDGRWRMVLDYREVNKTIPLTAAQNQHSAGILATIVRQKYKTTLDLANGFWAHPITPESYWLTAFTWQGKQYCWTRLPQGFLNSPALFNADVVDLLKEIPNVQVYVDDIYLSHDDPKEHVQQLEKVFQILLQAGYVVSLKKSEIGQKTVEFLGFNITKEGRGLTDTFKTKLLNITPPKDLKQLQSILGKLNFARNFIPNFAELVQPLYNLIAPAKGKYIEWSEENTKQLNMVIEALNTASNLEERLPEQRLVIKVNTSPSAGYVRYYNETGKKPIMYLNYVFSKAELKFSMLEKLLTTMHKALIKAMDLAMGQEILVYSPIVSMTKIQKTPLPERKALPIRWITWMTYLEDPRIQFHYDKTLPELKHIPDVYTSSQSPVKHPSQYEGVFYTDGSAIKSPDPTKSNNAGMGIVHATYKPEYQVLNQWSIPLGNHTAQMAEIAAVEFACKKALKIPGPVLVITDSFYVAESANKELPYWKSNGFVNNKKKPLKHISKWKSIAECLSMKPDITIQHEKGISLQIPVFILKGNALADKLATQGSYVVNAGKRTADGSEFEKRTADGSEFESPKKKAKVE

SEQ ID NO: 6151 - protein, 2136 aa, synthetic construct
MPAAKRVKLDGGDKKYSIGLDIGTNSVGWAVITDEYKVPSKKFKVLGNTDRHSIKKNLIGALLFDSGETAEATRLKRTARRRYTRRKNRICYLQEIFSNEMAKVDDSFFHRLEESFLVEEDKKHERHPIFGNIVDEVAYHEKYPTIYHLRKKLVDSTDKADLRLIYLALAHMIKFRGHFLIEGDLNPDNSDVDKLFIQLVQTYNQLFEENPINASGVDAKAILSARLSKSRRLENLIAQLPGEKKNGLFGNLIALSLGLTPNFKSNFDLAEDAKLQLSKDTYDDDLDNLLAQIGDQYADLFLAAKNLSDAILLSDILRVNTEITKAPLSASMIKRYDEHHQDLTLLKALVRQQLPEKYKEIFFDQSKNGYAGYIDGGASQEEFYKFIKPILEKMDGTEELLVKLNREDLLRKQRTFDNGSIPHQIHLGELHAILRRQEDFYPFLKDNREKIEKILTFRIPYYVGPLARGNSRFAWMTRKSEETITPWNFEEVVDKGASAQSFIERMTNFDKNLPNEKVLPKHSLLYEYFTVYNELTKVKYVTEGMRKPAFLSGEQKKAIVDLLFKTNRKVTVKQLKEDYFKKIECFDSVEISGVEDRFNASLGTYHDLLKIIKDKDFLDNEENEDILEDIVLTLTLFEDREMIEERLKTYAHLFDDKVMKQLKRRRYTGWGRLSRKLINGIRDKQSGKTILDFLKSDGFANRNFMQLIHDDSLTFKEDIQKAQVSGQGDSLHEHIANLAGSPAIKKGILQTVKVVDELVKVMGRHKPENIVIEMARENQTTQKGQKNSRERMKRIEEGIKELGSQILKEHPVENTQLQNEKLYLYYLQNGRDMYVDQELDINRLSDYDVDHIVPQSFLKDDSIDNKVLTRSDKARGKSDNVPSEEVVKKMKNYWRQLLNAKLITQRKFDNLTKAERGGLSELDKAGFIKRQLVETRQITKHVAQILDSRMNTKYDENDKLIREVKVITLKSKLVSDFRKDFQFYKVREINNYHHAHDAYLNAVVGTALIKKYPKLESEFVYGDYKVYDVRKMIAKSEQEIGKATAKYFFYSNIMNFFKTEITLANGEIRKRPLIETNGETGEIVWDKGRDFATVRKVLSMPQVNIVKKTEVQTGGFSKESILPKRNSDKLIARKKDWDPKKYGGFDSPTVAYSVLVVAKVEKGKSKKLKSVKELLGITIMERSSFEKNPIDFLEAKGYKEVKKDLIIKLPKYSLFELENGRKRMLASAGELQKGNELALPSKYVNFLYLASHYEKLKGSPEDNEQKQLFVEQHKHYLDEIIEQISEFSKRVILADANLDKVLSAYNKHRDKPIREQAENIIHLFTLTNLGAPAAFKYFDTTIDRKRYTSTKEVLDATLIHQSITGLYETRIDLSQLGGDGGGGGGSGGGGSGGGGSGGGGSGGLLGRDLLTKLKAQIQFSTEGPQVTWEDRPAMCLVLNLEEEYRLHEKPVPPSIDPSWLQLFPMVWAEKAGMGLANQVPPVVVELKSDASPVAVRQYPMSKEAREGIRPHIQRFLDLGILVPCQSPWNTPLLPVKKPGTNDYRPVQDLREVNKRVQDIHPTVPNPYNLLSSLPPSHTWYSVLDLKDAFFCLKLHPNSQPLFAFEWRDPEKGNTGQLTWTRLPQGFKNSPTLFNEALHRDLASFRALNPQVVMLQYVDDLLVAAPTYRDCKEGTRRLLQELSKLGYRVSAKKAQLCREEVTYLGYLLKGGKRWLTPARKATVMKIPTPTTPRQVREFLGTAGFCRLWIPGFASLAAPLYPLTRPKVPFTWTEAHQEAFGRIKEALLSAPALALPDLTKPFALYVDEKEGVARGVLTQTLGPWRRPVAYLSKKLDPVASGWPTCLKAIAAVALLLKDADKLTLGQNVLVIAPHNLESIVRQPPDRWMTNARMTHYQSLLLNERVSFAPPAILNPATLLPVESDDTPIHICSEILAEETGTRPDLRDQPLPGVPAWYTDGSSFIMDGRRQAGAAIVDNKRTVWASNLPEGTSAQKAELIALTQALRLAEGKSINIYTDSRYAFATAHVHGAIYKQRGWLTSAGKDIKNKEEILALLEAIHLPKRVAIIHCPGHQRGTDPVATGNRKADEAAKQAAQSTRILTETTKNAGKRTADGSEFEKRTADGSEFESPKKKAKVE

SEQ ID NO: 6152 - protein, 2136 aa, synthetic construct
MPAAKRVKLDGGDKKYSIGLDIGTNSVGWAVITDEYKVPSKKFKVLGNTDRHSIKKNLIGALLFDSGETAEATRLKRTARRRYTRRKNRICYLQEIFSNEMAKVDDSFFHRLEESFLVEEDKKHERHPIFGNIVDEVAYHEKYPTIYHLRKKLVDSTDKADLRLIYLALAHMIKFRGHFLIEGDLNPDNSDVDKLFIQLVQTYNQLFEENPINASGVDAKAILSARLSKSRRLENLIAQLPGEKKNGLFGNLIALSLGLTPNFKSNFDLAEDAKLQLSKDTYDDDLDNLLAQIGDQYADLFLAAKNLSDAILLSDILRVNTEITKAPLSASMIKRYDEHHQDLTLLKALVRQQLPEKYKEIFFDQSKNGYAGYIDGGASQEEFYKFIKPILEKMDGTEELLVKLNREDLLRKQRTFDNGSIPHQIHLGELHAILRRQEDFYPFLKDNREKIEKILTFRIPYYVGPLARGNSRFAWMTRKSEETITPWNFEEVVDKGASAQSFIERMTNFDKNLPNEKVLPKHSLLYEYFTVYNELTKVKYVTEGMRKPAFLSGEQKKAIVDLLFKTNRKVTVKQLKEDYFKKIECFDSVEISGVEDRFNASLGTYHDLLKIIKDKDFLDNEENEDILEDIVLTLTLFEDREMIEERLKTYAHLFDDKVMKQLKRRRYTGWGRLSRKLINGIRDKQSGKTILDFLKSDGFANRNFMQLIHDDSLTFKEDIQKAQVSGQGDSLHEHIANLAGSPAIKKGILQTVKVVDELVKVMGRHKPENIVIEMARENQTTQKGQKNSRERMKRIEEGIKELGSQILKEHPVENTQLQNEKLYLYYLQNGRDMYVDQELDINRLSDYDVDHIVPQSFLKDDSIDNKVLTRSDKARGKSDNVPSEEVVKKMKNYWRQLLNAKLITQRKFDNLTKAERGGLSELDKAGFIKRQLVETRQITKHVAQILDSRMNTKYDENDKLIREVKVITLKSKLVSDFRKDFQFYKVREINNYHHAHDAYLNAVVGTALIKKYPKLESEFVYGDYKVYDVRKMIAKSEQEIGKATAKYFFYSNIMNFFKTEITLANGEIRKRPLIETNGETGEIVWDKGRDFATVRKVLSMPQVNIVKKTEVQTGGFSKESILPKRNSDKLIARKKDWDPKKYGGFDSPTVAYSVLVVAKVEKGKSKKLKSVKELLGITIMERSSFEKNPIDFLEAKGYKEVKKDLIIKLPKYSLFELENGRKRMLASAGELQKGNELALPSKYVNFLYLASHYEKLKGSPEDNEQKQLFVEQHKHYLDEIIEQISEFSKRVILADANLDKVLSAYNKHRDKPIREQAENIIHLFTLTNLGAPAAFKYFDTTIDRKRYTSTKEVLDATLIHQSITGLYETRIDLSQLGGDGGGGGGSGGGGSGGGGSGGGGSGGLLGRDLLTKLKAQIQFSTEGPQVTWEDRPAMCLVLNLEEEYRLHEKPVPPSIDPSWLQLFPMVWAEKAGMGLANQVPPVVVELKSDASPVAVRQYPMSKEAREGIRPHIQRFLDLGILVPCQSPWNTPLLPVKKPGTNDYRPVQDLREVNKRVQDIHPTVPNPYNLLSSLPPSHTWYSVLDLKDAFFCLKLHPNSQPLFAFEWRDPEKGNTGQLTWTRLPQGFKNSPTLFNEALHRDLASFRALNPQVVMLQYVDDLLVAAPTYRDCKEGTRRLLQELSKLGYRVSAKKAQLCREEVTYLGYLLKGGKRWLTPARKATVMKIPTPTTPRQVREFLGKAGFCRLFIPGFASLAAPLYPLTRPKVPFTWTEAHQEAFGRIKEALLSAPALALPDLTKPFALYVDEKEGVARGVLTQTLGPWRRPVAYLSKKLDPVASGWPTCLKAIAAVALLLKDADKLTLGQNVLVIAPHNLESIVRQPPDRWMTNARMTHYQSLLLNERVSFAPPAILNPATLLPVESDDTPIHICSEILAEETGTRPDLRDQPLPGVPAWYTDGSSFIMDGRRQAGAAIVDNKRTVWASNLPEGTSAQKAELIALTQALRLAEGKSINIYTDSRYAFATAHVHGAIYKQRGWLTSAGKDIKNKEEILALLEAIHLPKRVAIIHCPGHQRGTDPVATGNRKADEAAKQAAQSTRILTETTKNAGKRTADGSEFEKRTADGSEFESPKKKAKVE

SEQ ID NO: 6153 - protein, 2227 aa, synthetic construct
MPAAKRVKLDGGDKKYSIGLDIGTNSVGWAVITDEYKVPSKKFKVLGNTDRHSIKKNLIGALLFDSGETAEATRLKRTARRRYTRRKNRICYLQEIFSNEMAKVDDSFFHRLEESFLVEEDKKHERHPIFGNIVDEVAYHEKYPTIYHLRKKLVDSTDKADLRLIYLALAHMIKFRGHFLIEGDLNPDNSDVDKLFIQLVQTYNQLFEENPINASGVDAKAILSARLSKSRRLENLIAQLPGEKKNGLFGNLIALSLGLTPNFKSNFDLAEDAKLQLSKDTYDDDLDNLLAQIGDQYADLFLAAKNLSDAILLSDILRVNTEITKAPLSASMIKRYDEHHQDLTLLKALVRQQLPEKYKEIFFDQSKNGYAGYIDGGASQEEFYKFIKPILEKMDGTEELLVKLNREDLLRKQRTFDNGSIPHQIHLGELHAILRRQEDFYPFLKDNREKIEKILTFRIPYYVGPLARGNSRFAWMTRKSEETITPWNFEEVVDKGASAQSFIERMTNFDKNLPNEKVLPKHSLLYEYFTVYNELTKVKYVTEGMRKPAFLSGEQKKAIVDLLFKTNRKVTVKQLKEDYFKKIECFDSVEISGVEDRFNASLGTYHDLLKIIKDKDFLDNEENEDILEDIVLTLTLFEDREMIEERLKTYAHLFDDKVMKQLKRRRYTGWGRLSRKLINGIRDKQSGKTILDFLKSDGFANRNFMQLIHDDSLTFKEDIQKAQVSGQGDSLHEHIANLAGSPAIKKGILQTVKVVDELVKVMGRHKPENIVIEMARENQTTQKGQKNSRERMKRIEEGIKELGSQILKEHPVENTQLQNEKLYLYYLQNGRDMYVDQELDINRLSDYDVDHIVPQSFLKDDSIDNKVLTRSDKARGKSDNVPSEEVVKKMKNYWRQLLNAKLITQRKFDNLTKAERGGLSELDKAGFIKRQLVETRQITKHVAQILDSRMNTKYDENDKLIREVKVITLKSKLVSDFRKDFQFYKVREINNYHHAHDAYLNAVVGTALIKKYPKLESEFVYGDYKVYDVRKMIAKSEQEIGKATAKYFFYSNIMNFFKTEITLANGEIRKRPLIETNGETGEIVWDKGRDFATVRKVLSMPQVNIVKKTEVQTGGFSKESILPKRNSDKLIARKKDWDPKKYGGFDSPTVAYSVLVVAKVEKGKSKKLKSVKELLGITIMERSSFEKNPIDFLEAKGYKEVKKDLIIKLPKYSLFELENGRKRMLASAGELQKGNELALPSKYVNFLYLASHYEKLKGSPEDNEQKQLFVEQHKHYLDEIIEQISEFSKRVILADANLDKVLSAYNKHRDKPIREQAENIIHLFTLTNLGAPAAFKYFDTTIDRKRYTSTKEVLDATLIHQSITGLYETRIDLSQLGGDGGGGGGSGGGGSGGGGSGGGGSGGTLGDQGSRGSDPLPEPRVTLTVEGIPTEFLVNTGAEHSVLTKPMGKMGSKRTVVAGATGSKVYPWTTKRLLKIGQKQVTHSFLVIPECPAPLLGRDLLTKLKAQIQFSTEGPQVTWEDRPAMCLVLNLEEEYRLHEKPVPPSIDPSWLQLFPMVWAEKAGMGLANQVPPVVVELKSDASPVAVRQYPMSKEAREGIRPHIQRFLDLGILVPCQSPWNTPLLPVKKPGTNDYRPVQDLREVNKRVQDIHPTVPNPYNLLSSLPPSHTWYSVLDLKDAFFCLKLHPNSQPLFAFEWRDPEKGNTGQLTWTRLPQGFKNSPTLFNEALHRDLASFRALNPQVVMLQYVDDLLVAAPTYRDCKEGTRRLLQELSKLGYRVSAKKAQLCREEVTYLGYLLKGGKRWLTPARKATVMKIPTPTTPRQVREFLGTAGFCRLWIPGFASLAAPLYPLTRPKVPFTWTEAHQEAFGRIKEALLSAPALALPDLTKPFALYVDEKEGVARGVLTQTLGPWRRPVAYLSKKLDPVASGWPTCLKAIAAVALLLKDADKLTLGQNVLVIAPHNLESIVRQPPDRWMTNARMTHYQSLLLNERVSFAPPAILNPATLLPVESDDTPIHICSEILAEETGTRPDLRDQPLPGVPAWYTDGSSFIMDGRRQAGAAIVDNKRTVWASNLPEGTSAQKAELIALTQALRLAEGKSINIYTDSRYAFATAHVHGAIYKQRGWLTSAGKDIKNKEEILALLEAIHLPKRVAIIHCPGHQRGTDPVATGNRKADEAAKQAAQSTRILTETTKNAGKRTADGSEFEKRTADGSEFESPKKKAKVE

SEQ ID NO: 6154 - protein, 2105 aa, synthetic construct
MPAAKRVKLDGGDKKYSIGLDIGTNSVGWAVITDEYKVPSKKFKVLGNTDRHSIKKNLIGALLFDSGETAEATRLKRTARRRYTRRKNRICYLQEIFSNEMAKVDDSFFHRLEESFLVEEDKKHERHPIFGNIVDEVAYHEKYPTIYHLRKKLVDSTDKADLRLIYLALAHMIKFRGHFLIEGDLNPDNSDVDKLFIQLVQTYNQLFEENPINASGVDAKAILSARLSKSRRLENLIAQLPGEKKNGLFGNLIALSLGLTPNFKSNFDLAEDAKLQLSKDTYDDDLDNLLAQIGDQYADLFLAAKNLSDAILLSDILRVNTEITKAPLSASMIKRYDEHHQDLTLLKALVRQQLPEKYKEIFFDQSKNGYAGYIDGGASQEEFYKFIKPILEKMDGTEELLVKLNREDLLRKQRTFDNGSIPHQIHLGELHAILRRQEDFYPFLKDNREKIEKILTFRIPYYVGPLARGNSRFAWMTRKSEETITPWNFEEVVDKGASAQSFIERMTNFDKNLPNEKVLPKHSLLYEYFTVYNELTKVKYVTEGMRKPAFLSGEQKKAIVDLLFKTNRKVTVKQLKEDYFKKIECFDSVEISGVEDRFNASLGTYHDLLKIIKDKDFLDNEENEDILEDIVLTLTLFEDREMIEERLKTYAHLFDDKVMKQLKRRRYTGWGRLSRKLINGIRDKQSGKTILDFLKSDGFANRNFMQLIHDDSLTFKEDIQKAQVSGQGDSLHEHIANLAGSPAIKKGILQTVKVVDELVKVMGRHKPENIVIEMARENQTTQKGQKNSRERMKRIEEGIKELGSQILKEHPVENTQLQNEKLYLYYLQNGRDMYVDQELDINRLSDYDVDHIVPQSFLKDDSIDNKVLTRSDKARGKSDNVPSEEVVKKMKNYWRQLLNAKLITQRKFDNLTKAERGGLSELDKAGFIKRQLVETRQITKHVAQILDSRMNTKYDENDKLIREVKVITLKSKLVSDFRKDFQFYKVREINNYHHAHDAYLNAVVGTALIKKYPKLESEFVYGDYKVYDVRKMIAKSEQEIGKATAKYFFYSNIMNFFKTEITLANGEIRKRPLIETNGETGEIVWDKGRDFATVRKVLSMPQVNIVKKTEVQTGGFSKESILPKRNSDKLIARKKDWDPKKYGGFDSPTVAYSVLVVAKVEKGKSKKLKSVKELLGITIMERSSFEKNPIDFLEAKGYKEVKKDLIIKLPKYSLFELENGRKRMLASAGELQKGNELALPSKYVNFLYLASHYEKLKGSPEDNEQKQLFVEQHKHYLDEIIEQISEFSKRVILADANLDKVLSAYNKHRDKPIREQAENIIHLFTLTNLGAPAAFKYFDTTIDRKRYTSTKEVLDATLIHQSITGLYETRIDLSQLGGDGGGGGGSGGGGSGGGGSGGGGSGGTLNIEDEYRLHETSKEPDVSLGSTWLSDFPQAWAETGGMGLAVRQAPLIIPLKATSTPVSIKQYPMSQEARLGIKPHIQRLLDQGILVPCQSPWNTPLLPVKKPGTNDYRPVQDLREVNKRVEDIHPTVPNPYNLLSGLPPSHQWYTVLDLKDAFFCLRLHPTSQPLFAFEWRDPEMGISGQLTWTRLPQGFKNSPTLFNEALHRDLAGFRIQHPDLILLQYVDDLLLAATSELDCQQGTRALLQTLGDLGYRASAKKAQICQKQVKYLGYLLKEGQRWLTEARKETVMGQPIPKTPRQLREFLGTAGFCRLWIPGFAEMAAPLYPLTKPGTLFNWGPDQQKAFQEIKQALLTAPALGLPDLTKPFELFVDEKQGYAKGVLTQKLGPWRRPVAYLSKKLDPVAAGWPPCLRMVAAIAVLTKDAGKLTMGQPLVILAPHAVEALVKQPPDRWLSNARMTHYQALLLDTDRVQFGPVVALNPATLLPLPEEGLQHDCLDILAEAHGTRSDLMDQPLPDADHTWYTDGSSFLQEGQRKAGAAVTTETEVIWARALPAGTSAQRAELIALTQALKMAEGKKLNVYTDSRYAFATAHIHGEIYRRRGWLTSEGKEIKNKDEILALLKALFLPKRLSIIHCPGHQKGNSAEARGNRMADQAAREVATRETPETSTLLAGKRTADGSEFEKRTADGSEFESPKKKAKVE

SEQ ID NO: 6155 - protein, 2105 aa, synthetic construct
MPAAKRVKLDGGDKKYSIGLDIGTNSVGWAVITDEYKVPSKKFKVLGNTDRHSIKKNLIGALLFDSGETAEATRLKRTARRRYTRRKNRICYLQEIFSNEMAKVDDSFFHRLEESFLVEEDKKHERHPIFGNIVDEVAYHEKYPTIYHLRKKLVDSTDKADLRLIYLALAHMIKFRGHFLIEGDLNPDNSDVDKLFIQLVQTYNQLFEENPINASGVDAKAILSARLSKSRRLENLIAQLPGEKKNGLFGNLIALSLGLTPNFKSNFDLAEDAKLQLSKDTYDDDLDNLLAQIGDQYADLFLAAKNLSDAILLSDILRVNTEITKAPLSASMIKRYDEHHQDLTLLKALVRQQLPEKYKEIFFDQSKNGYAGYIDGGASQEEFYKFIKPILEKMDGTEELLVKLNREDLLRKQRTFDNGSIPHQIHLGELHAILRRQEDFYPFLKDNREKIEKILTFRIPYYVGPLARGNSRFAWMTRKSEETITPWNFEEVVDKGASAQSFIERMTNFDKNLPNEKVLPKHSLLYEYFTVYNELTKVKYVTEGMRKPAFLSGEQKKAIVDLLFKTNRKVTVKQLKEDYFKKIECFDSVEISGVEDRFNASLGTYHDLLKIIKDKDFLDNEENEDILEDIVLTLTLFEDREMIEERLKTYAHLFDDKVMKQLKRRRYTGWGRLSRKLINGIRDKQSGKTILDFLKSDGFANRNFMQLIHDDSLTFKEDIQKAQVSGQGDSLHEHIANLAGSPAIKKGILQTVKVVDELVKVMGRHKPENIVIEMARENQTTQKGQKNSRERMKRIEEGIKELGSQILKEHPVENTQLQNEKLYLYYLQNGRDMYVDQELDINRLSDYDVDHIVPQSFLKDDSIDNKVLTRSDKARGKSDNVPSEEVVKKMKNYWRQLLNAKLITQRKFDNLTKAERGGLSELDKAGFIKRQLVETRQITKHVAQILDSRMNTKYDENDKLIREVKVITLKSKLVSDFRKDFQFYKVREINNYHHAHDAYLNAVVGTALIKKYPKLESEFVYGDYKVYDVRKMIAKSEQEIGKATAKYFFYSNIMNFFKTEITLANGEIRKRPLIETNGETGEIVWDKGRDFATVRKVLSMPQVNIVKKTEVQTGGFSKESILPKRNSDKLIARKKDWDPKKYGGFDSPTVAYSVLVVAKVEKGKSKKLKSVKELLGITIMERSSFEKNPIDFLEAKGYKEVKKDLIIKLPKYSLFELENGRKRMLASAGELQKGNELALPSKYVNFLYLASHYEKLKGSPEDNEQKQLFVEQHKHYLDEIIEQISEFSKRVILADANLDKVLSAYNKHRDKPIREQAENIIHLFTLTNLGAPAAFKYFDTTIDRKRYTSTKEVLDATLIHQSITGLYETRIDLSQLGGDGGGGGGSGGGGSGGGGSGGGGSGGTLNIEDEYRLHETSKGPDVPLGSTWLSDFPQAWAETGGMGLAVRQAPLIIPLKATSTPVSIKQYPMSQEARLGIKPHIQRLLDQGILVPCQSPWNTPLLPVKKPGTNDYRPVQDLREVNKRVEDIHPTVPNPYNLLSGLPPSHQWYTVLDLKDAFFCLRLHPTSQSLFAFEWRDPEMGISGQLTWTRLPQGFKNSPTLFNEALHRDLADFRIQHPDLILLQYVDDLLLAATSELDCQQGTRALLQTLGDLGYRASAKKAQICQKQVKYLGYLLKEGQRWLTEARKETVMGQPTPKTPRQLREFLGKAGFCRLFIPGFAEMAAPLYPLTKPGTLFEWGPDQQKAYQEIKQALLTAPALGLPDLTKPFELFVDEKQGYAKGVLTQKLGPWRRPVAYLSKKLDPVAAGWPPCLRMVAAIAVLTKDAGKLTMGQPLVILAPHAVEALVKQPPDRWLSNARMTHYQALLLDTDRVQFGPIVALNPATLLPLPEEGLQHDCLDILAEAHGTRPDLTDQPLPDADHTWYTDGSSFLQEGQRKAGAAVTTETEVVWAKALPAGTSAQRAELIALTQALKMAEGKKLNVYTDSRYAFATAHIHGEIYRRRGWLTSEGKEIKNKDEILALLKALFLPKRLSIIHCPGHQKGNRAEARGNRMADQAAREVATRETPETSTLLAGKRTADGSEFEKRTADGSEFESPKKKAKVE

SEQ ID NO: 6156 - protein, 2105 aa, synthetic construct
MPAAKRVKLDGGDKKYSIGLDIGTNSVGWAVITDEYKVPSKKFKVLGNTDRHSIKKNLIGALLFDSGETAEATRLKRTARRRYTRRKNRICYLQEIFSNEMAKVDDSFFHRLEESFLVEEDKKHERHPIFGNIVDEVAYHEKYPTIYHLRKKLVDSTDKADLRLIYLALAHMIKFRGHFLIEGDLNPDNSDVDKLFIQLVQTYNQLFEENPINASGVDAKAILSARLSKSRRLENLIAQLPGEKKNGLFGNLIALSLGLTPNFKSNFDLAEDAKLQLSKDTYDDDLDNLLAQIGDQYADLFLAAKNLSDAILLSDILRVNTEITKAPLSASMIKRYDEHHQDLTLLKALVRQQLPEKYKEIFFDQSKNGYAGYIDGGASQEEFYKFIKPILEKMDGTEELLVKLNREDLLRKQRTFDNGSIPHQIHLGELHAILRRQEDFYPFLKDNREKIEKILTFRIPYYVGPLARGNSRFAWMTRKSEETITPWNFEEVVDKGASAQSFIERMTNFDKNLPNEKVLPKHSLLYEYFTVYNELTKVKYVTEGMRKPAFLSGEQKKAIVDLLFKTNRKVTVKQLKEDYFKKIECFDSVEISGVEDRFNASLGTYHDLLKIIKDKDFLDNEENEDILEDIVLTLTLFEDREMIEERLKTYAHLFDDKVMKQLKRRRYTGWGRLSRKLINGIRDKQSGKTILDFLKSDGFANRNFMQLIHDDSLTFKEDIQKAQVSGQGDSLHEHIANLAGSPAIKKGILQTVKVVDELVKVMGRHKPENIVIEMARENQTTQKGQKNSRERMKRIEEGIKELGSQILKEHPVENTQLQNEKLYLYYLQNGRDMYVDQELDINRLSDYDVDHIVPQSFLKDDSIDNKVLTRSDKARGKSDNVPSEEVVKKMKNYWRQLLNAKLITQRKFDNLTKAERGGLSELDKAGFIKRQLVETRQITKHVAQILDSRMNTKYDENDKLIREVKVITLKSKLVSDFRKDFQFYKVREINNYHHAHDAYLNAVVGTALIKKYPKLESEFVYGDYKVYDVRKMIAKSEQEIGKATAKYFFYSNIMNFFKTEITLANGEIRKRPLIETNGETGEIVWDKGRDFATVRKVLSMPQVNIVKKTEVQTGGFSKESILPKRNSDKLIARKKDWDPKKYGGFDSPTVAYSVLVVAKVEKGKSKKLKSVKELLGITIMERSSFEKNPIDFLEAKGYKEVKKDLIIKLPKYSLFELENGRKRMLASAGELQKGNELALPSKYVNFLYLASHYEKLKGSPEDNEQKQLFVEQHKHYLDEIIEQISEFSKRVILADANLDKVLSAYNKHRDKPIREQAENIIHLFTLTNLGAPAAFKYFDTTIDRKRYTSTKEVLDATLIHQSITGLYETRIDLSQLGGDGGGGGGSGGGGSGGGGSGGGGSGGTLNIEDEHRLHETSKEPDVSLGSTWLSDFPQAWAETGGMGLAVRQAPLIIPLKATSTPVSIKQYPMSQEARLGIKPHIQRLLDQGILVPCQSPWNTPLLPVKKPGTNDYRPVQDLREVNKRVEDIHPTVPNPYNLLSGLPPSHQWYTVLDLKDAFFCLRLHPTSQPLFAFEWRDPEMGISGQLTWTRLPQGFKNSPTLFDEALHRDLADFRIQHPDLILLQYVDDLLLAATSELDCQQGTRALLQTLGNLGYRASAKKAQICQKQVKYLGYLLKEGQRWLTEARKETVMGQPTPKTPRQLREFLGTAGFCRLWIPGFAEMAAPLYPLTKTGTLFNWGPDQQKAYQEIKQALLTAPALGLPDLTKPFELFVDEKQGYAKGVLTQKLGPWRRPVAYLSKKLDPVAAGWPPCLRMVAAIAVLTKDAGKLTMGQPLVILAPHAVEALVKQPPDRWLSNARMTHYQALLLDTDRVQFGPVVALNPATLLPLPEEGLQHNCLDILAEAHGTRPDLTDQPLPDADHTWYTDGSSLLQEGQRKAGAAVTTETEVIWAKALPAGTSAQRAELIALTQALKMAEGKKLNVYTDSRYAFATAHIHGEIYRRRGLLTSEGKEIKNKDEILALLKALFLPKRLSIIHCPGHQKGHSAEARGNRMADQAARKAAITETPDTSTLLAGKRTADGSEFEKRTADGSEFESPKKKAKVE

SEQ ID NO: 6157 - protein, 2033 aa, synthetic construct
MPAAKRVKLDGGDKKYSIGLDIGTNSVGWAVITDEYKVPSKKFKVLGNTDRHSIKKNLIGALLFDSGETAEATRLKRTARRRYTRRKNRICYLQEIFSNEMAKVDDSFFHRLEESFLVEEDKKHERHPIFGNIVDEVAYHEKYPTIYHLRKKLVDSTDKADLRLIYLALAHMIKFRGHFLIEGDLNPDNSDVDKLFIQLVQTYNQLFEENPINASGVDAKAILSARLSKSRRLENLIAQLPGEKKNGLFGNLIALSLGLTPNFKSNFDLAEDAKLQLSKDTYDDDLDNLLAQIGDQYADLFLAAKNLSDAILLSDILRVNTEITKAPLSASMIKRYDEHHQDLTLLKALVRQQLPEKYKEIFFDQSKNGYAGYIDGGASQEEFYKFIKPILEKMDGTEELLVKLNREDLLRKQRTFDNGSIPHQIHLGELHAILRRQEDFYPFLKDNREKIEKILTFRIPYYVGPLARGNSRFAWMTRKSEETITPWNFEEVVDKGASAQSFIERMTNFDKNLPNEKVLPKHSLLYEYFTVYNELTKVKYVTEGMRKPAFLSGEQKKAIVDLLFKTNRKVTVKQLKEDYFKKIECFDSVEISGVEDRFNASLGTYHDLLKIIKDKDFLDNEENEDILEDIVLTLTLFEDREMIEERLKTYAHLFDDKVMKQLKRRRYTGWGRLSRKLINGIRDKQSGKTILDFLKSDGFANRNFMQLIHDDSLTFKEDIQKAQVSGQGDSLHEHIANLAGSPAIKKGILQTVKVVDELVKVMGRHKPENIVIEMARENQTTQKGQKNSRERMKRIEEGIKELGSQILKEHPVENTQLQNEKLYLYYLQNGRDMYVDQELDINRLSDYDVDHIVPQSFLKDDSIDNKVLTRSDKARGKSDNVPSEEVVKKMKNYWRQLLNAKLITQRKFDNLTKAERGGLSELDKAGFIKRQLVETRQITKHVAQILDSRMNTKYDENDKLIREVKVITLKSKLVSDFRKDFQFYKVREINNYHHAHDAYLNAVVGTALIKKYPKLESEFVYGDYKVYDVRKMIAKSEQEIGKATAKYFFYSNIMNFFKTEITLANGEIRKRPLIETNGETGEIVWDKGRDFATVRKVLSMPQVNIVKKTEVQTGGFSKESILPKRNSDKLIARKKDWDPKKYGGFDSPTVAYSVLVVAKVEKGKSKKLKSVKELLGITIMERSSFEKNPIDFLEAKGYKEVKKDLIIKLPKYSLFELENGRKRMLASAGELQKGNELALPSKYVNFLYLASHYEKLKGSPEDNEQKQLFVEQHKHYLDEIIEQISEFSKRVILADANLDKVLSAYNKHRDKPIREQAENIIHLFTLTNLGAPAAFKYFDTTIDRKRYTSTKEVLDATLIHQSITGLYETRIDLSQLGGDGGGGGGSGGGGSGGGGSGGGGSGGGRDIMKDIKVRLMTDSPDDSQDLMIGAIESNLFADQISWKSDQPVWLNQWPLKQEKLQALQQLVTEQLQLGHLEESNSPWNTPVFVIKKKSGKWRLLQDLRAVNATMHDMGALQPGLPSPVAVPKGWEIIIIDLQDCFFNIKLHPEDCKRFAFSVPSPNFKRPYQRFQWKVLPQGMKNSPTLCQKFVDKAILTVRDKYQDSYIVHYMDDILLAHPSRSIVDEILTSMIQALNKHGLVVSTEKIQKYDNLKYLGTHIQGDSVSYQKLQIRTDKLRTLNDFQKLLGNINWIRPFLKLTTGELKPLFEILNGDSNPISTRKLTPEACKALQLMNERLSTARVKRLDLSQPWSLCILKTEYTPTACLWQDGVVEWIHLPHISPKVITPYDIFCTQLIIKGRHRSKELFSKDPDYIVVPYTKVQFDLLLQEKEDWPISLLGFLGEVHFHLPKDPLLTFTLQTAIIFPHMTSTTPLEKGIVIFTDGSANGRSVTYIQGREPIIKENTQNTAQQAEIVAVITAFEEVSQPFNLYTDSKYVTGLFPEIETATLSPRTKIYTELKHLQRLIHKRQEKFYIGHIRGHTGLPGPLAQGNAYADSLTRILTAGKRTADGSEFEKRTADGSEFESPKKKAKVE

SEQ ID NO: 6158 - protein, 2097 aa, synthetic construct
MPAAKRVKLDGGDKKYSIGLDIGTNSVGWAVITDEYKVPSKKFKVLGNTDRHSIKKNLIGALLFDSGETAEATRLKRTARRRYTRRKNRICYLQEIFSNEMAKVDDSFFHRLEESFLVEEDKKHERHPIFGNIVDEVAYHEKYPTIYHLRKKLVDSTDKADLRLIYLALAHMIKFRGHFLIEGDLNPDNSDVDKLFIQLVQTYNQLFEENPINASGVDAKAILSARLSKSRRLENLIAQLPGEKKNGLFGNLIALSLGLTPNFKSNFDLAEDAKLQLSKDTYDDDLDNLLAQIGDQYADLFLAAKNLSDAILLSDILRVNTEITKAPLSASMIKRYDEHHQDLTLLKALVRQQLPEKYKEIFFDQSKNGYAGYIDGGASQEEFYKFIKPILEKMDGTEELLVKLNREDLLRKQRTFDNGSIPHQIHLGELHAILRRQEDFYPFLKDNREKIEKILTFRIPYYVGPLARGNSRFAWMTRKSEETITPWNFEEVVDKGASAQSFIERMTNFDKNLPNEKVLPKHSLLYEYFTVYNELTKVKYVTEGMRKPAFLSGEQKKAIVDLLFKTNRKVTVKQLKEDYFKKIECFDSVEISGVEDRFNASLGTYHDLLKIIKDKDFLDNEENEDILEDIVLTLTLFEDREMIEERLKTYAHLFDDKVMKQLKRRRYTGWGRLSRKLINGIRDKQSGKTILDFLKSDGFANRNFMQLIHDDSLTFKEDIQKAQVSGQGDSLHEHIANLAGSPAIKKGILQTVKVVDELVKVMGRHKPENIVIEMARENQTTQKGQKNSRERMKRIEEGIKELGSQILKEHPVENTQLQNEKLYLYYLQNGRDMYVDQELDINRLSDYDVDHIVPQSFLKDDSIDNKVLTRSDKARGKSDNVPSEEVVKKMKNYWRQLLNAKLITQRKFDNLTKAERGGLSELDKAGFIKRQLVETRQITKHVAQILDSRMNTKYDENDKLIREVKVITLKSKLVSDFRKDFQFYKVREINNYHHAHDAYLNAVVGTALIKKYPKLESEFVYGDYKVYDVRKMIAKSEQEIGKATAKYFFYSNIMNFFKTEITLANGEIRKRPLIETNGETGEIVWDKGRDFATVRKVLSMPQVNIVKKTEVQTGGFSKESILPKRNSDKLIARKKDWDPKKYGGFDSPTVAYSVLVVAKVEKGKSKKLKSVKELLGITIMERSSFEKNPIDFLEAKGYKEVKKDLIIKLPKYSLFELENGRKRMLASAGELQKGNELALPSKYVNFLYLASHYEKLKGSPEDNEQKQLFVEQHKHYLDEIIEQISEFSKRVILADANLDKVLSAYNKHRDKPIREQAENIIHLFTLTNLGAPAAFKYFDTTIDRKRYTSTKEVLDATLIHQSITGLYETRIDLSQLGGDGGGGGGSGGGGSGGGGSGGGGSGGLDDEYRLYSPLVKPDQNIQFWLEQFPQAWAETAGMGLAKQVPPQVIQLKASATPVSVRQYPLSKEAQEGIRPHVQRLIQQGILVPVQSPWNTPLLPVRKPGTNDYRPVQDLREVNKRVQDIHPTVPNPYNLLCALPPQRSWYTVLDLKDAFFCLRLHPTSQPLFAFEWRDPGTGRTGQLTWTRLPQGFKNSPTIFNEALHRDLANFRIQHPQVTLLQYVDDLLLAGATKQDCLEGTKALLLELSDLGYRASAKKAQICRREVTYLGYSLRDGQRWLTEARKKTVVQIPAPTTAKQVREFLGKAGFCRLFIPGFATLAAPLYPLTKPKGEFSWAPEHQKAFDAIKKALLSAPALALPDVTKPFTLYVDERKGVARGVLTQTLGPWRRPVAYLSKKLDPVASGWPVCLKAIAAVAILVKDADKLTLGQNITVIAPHALENIVRQPPDRWMTNARMTHYQSLLLTERVTFAPPAALNPATLLPEETDEPVTHDCHQLLIEETGVRKDLTDIPLTGEVLTWFTDGSSYVVEGKRMAGAAVVDGTRTIWASSLPEGTSAQKAELMALTQALRLAEGKSINIYTDSRYAFATAHVHGAIYKQRGWLTSAGREIKNKEEILSLLEALHLPKRLAIIHCPGHQKAKDPISRGNQMADRVAKQAAQGVNLLPAGKRTADGSEFEKRTADGSEFESPKKKAKVE

SEQ ID NO: 6159 - protein, 2097 aa, synthetic construct; identical to SEQ ID NO: 6158

SEQ ID NO: 6160 - protein, 2096 aa, synthetic construct
MPAAKRVKLDGGDKKYSIGLDIGTNSVGWAVITDEYKVPSKKFKVLGNTDRHSIKKNLIGALLFDSGETAEATRLKRTARRRYTRRKNRICYLQEIFSNEMAKVDDSFFHRLEESFLVEEDKKHERHPIFGNIVDEVAYHEKYPTIYHLRKKLVDSTDKADLRLIYLALAHMIKFRGHFLIEGDLNPDNSDVDKLFIQLVQTYNQLFEENPINASGVDAKAILSARLSKSRRLENLIAQLPGEKKNGLFGNLIALSLGLTPNFKSNFDLAEDAKLQLSKDTYDDDLDNLLAQIGDQYADLFLAAKNLSDAILLSDILRVNTEITKAPLSASMIKRYDEHHQDLTLLKALVRQQLPEKYKEIFFDQSKNGYAGYIDGGASQEEFYKFIKPILEKMDGTEELLVKLNREDLLRKQRTFDNGSIPHQIHLGELHAILRRQEDFYPFLKDNREKIEKILTFRIPYYVGPLARGNSRFAWMTRKSEETITPWNFEEVVDKGASAQSFIERMTNFDKNLPNEKVLPKHSLLYEYFTVYNELTKVKYVTEGMRKPAFLSGEQKKAIVDLLFKTNRKVTVKQLKEDYFKKIECFDSVEISGVEDRFNASLGTYHDLLKIIKDKDFLDNEENEDILEDIVLTLTLFEDREMIEERLKTYAHLFDDKVMKQLKRRRYTGWGRLSRKLINGIRDKQSGKTILDFLKSDGFANRNFMQLIHDDSLTFKEDIQKAQVSGQGDSLHEHIANLAGSPAIKKGILQTVKVVDELVKVMGRHKPENIVIEMARENQTTQKGQKNSRERMKRIEEGIKELGSQILKEHPVENTQLQNEKLYLYYLQNGRDMYVDQELDINRLSDYDVDHIVPQSFLKDDSIDNKVLTRSDKARGKSDNVPSEEVVKKMKNYWRQLLNAKLITQRKFDNLTKAERGGLSELDKAGFIKRQLVETRQITKHVAQILDSRMNTKYDENDKLIREVKVITLKSKLVSDFRKDFQFYKVREINNYHHAHDAYLNAVVGTALIKKYPKLESEFVYGDYKVYDVRKMIAKSEQEIGKATAKYFFYSNIMNFFKTEITLANGEIRKRPLIETNGETGEIVWDKGRDFATVRKVLSMPQVNIVKKTEVQTGGFSKESILPKRNSDKLIARKKDWDPKKYGGFDSPTVAYSVLVVAKVEKGKSKKLKSVKELLGITIMERSSFEKNPIDFLEAKGYKEVKKDLIIKLPKYSLFELENGRKRMLASAGELQKGNELALPSKYVNFLYLASHYEKLKGSPEDNEQKQLFVEQHKHYLDEIIEQISEFSKRVILADANLDKVLSAYNKHRDKPIREQAENIIHLFTLTNLGAPAAFKYFDTTIDRKRYTSTKEVLDATLIHQSITGLYETRIDLSQLGGDGGGGGGSGGGGSGGGGSGGGGSGGVPWLMKKPLQLTVLVPLHEYQERLLQQTALPKEQKELLQKLFLKYDALWQHWENQVGHRRIKPHNIATGTLAPRPQKQYPINPKAKPSIQIVIDDLLKQGVLIQQNSTMNTPVYPVPKPDGKWRMVLDYREVNKTIPLIAAQNQHSAGILSSIYRGKYKTTLDLTNGFWAHPITPESYWLTAFTWQGKQYCWTRLPQGFLNSPALFTADVVDLLKEIPNVQAYVDDIYISHDDPQEHLEQLEKIFSILLNAGYVVSLKKSEIAQREVEFLGFNITKEGRGLTDTFKQKLLNITPPKDLKQLQSILGLLNFARNFIPNYSELVKPLYTIVANANGKFISWTEDNSNQLQHIISVLNQADNLEERNPETRLIIKVNSSPSAGYIRYYNEGSKRPIMYVNYIFSKAEAKFTQTEKLLTTMHKGLIKAMDLAMGQEILVYSPIVSMTKIQRTPLPERKALPVRWITWMTYLEDPRIQFHYDKSLPELQQIPNVTEDVIAKTKHPSEFAMVFYTDGSAIKHPDVNKSHSAGMGIAQVQFIPEYKIVHQWSIPLGDHTAQLAEIAAVEFACKKALKISGPVLIVTDSFYVAESANKELPYWKSNGFLNNKKKPLRHVSKWKSIAECLQLKPDIIIMHEKGHQQPMTTLHTEGNNLADKLATQGSYVVHAGKRTADGSEFEKRTADGSEFESPKKKAKVE

SEQ ID NO: 6161 - protein, 2185 aa, synthetic construct
MPAAKRVKLDGGDKKYSIGLDIGTNSVGWAVITDEYKVPSKKFKVLGNTDRHSIKKNLIGALLFDSGETAEATRLKRTARRRYTRRKNRICYLQEIFSNEMAKVDDSFFHRLEESFLVEEDKKHERHPIFGNIVDEVAYHEKYPTIYHLRKKLVDSTDKADLRLIYLALAHMIKFRGHFLIEGDLNPDNSDVDKLFIQLVQTYNQLFEENPINASGVDAKAILSARLSKSRRLENLIAQLPGEKKNGLFGNLIALSLGLTPNFKSNFDLAEDAKLQLSKDTYDDDLDNLLAQIGDQYADLFLAAKNLSDAILLSDILRVNTEITKAPLSASMIKRYDEHHQDLTLLKALVRQQLPEKYKEIFFDQSKNGYAGYIDGGASQEEFYKFIKPILEKMDGTEELLVKLNREDLLRKQRTFDNGSIPHQIHLGELHAILRRQEDFYPFLKDNREKIEKILTFRIPYYVGPLARGNSRFAWMTRKSEETITPWNFEEVVDKGASAQSFIERMTNFDKNLPNEKVLPKHSLLYEYFTVYNELTKVKYVTEGMRKPAFLSGEQKKAIVDLLFKTNRKVTVKQLKEDYFKKIECFDSVEISGVEDRFNASLGTYHDLLKIIKDKDFLDNEENEDILEDIVLTLTLFEDREMIEERLKTYAHLFDDKVMKQLKRRRYTGWGRLSRKLINGIRDKQSGKTILDFLKSDGFANRNFMQLIHDDSLTFKEDIQKAQVSGQGDSLHEHIANLAGSPAIKKGILQTVKVVDELVKVMGRHKPENIVIEMARENQTTQKGQKNSRERMKRIEEGIKELGSQILKEHPVENTQLQNEKLYLYYLQNGRDMYVDQELDINRLSDYDVDHIVPQSFLKDDSIDNKVLTRSDKARGKSDNVPSEEVVKKMKNYWRQLLNAKLITQRKFDNLTKAERGGLSELDKAGFIKRQLVETRQITKHVAQILDSRMNTKYDENDKLIREVKVITLKSKLVSDFRKDFQFYKVREINNYHHAHDAYLNAVVGTALIKKYPKLESEFVYGDYKVYDVRKMIAKSEQEIGKATAKYFFYSNIMNFFKTEITLANGEIRKRPLIETNGETGEIVWDKGRDFATVRKVLSMPQVNIVKKTEVQTGGFSKESILPKRNSDKLIARKKDWDPKKYGGFDSPTVAYSVLVVAKVEKGKSKKLKSVKELLGITIMERSSFEKNPIDFLEAKGYKEVKKDLIIKLPKYSLFELENGRKRMLASAGELQKGNELALPSKYVNFLYLASHYEKLKGSPEDNEQKQLFVEQHKHYLDEIIEQISEFSKRVILADANLDKVLSAYNKHRDKPIREQAENIIHLFTLTNLGAPAAFKYFDTTIDRKRYTSTKEVLDATLIHQSITGLYETRIDLSQLGGDGGGGGGSGGGGSGGGGSGGGGSGGMDPLQLLQPLEAEIKGTKLKAHWNSGATITCVPQAFLEEEVPIKNIWIKTIHGEKEQPVYYLTFKIQGRKVEAEVISSPYDYILVSPSDIPWLMKKPLQLTTLVPLQEYEERLLKQTMLTGSYKEKLQSLFLKYDALWQHWENQVGHRRIKPHHIATGTVNPRPQKQYPINPKAKASIQTVINDLLKQGVLIQQNSIMNTPVYPVPKPDGKWRMVLDYREVNKTIPLIAAQNQHSAGILSSIFRGKYKTTLDLSNGFWAHSITPESYWLTAFTWLGQQYCWTRLPQGFLNSPALFTADVVDLLKEVPNVQVYVDDIYISHDDPREHLEQLEKVFSLLLNAGYVVSLKKSEIAQHEVEFLGFNITKEGRGLTETFKQKLLNITPPRDLKQLQSILGLLNFARNFIPNFSELVKPLYNIIATANGKYITWTTDNSQQLQNIISMLNSAENLEERNPEVRLIMKVNTSPSAGYIRFYNEFAKRPIMYLNYVYTKAEVKFTNTEKLLTTIHKGLIKALDLGMGQEILVYSPIVSMTKIQKTPLPERKALPIRWITWMSYLEDPRIQFHYDKTLPELQQVPTVTDDIIAKIKHPSEFSMVFYTDGSAIKHPNVNKSHNAGMGIAQVQFKPEFTVINTWSIPLGDHTAQLAEVAAVEFACKKALKIDGPVLIVTDSFYVAESVNKELPYWQSNGFFNNKKKPLKHVSKWKSIADCIQLKPDIIIIHEKGHQPTASTFHTEGNNLADKLATQGSYVVNAGKRTADGSEFEKRTADGSEFESPKKKAKVE

SEQ ID NO: 6162 - protein, 2096 aa, synthetic construct
MPAAKRVKLDGGDKKYSIGLDIGTNSVGWAVITDEYKVPSKKFKVLGNTDRHSIKKNLIGALLFDSGETAEATRLKRTARRRYTRRKNRICYLQEIFSNEMAKVDDSFFHRLEESFLVEEDKKHERHPIFGNIVDEVAYHEKYPTIYHLRKKLVDSTDKADLRLIYLALAHMIKFRGHFLIEGDLNPDNSDVDKLFIQLVQTYNQLFEENPINASGVDAKAILSARLSKSRRLENLIAQLPGEKKNGLFGNLIALSLGLTPNFKSNFDLAEDAKLQLSKDTYDDDLDNLLAQIGDQYADLFLAAKNLSDAILLSDILRVNTEITKAPLSASMIKRYDEHHQDLTLLKALVRQQLPEKYKEIFFDQSKNGYAGYIDGGASQEEFYKFIKPILEKMDGTEELLVKLNREDLLRKQRTFDNGSIPHQIHLGELHAILRRQEDFYPFLKDNREKIEKILTFRIPYYVGPLARGNSRFAWMTRKSEETITPWNFEEVVDKGASAQSFIERMTNFDKNLPNEKVLPKHSLLYEYFTVYNELTKVKYVTEGMRKPAFLSGEQKKAIVDLLFKTNRKVTVKQLKEDYFKKIECFDSVEISGVEDRFNASLGTYHDLLKIIKDKDFLDNEENEDILEDIVLTLTLFEDREMIEERLKTYAHLFDDKVMKQLKRRRYTGWGRLSRKLINGIRDKQSGKTILDFLKSDGFANRNFMQLIHDDSLTFKEDIQKAQVSGQGDSLHEHIANLAGSPAIKKGILQTVKVVDELVKVMGRHKPENIVIEMARENQTTQKGQKNSRERMKRIEEGIKELGSQILKEHPVENTQLQNEKLYLYYLQNGRDMYVDQELDINRLSDYDVDHIVPQSFLKDDSIDNKVLTRSDKARGKSDNVPSEEVVKKMKNYWRQLLNAKLITQRKFDNLTKAERGGLSELDKAGFIKRQLVETRQITKHVAQILDSRMNTKYDENDKLIREVKVITLKSKLVSDFRKDFQFYKVREINNYHHAHDAYLNAVVGTALIKKYPKLESEFVYGDYKVYDVRKMIAKSEQEIGKATAKYFFYSNIMNFFKTEITLANGEIRKRPLIETNGETGEIVWDKGRDFATVRKVLSMPQVNIVKKTEVQTGGFSKESILPKRNSDKLIARKKDWDPKKYGGFDSPTVAYSVLVVAKVEKGKSKKLKSVKELLGITIMERSSFEKNPIDFLEAKGYKEVKKDLIIKLPKYSLFELENGRKRMLASAGELQKGNELALPSKYVNFLYLASHYEKLKGSPEDNEQKQLFVEQHKHYLDEIIEQISEFSKRVILADANLDKVLSAYNKHRDKPIREQAENIIHLFTLTNLGAPAAFKYFDTTIDRKRYTSTKEVLDATLIHQSITGLYETRIDLSQLGGDGGGGGGSGGGGSGGGGSGGGGSGGIPWLMKKPLQLTTLVPLQEYEERLLKQTMLTGSYKEKLQSLFLKYDALWQHWENQVGHRRIKPHHIATGTVNPRPQKQYPINPKAKASIQTVINDLLKQGVLIQQNSIMNTPVYPVPKPDGKWRMVLDYREVNKTIPLIAAQNQHSAGILSSIFRGKYKTTLDLSNGFWAHSITPESYWLTAFTWLGQQYCWTRLPQGFLNSPALFNADVVDLLKEVPNVQVYVDDIYISHDDPREHLEQLEKVFSLLLNAGYVVSLKKSEIAQHEVEFLGFNITKEGRGLTETFKQKLLNITPPRDLKQLQSILGKLNFARNFIPNFSELVKPLYNIIATAPGKYITWTTDNSQQLQNIISMLNSAENLEERNPEVRLIMKVNTSPSAGYIRFYNEFAKRPIMYLNYVYTKAEVKFTNTEKLLTTIHKGLIKALDLGMGQEILVYSPIVSMTKIQKTPLPERKALPIRWITWMSYLEDPRIQFHYDKTLPELQQVPTVTDDIIAKIKHPSEFSMVFYTDGSAIKHPNVNKSHNAGMGIAQVQFKPEFTVINTWSIPLGDHTAQLAEVAAVEFACKKALKIDGPVLIVTDSFYVAESVNKELPYWQSNGFFNNKKKPLKHVSKWKSIADCIQLKPDIIIIHEKGHQPTASTFHTEGNNLADKLATQGSYVVNAGKRTADGSEFEKRTADGSEFESPKKKAKVE

SEQ ID NO: 6163 - protein, 2103 aa, synthetic construct
MPAAKRVKLDGGDKKYSIGLDIGTNSVGWAVITDEYKVPSKKFKVLGNTDRHSIKKNLIGALLFDSGETAEATRLKRTARRRYTRRKNRICYLQEIFSNEMAKVDDSFFHRLEESFLVEEDKKHERHPIFGNIVDEVAYHEKYPTIYHLRKKLVDSTDKADLRLIYLALAHMIKFRGHFLIEGDLNPDNSDVDKLFIQLVQTYNQLFEENPINASGVDAKAILSARLSKSRRLENLIAQLPGEKKNGLFGNLIALSLGLTPNFKSNFDLAEDAKLQLSKDTYDDDLDNLLAQIGDQYADLFLAAKNLSDAILLSDILRVNTEITKAPLSASMIKRYDEHHQDLTLLKALVRQQLPEKYKEIFFDQSKNGYAGYIDGGASQEEFYKFIKPILEKMDGTEELLVKLNREDLLRKQRTFDNGSIPHQIHLGELHAILRRQEDFYPFLKDNREKIEKILTFRIPYYVGPLARGNSRFAWMTRKSEETITPWNFEEVVDKGASAQSFIERMTNFDKNLPNEKVLPKHSLLYEYFTVYNELTKVKYVTEGMRKPAFLSGEQKKAIVDLLFKTNRKVTVKQLKEDYFKKIECFDSVEISGVEDRFNASLGTYHDLLKIIKDKDFLDNEENEDILEDIVLTLTLFEDREMIEERLKTYAHLFDDKVMKQLKRRRYTGWGRLSRKLINGIRDKQSGKTILDFLKSDGFANRNFMQLIHDDSLTFKEDIQKAQVSGQGDSLHEHIANLAGSPAIKKGILQTVKVVDELVKVMGRHKPENIVIEMARENQTTQKGQKNSRERMKRIEEGIKELGSQILKEHPVENTQLQNEKLYLYYLQNGRDMYVDQELDINRLSDYDVDHIVPQSFLKDDSIDNKVLTRSDKARGKSDNVPSEEVVKKMKNYWRQLLNAKLITQRKFDNLTKAERGGLSELDKAGFIKRQLVETRQITKHVAQILDSRMNTKYDENDKLIREVKVITLKSKLVSDFRKDFQFYKVREINNYHHAHDAYLNAVVGTALIKKYPKLESEFVYGDYKVYDVRKMIAKSEQEIGKATAKYFFYSNIMNFFKTEITLANGEIRKRPLIETNGETGEIVWDKGRDFATVRKVLSMPQVNIVKKTEVQTGGFSKESILPKRNSDKLIARKKDWDPKKYGGFDSPTVAYSVLVVAKVEKGKSKKLKSVKELLGITIMERSSFEKNPIDFLEAKGYKEVKKDLIIKLPKYSLFELENGRKRMLASAGELQKGNELALPSKYVNFLYLASHYEKLKGSPEDNEQKQLFVEQHKHYLDEIIEQISEFSKRVILADANLDKVLSAYNKHRDKPIREQAENIIHLFTLTNLGAPAAFKYFDTTIDRKRYTSTKEVLDATLIHQSITGLYETRIDLSQLGGDGGGGGGSGGGGSGGGGSGGGGSGGVLNLEEEYRLHEKPVPSSIDPSWLQLFPTVWAERAGMGLANQVPPVVVELRSGASPVAVRQYPMSKEAREGIRPHIQRFLDLGVLVPCQSPWNTPLLPVKKPGTNDYRPVQDLREINKRVQDIHPTVPNPYNLLSSLPPSHTWYSVLDLKDAFFCLKLHPNSQPLFAFEWRDPEKGNTGQLTWTRLPQGFKNSPTLFNEALHRDLAPFRALNPQVVLLQYVDDLLVAAPTYRDCKEGTQKLLQELSKLGYRVSAKKAQLCQKEVTYLGYLLKEGKRWLTPARKATVMKIPPPTTPRQVREFLGKAGFCRLFIPGFASLAAPLYPLTKPSIPFIWTEEHQKAFDRIKEALLSAPALALPDLTKPFTLYVDERAGVARGVLTQTLGPWRRPVAYLSKKLDPVASGWPTCLKAVAAVALLLKDADKLTLGQNVTVIASHSLESIVRQPPDRWMTNARMTHYQSLLLNERVSFAPPAVLNPATLLPVESEATPVHRCSEILAEETGTRRDLKDQPLPGVPAWYTDGSSFIAEGKRRAGAAIVDGKRTVWASSLPEGTSAQKAELVALTQALRLAEGKDINIYTDSRYAFATAHIHGAIYKQRGWLTSAGKDIKNKEEILALLEAIHLPKRVAIIHCPGHQKGNDPVATGNRRADEAAKQAALSTRVLAETTKPAGKRTADGSEFEKRTADGSEFESPKKKAKVE

SEQ ID NO: 6164 - protein, 2112 aa, synthetic construct
MPAAKRVKLDGGDKKYSIGLDIGTNSVGWAVITDEYKVPSKKFKVLGNTDRHSIKKNLIGALLFDSGETAEATRLKRTARRRYTRRKNRICYLQEIFSNEMAKVDDSFFHRLEESFLVEEDKKHERHPIFGNIVDEVAYHEKYPTIYHLRKKLVDSTDKADLRLIYLALAHMIKFRGHFLIEGDLNPDNSDVDKLFIQLVQTYNQLFEENPINASGVDAKAILSARLSKSRRLENLIAQLPGEKKNGLFGNLIALSLGLTPNFKSNFDLAEDAKLQLSKDTYDDDLDNLLAQIGDQYADLFLAAKNLSDAILLSDILRVNTEITKAPLSASMIKRYDEHHQDLTLLKALVRQQLPEKYKEIFFDQSKNGYAGYIDGGASQEEFYKFIKPILEKMDGTEELLVKLNREDLLRKQRTFDNGSIPHQIHLGELHAILRRQEDFYPFLKDNREKIEKILTFRIPYYVGPLARGNSRFAWMTRKSEETITPWNFEEVVDKGASAQSFIERMTNFDKNLPNEKVLPKHSLLYEYFTVYNELTKVKYVTEGMRKPAFLSGEQKKAIVDLLFKTNRKVTVKQLKEDYFKKIECFDSVEISGVEDRFNASLGTYHDLLKIIKDKDFLDNEENEDILEDIVLTLTLFEDREMIEERLKTYAHLFDDKVMKQLKRRRYTGWGRLSRKLINGIRDKQSGKTILDFLKSDGFANRNFMQLIHDDSLTFKEDIQKAQVSGQGDSLHEHIANLAGSPAIKKGILQTVKVVDELVKVMGRHKPENIVIEMARENQTTQKGQKNSRERMKRIEEGIKELGSQILKEHPVENTQLQNEKLYLYYLQNGRDMYVDQELDINRLSDYDVDHIVPQSFLKDDSIDNKVLTRSDKARGKSDNVPSEEVVKKMKNYWRQLLNAKLITQRKFDNLTKAERGGLSELDKAGFIKRQLVETRQITKHVAQILDSRMNTKYDENDKLIREVKVITLKSKLVSDFRKDFQFYKVREINNYHHAHDAYLNAVVGTALIKKYPKLESEFVYGDYKVYDVRKMIAKSEQEIGKATAKYFFYSNIMNFFKTEITLANGEIRKRPLIETNGETGEIVWDKGRDFATVRKVLSMPQVNIVKKTEVQTGGFSKESILPKRNSDKLIARKKDWDPKKYGGFDSPTVAYSVLVVAKVEKGKSKKLKSVKELLGITIMERSSFEKNPIDFLEAKGYKEVKKDLIIKLPKYSLFELENGRKRMLASAGELQKGNELALPSKYVNFLYLASHYEKLKGSPEDNEQKQLFVEQHKHYLDEIIEQISEFSKRVILADANLDKVLSAYNKHRDKPIREQAENIIHLFTLTNLGAPAAFKYFDTTIDRKRYTSTKEVLDATLIHQSITGLYETRIDLSQLGGDGGGGGGSGGGGSGGGGSGGGGSGGGGSGGTAPLEEEYRLFLEAPIQNVTLLEQWKREIPKVWAEINPPGLASTQAPIHVQLLSTALPVRVRQYPITLEAKRSLRETIRKFRAAGILRPVHSPWNTPLLPVRKSGTSEYRMVQDLREVNKRVETIHPTVPNPYTLLSLLPPDRIWYSVLDLKDAFFCIPLAPESQLIFAFEWADAEEGESGQLTWTRLPQGFKNSPTLFNEALNRDLQGFRLDHPSVSLLQYVDDLLIAADTQAACLSATRDLLMTLAELGYRVSGKKAQLCQEEVTYLGFKIHKGSRSLSNSRTQAILQIPVPKTKRQVREFLGTIGYCRLWIPGFAELAQPLYAATRPGNDPLVWGEKEEEAFQSLKLALTQPPALALPSLDKPFQLFVEETSGAAKGVLTQALGPWKRPVAYLSKRLDPVAAGWPRCLRAIAAAALLTREASKLTFGQDIEITSSHNLESLLRSPPDKWLTNARITQYQVLLLDPPRVRFKQTAALNPATLLPETDDTLPIHHCLDTLDSLTSTRPDLTDQPLAQAEATLFTDGSSYIRDGKRYAGAAVVTLDSVIWAEPLPIGTSAQKAELIALTKALEWSKDKSVNIYTDSRYAFATLHVHGMIYRERGWLTAGGKAIKNAPEILALLTAVWLPKRVAVMHCKGHQKDDAPTSTGNRRADEVAREVAIRPLSTQATISAGKRTADGSEFEKRTADGSEFESPKKKAKVE

SEQ ID NO: 6165 - protein, 2112 aa, synthetic construct
MPAAKRVKLDGGDKKYSIGLDIGTNSVGWAVITDEYKVPSKKFKVLGNTDRHSIKKNLIGALLFDSGETAEATRLKRTARRRYTRRKNRICYLQEIFSNEMAKVDDSFFHRLEESFLVEEDKKHERHPIFGNIVDEVAYHEKYPTIYHLRKKLVDSTDKADLRLIYLALAHMIKFRGHFLIEGDLNPDNSDVDKLFIQLVQTYNQLFEENPINASGVDAKAILSARLSKSRRLENLIAQLPGEKKNGLFGNLIALSLGLTPNFKSNFDLAEDAKLQLSKDTYDDDLDNLLAQIGDQYADLFLAAKNLSDAILLSDILRVNTEITKAPLSASMIKRYDEHHQDLTLLKALVRQQLPEKYKEIFFDQSKNGYAGYIDGGASQEEFYKFIKPILEKMDGTEELLVKLNREDLLRKQRTFDNGSIPHQIHLGELHAILRRQEDFYPFLKDNREKIEKILTFRIPYYVGPLARGNSRFAWMTRKSEETITPWNFEEVVDKGASAQSFIERMTNFDKNLPNEKVLPKHSLLYEYFTVYNELTKVKYVTEGMRKPAFLSGEQKKAIVDLLFKTNRKVTVKQLKEDYFKKIECFDSVEISGVEDRFNASLGTYHDLLKIIKDKDFLDNEENEDILEDIVLTLTLFEDREMIEERLKTYAHLFDDKVMKQLKRRRYTGWGRLSRKLINGIRDKQSGKTILDFLKSDGFANRNFMQLIHDDSLTFKEDIQKAQVSGQGDSLHEHIANLAGSPAIKKGILQTVKVVDELVKVMGRHKPENIVIEMARENQTTQKGQKNSRERMKRIEEGIKELGSQILKEHPVENTQLQNEKLYLYYLQNGRDMYVDQELDINRLSDYDVDHIVPQSFLKDDSIDNKVLTRSDKARGKSDNVPSEEVVKKMKNYWRQLLNAKLITQRKFDNLTKAERGGLSELDKAGFIKRQLVETRQITKHVAQILDSRMNTKYDENDKLIREVKVITLKSKLVSDFRKDFQFYKVREINNYHHAHDAYLNAVVGTALIKKYPKLESEFVYGDYKVYDVRKMIAKSEQEIGKATAKYFFYSNIMNFFKTEITLANGEIRKRPLIETNGETGEIVWDKGRDFATVRKVLSMPQVNIVKKTEVQTGGFSKESILPKRNSDKLIARKKDWDPKKYGGFDSPTVAYSVLVVAKVEKGKSKKLKSVKELLGITIMERSSFEKNPIDFLEAKGYKEVKKDLIIKLPKYSLFELENGRKRMLASAGELQKGNELALPSKYVNFLYLASHYEKLKGSPEDNEQKQLFVEQHKHYLDEIIEQISEFSKRVILADANLDKVLSAYNKHRDKPIREQAENIIHLFTLTNLGAPAAFKYFDTTIDRKRYTSTKEVLDATLIHQSITGLYETRIDLSQLGGDGGGGGGSGGGGSGGGGSGGGGSGGGGSGGTAPLEEEYRLFLEAPIQNVTLLEQWKREIPKVWAEINPPGLASTQAPIHVQLLSTALPVRVRQYPITLEAKRSLRETIRKFRAAGILRPVHSPWNTPLLPVRKSGTSEYRMVQDLREVNKRVETIHPTVPNPYTLLSLLPPDRIWYSVLDLKDAFFCIPLAPESQLIFAFEWADAEEGESGQLTWTRLPQGFKNSPTLFNEALNRDLQGFRLDHPSVSLLQYVDDLLIAADTQAACLSATRDLLMTLAELGYRVSGKKAQLCQEEVTYLGFKIHKGSRSLSNSRTQAILQIPVPKTKRQVREFLGKIGYCRLFIPGFAELAQPLYAATRPGNDPLVWGEKEEEAFQSLKLALTQPPALALPSLDKPFQLFVEETSGAAKGVLTQALGPWKRPVAYLSKRLDPVAAGWPRCLRAIAAAALLTREASKLTFGQDIEITSSHNLESLLRSPPDKWLTNARITQYQVLLLDPPRVRFKQTAALNPATLLPETDDTLPIHHCLDTLDSLTSTRPDLTDQPLAQAEATLFTDGSSYIRDGKRYAGAAVVTLDSVIWAEPLPIGTSAQKAELIALTKALEWSKDKSVNIYTDSRYAFATLHVHGMIYRERGWLTAGGKAIKNAPEILALLTAVWLPKRVAVMHCKGHQKDDAPTSTGNRRADEVAREVAIRPLSTQATISAGKRTADGSEFEKRTADGSEFESPKKKAKVE

SEQ ID NO: 6166 - protein, 2116 aa, synthetic construct
MPAAKRVKLDGGDKKYSIGLDIGTNSVGWAVITDEYKVPSKKFKVLGNTDRHSIKKNLIGALLFDSGETAEATRLKRTARRRYTRRKNRICYLQEIFSNEMAKVDDSFFHRLEESFLVEEDKKHERHPIFGNIVDEVAYHEKYPTIYHLRKKLVDSTDKADLRLIYLALAHMIKFRGHFLIEGDLNPDNSDVDKLFIQLVQTYNQLFEENPINASGVDAKAILSARLSKSRRLENLIAQLPGEKKNGLFGNLIALSLGLTPNFKSNFDLAEDAKLQLSKDTYDDDLDNLLAQIGDQYADLFLAAKNLSDAILLSDILRVNTEITKAPLSASMIKRYDEHHQDLTLLKALVRQQLPEKYKEIFFDQSKNGYAGYIDGGASQEEFYKFIKPILEKMDGTEELLVKLNREDLLRKQRTFDNGSIPHQIHLGELHAILRRQEDFYPFLKDNREKIEKILTFRIPYYVGPLARGNSRFAWMTRKSEETITPWNFEEVVDKGASAQSFIERMTNFDKNLPNEKVLPKHSLLYEYFTVYNELTKVKYVTEGMRKPAFLSGEQKKAIVDLLFKTNRKVTVKQLKEDYFKKIECFDSVEISGVEDRFNASLGTYHDLLKIIKDKDFLDNEENEDILEDIVLTLTLFEDREMIEERLKTYAHLFDDKVMKQLKRRRYTGWGRLSRKLINGIRDKQSGKTILDFLKSDGFANRNFMQLIHDDSLTFKEDIQKAQVSGQGDSLHEHIANLAGSPAIKKGILQTVKVVDELVKVMGRHKPENIVIEMARENQTTQKGQKNSRERMKRIEEGIKELGSQILKEHPVENTQLQNEKLYLYYLQNGRDMYVDQELDINRLSDYDVDHIVPQSFLKDDSIDNKVLTRSDKARGKSDNVPSEEVVKKMKNYWRQLLNAKLITQRKFDNLTKAERGGLSELDKAGFIKRQLVETRQITKHVAQILDSRMNTKYDENDKLIREVKVITLKSKLVSDFRKDFQFYKVREINNYHHAHDAYLNAVVGTALIKKYPKLESEFVYGDYKVYDVRKMIAKSEQEIGKATAKYFFYSNIMNFFKTEITLANGEIRKRPLIETNGETGEIVWDKGRDFATVRKVLSMPQVNIVKKTEVQTGGFSKESILPKRNSDKLIARKKDWDPKKYGGFDSPTVAYSVLVVAKVEKGKSKKLKSVKELLGITIMERSSFEKNPIDFLEAKGYKEVKKDLIIKLPKYSLFELENGRKRMLASAGELQKGNELALPSKYVNFLYLASHYEKLKGSPEDNEQKQLFVEQHKHYLDEIIEQISEFSKRVILADANLDKVLSAYNKHRDKPIREQAENIIHLFTLTNLGAPAAFKYFDTTIDRKRYTSTKEVLDATLIHQSITGLYETRIDLSQLGGDGGGGGGSGGGGSGGGGSGGGGSGGGGSGGTVSLQDEHRLFDIPVTTSLPDVWLQDFPQAWAETGGLGRAKCQAPIIIDLKPTAVPVSIKQYPMSLEAHMGIRQHIIKFLELGVLRPCRSPWNTPLLPVKKPGTQDYRPVQDLREINKRTVDIHPTVPNPYNLLSTLKPDYSWYTVLDLKDAFFCLPLAPQSQELFAFEWKDPERGISGQLTWTRLPQGFKNSPTLFDEALHRDLTDFRTQHPEVTLLQYVDDLLLAAPTKKACTQGTRHLLQELGEKGYRASAKKAQICQTKVTYLGYILSEGKRWLTPGRIETVARIPPPRNPREVREFLGTAGFCRLWIPGFAELAAPLYALTKESTPFTWQTEHQLAFEALKKALLSAPALGLPDTSKPFTLFLDERQGIAKGVLTQKLGPWKRPVAYLSKKLDPVAAGWPPCLRIMAATAMLVKDSAKLTLGQPLTVITPHTLEAIVRQPPDRWITNARLTHYQALLLDTDRVQFGPPVTLNPATLLPVPENQPSPHDCRQVLAETHGTREDLKDQELPDADHTWYTDGSSYLDSGTRRAGAAVVDGHNTIWAQSLPPGTSAQKAELIALTKALELSKGKKANIYTDSRYAFATAHTHGSIYERRGLLTSEGKEIKNKAEIIALLKALFLPQEVAIIHCPGHQKGQDPVAVGNRQADRVARQAAMAEVLTLATEPDNTSHITAGKRTADGSEFEKRTADGSEFESPKKKAKVE

SEQ ID NO: 6167 - protein, 2015 aa, synthetic construct
MPAAKRVKLDGGDKKYSIGLDIGTNSVGWAVITDEYKVPSKKFKVLGNTDRHSIKKNLIGALLFDSGETAEATRLKRTARRRYTRRKNRICYLQEIFSNEMAKVDDSFFHRLEESFLVEEDKKHERHPIFGNIVDEVAYHEKYPTIYHLRKKLVDSTDKADLRLIYLALAHMIKFRGHFLIEGDLNPDNSDVDKLFIQLVQTYNQLFEENPINASGVDAKAILSARLSKSRRLENLIAQLPGEKKNGLFGNLIALSLGLTPNFKSNFDLAEDAKLQLSKDTYDDDLDNLLAQIGDQYADLFLAAKNLSDAILLSDILRVNTEITKAPLSASMIKRYDEHHQDLTLLKALVRQQLPEKYKEIFFDQSKNGYAGYIDGGASQEEFYKFIKPILEKMDGTEELLVKLNREDLLRKQRTFDNGSIPHQIHLGELHAILRRQEDFYPFLKDNREKIEKILTFRIPYYVGPLARGNSRFAWMTRKSEETITPWNFEEVVDKGASAQSFIERMTNFDKNLPNEKVLPKHSLLYEYFTVYNELTKVKYVTEGMRKPAFLSGEQKKAIVDLLFKTNRKVTVKQLKEDYFKKIECFDSVEISGVEDRFNASLGTYHDLLKIIKDKDFLDNEENEDILEDIVLTLTLFEDREMIEERLKTYAHLFDDKVMKQLKRRRYTGWGRLSRKLINGIRDKQSGKTILDFLKSDGFANRNFMQLIHDDSLTFKEDIQKAQVSGQGDSLHEHIANLAGSPAIKKGILQTVKVVDELVKVMGRHKPENIVIEMARENQTTQKGQKNSRERMKRIEEGIKELGSQILKEHPVENTQLQNEKLYLYYLQNGRDMYVDQELDINRLSDYDVDHIVPQSFLKDDSIDNKVLTRSDKARGKSDNVPSEEVVKKMKNYWRQLLNAKLITQRKFDNLTKAERGGLSELDKAGFIKRQLVETRQITKHVAQILDSRMNTKYDENDKLIREVKVITLKSKLVSDFRKDFQFYKVREINNYHHAHDAYLNAVVGTALIKKYPKLESEFVYGDYKVYDVRKMIAKSEQEIGKATAKYFFYSNIMNFFKTEITLANGEIRKRPLIETNGETGEIVWDKGRDFATVRKVLSMPQVNIVKKTEVQTGGFSKESILPKRNSDKLIARKKDWDPKKYGGFDSPTVAYSVLVVAKVEKGKSKKLKSVKELLGITIMERSSFEKNPIDFLEAKGYKEVKKDLIIKLPKYSLFELENGRKRMLASAGELQKGNELALPSKYVNFLYLASHYEKLKGSPEDNEQKQLFVEQHKHYLDEIIEQISEFSKRVILADANLDKVLSAYNKHRDKPIREQAENIIHLFTLTNLGAPAAFKYFDTTIDRKRYTSTKEVLDATLIHQSITGLYETRIDLSQLGGDGGGGGGSGGGGSGGGGSGGGGSGGGGSGGGVLDAPPSHIGLEHLPPPPEVPQFPLNLERLQALQDLVHRSLEAGYISPWDGPGNNPVFPVRKPNGAWRFVHDLRVTNALTKPIPALSPGPPDLTAIPTHLPHIICLDLKDAFFQIPVEDRFRSYFAFTLPTPGGLQPHRRFAWRVLPQGFINSPALFQRALQEPLRQVSAAFSQSLLVSYMDDILYVSPTEEQRLQCYQTMAAHLRDLGFQVASEKTRQTPSPVPFLGQMVHERMVTYQSLPTLQISSPISLHQLQTVLGDLQWVSRGTPTTRRPLQLLYSSLKPIDDPRAIIHLSPEQQQGIAELRQALSHNARSRYNEQEPLLAYVHLTRAGSTLVLFQKGAQFPLAYFQTPLTDNQASPWGLLLLLGCQYLQAQALSSYAKTILKYYHNLPKTSLDNWIQSSEDPRVQELLQLWPQISSQGIQPPGPWKTLVTRAEVFLTPQFSPEPIPAALCLFSDGAARRGAYCLWKDHLLDFQAVPAPESAQKGELAGLLAGLAAAPPEPLNIWVDSKYLYSLLRTLVLGAWLQPDPVPSYALLYKSLLRHPAIFVGHVRSHSSASHPIASLNNYVDQLAGKRTADGSEFEKRTADGSEFESPKKKAKVE

SEQ ID NO: 6168 - protein, 2187 aa, synthetic construct
MPAAKRVKLDGGDKKYSIGLDIGTNSVGWAVITDEYKVPSKKFKVLGNTDRHSIKKNLIGALLFDSGETAEATRLKRTARRRYTRRKNRICYLQEIFSNEMAKVDDSFFHRLEESFLVEEDKKHERHPIFGNIVDEVAYHEKYPTIYHLRKKLVDSTDKADLRLIYLALAHMIKFRGHFLIEGDLNPDNSDVDKLFIQLVQTYNQLFEENPINASGVDAKAILSARLSKSRRLENLIAQLPGEKKNGLFGNLIALSLGLTPNFKSNFDLAEDAKLQLSKDTYDDDLDNLLAQIGDQYADLFLAAKNLSDAILLSDILRVNTEITKAPLSASMIKRYDEHHQDLTLLKALVRQQLPEKYKEIFFDQSKNGYAGYIDGGASQEEFYKFIKPILEKMDGTEELLVKLNREDLLRKQRTFDNGSIPHQIHLGELHAILRRQEDFYPFLKDNREKIEKILTFRIPYYVGPLARGNSRFAWMTRKSEETITPWNFEEVVDKGASAQSFIERMTNFDKNLPNEKVLPKHSLLYEYFTVYNELTKVKYVTEGMRKPAFLSGEQKKAIVDLLFKTNRKVTVKQLKEDYFKKIECFDSVEISGVEDRFNASLGTYHDLLKIIKDKDFLDNEENEDILEDIVLTLTLFEDREMIEERLKTYAHLFDDKVMKQLKRRRYTGWGRLSRKLINGIRDKQSGKTILDFLKSDGFANRNFMQLIHDDSLTFKEDIQKAQVSGQGDSLHEHIANLAGSPAIKKGILQTVKVVDELVKVMGRHKPENIVIEMARENQTTQKGQKNSRERMKRIEEGIKELGSQILKEHPVENTQLQNEKLYLYYLQNGRDMYVDQELDINRLSDYDVDHIVPQSFLKDDSIDNKVLTRSDKARGKSDNVPSEEVVKKMKNYWRQLLNAKLITQRKFDNLTKAERGGLSELDKAGFIKRQLVETRQITKHVAQILDSRMNTKYDENDKLIREVKVITLKSKLVSDFRKDFQFYKVREINNYHHAHDAYLNAVVGTALIKKYPKLESEFVYGDYKVYDVRKMIAKSEQEIGKATAKYFFYSNIMNFFKTEITLANGEIRKRPLIETNGETGEIVWDKGRDFATVRKVLSMPQVNIVKKTEVQTGGFSKESILPKRNSDKLIARKKDWDPKKYGGFDSPTVAYSVLVVAKVEKGKSKKLKSVKELLGITIMERSSFEKNPIDFLEAKGYKEVKKDLIIKLPKYSLFELENGRKRMLASAGELQKGNELALPSKYVNFLYLASHYEKLKGSPEDNEQKQLFVEQHKHYLDEIIEQISEFSKRVILADANLDKVLSAYNKHRDKPIREQAENIIHLFTLTNLGAPAAFKYFDTTIDRKRYTSTKEVLDATLIHQSITGLYETRIDLSQLGGDGGGGGGSGGGGSGGGGSGGGGSGGGGSGGMDLLKPLTVERKGVKIKGYWNSQADITCVPKDLLQGEEPVRQQNVTTIHGTQEGDVYYVNLKIDGRRINTEVIGTTLDYAIITPGDVPWILKKPLELTIKLDLEEQQGTLLNNSILSKKGKEELKQLFEKYSALWQSWENQVGHRRIRPHKIATGTVKPTPQKQYHINPKAKPDIQIVINDLLKQGVLIQKESTMNTPVYPVPKPNGRWRMVLDYRAVNKVTPLIAVQNQHSYGILGSLFKGRYKTTIDLSNGFWAHPIVPEDYWITAFTWQGKQYCWTVLPQGFLNSPGLFTGDVVDLLQGIPNVEVYVDDVYISHDSEKEHLEYLDILFNRLKEAGYIISLKKSNIANSIVDFLGFQITNEGRGLTDTFKEKLENITAPTTLKQLQSILGLLNFARNFIPDFTELIAPLYALIPKSTKNYVPWQIEHSTTLETLITKLNGAEYLQGRKGDKTLIMKVNASYTTGYIRYYNEGEKKPISYVSIVFSKTELKFTELEKLLTTVHKGLLKALDLSMGQNIHVYSPIVSMQNIQKTPQTAKKALASRWLSWLSYLEDPRIRFFYDPQMPALKDLPAVDTGKDNKKHPSNFQHIFYTDGSAITSPTKEGHLNAGMGIVYFINKDGNLQKQQEWSISLGNHTAQFAEIAAFEFALKKCLPLGGNILVVTDSNYVAKAYNEELDVWASNGFVNNRKKPLKHISKWKSVADLKRLRPDVVVTHEPGHQKLDSSPHAYGNNLADQLATQASFKVHAGKRTADGSEFEKRTADGSEFESPKKKAKVE

SEQ ID NO: 6169 - protein, 2101 aa, synthetic construct
MPAAKRVKLDGGDKKYSIGLDIGTNSVGWAVITDEYKVPSKKFKVLGNTDRHSIKKNLIGALLFDSGETAEATRLKRTARRRYTRRKNRICYLQEIFSNEMAKVDDSFFHRLEESFLVEEDKKHERHPIFGNIVDEVAYHEKYPTIYHLRKKLVDSTDKADLRLIYLALAHMIKFRGHFLIEGDLNPDNSDVDKLFIQLVQTYNQLFEENPINASGVDAKAILSARLSKSRRLENLIAQLPGEKKNGLFGNLIALSLGLTPNFKSNFDLAEDAKLQLSKDTYDDDLDNLLAQIGDQYADLFLAAKNLSDAILLSDILRVNTEITKAPLSASMIKRYDEHHQDLTLLKALVRQQLPEKYKEIFFDQSKNGYAGYIDGGASQEEFYKFIKPILEKMDGTEELLVKLNREDLLRKQRTFDNGSIPHQIHLGELHAILRRQEDFYPFLKDNREKIEKILTFRIPYYVGPLARGNSRFAWMTRKSEETITPWNFEEVVDKGASAQSFIERMTNFDKNLPNEKVLPKHSLLYEYFTVYNELTKVKYVTEGMRKPAFLSGEQKKAIVDLLFKTNRKVTVKQLKEDYFKKIECFDSVEISGVEDRFNASLGTYHDLLKIIKDKDFLDNEENEDILEDIVLTLTLFEDREMIEERLKTYAHLFDDKVMKQLKRRRYTGWGRLSRKLINGIRDKQSGKTILDFLKSDGFANRNFMQLIHDDSLTFKEDIQKAQVSGQGDSLHEHIANLAGSPAIKKGILQTVKVVDELVKVMGRHKPENIVIEMARENQTTQKGQKNSRERMKRIEEGIKELGSQILKEHPVENTQLQNEKLYLYYLQNGRDMYVDQELDINRLSDYDVDHIVPQSFLKDDSIDNKVLTRSDKARGKSDNVPSEEVVKKMKNYWRQLLNAKLITQRKFDNLTKAERGGLSELDKAGFIKRQLVETRQITKHVAQILDSRMNTKYDENDKLIREVKVITLKSKLVSDFRKDFQFYKVREINNYHHAHDAYLNAVVGTALIKKYPKLESEFVYGDYKVYDVRKMIAKSEQEIGKATAKYFFYSNIMNFFKTEITLANGEIRKRPLIETNGETGEIVWDKGRDFATVRKVLSMPQVNIVKKTEVQTGGFSKESILPKRNSDKLIARKKDWDPKKYGGFDSPTVAYSVLVVAKVEKGKSKKLKSVKELLGITIMERSSFEKNPIDFLEAKGYKEVKKDLIIKLPKYSLFELENGRKRMLASAGELQKGNELALPSKYVNFLYLASHYEKLKGSPEDNEQKQLFVEQHKHYLDEIIEQISEFSKRVILADANLDKVLSAYNKHRDKPIREQAENIIHLFTLTNLGAPAAFKYFDTTIDRKRYTSTKEVLDATLIHQSITGLYETRIDLSQLGGDGGGGGGSGGGGSGGGGSGGGGSGGGGSGGVPWILKKPLELTIKLDLEEQQGTLLNNSILSKKGKEELKQLFEKYSALWQSWENQVGHRRIRPHKIATGTVKPTPQKQYHINPKAKPDIQIVINDLLKQGVLIQKESTMNTPVYPVPKPNGRWRMVLDYRAVNKVTPLIAVQNQHSYGILGSLFKGRYKTTIDLSNGFWAHPIVPEDYWITAFTWQGKQYCWTVLPQGFLNSPGLFTGDVVDLLQGIPNVEVYVDDVYISHDSEKEHLEYLDILFNRLKEAGYIISLKKSNIANSIVDFLGFQITNEGRGLTDTFKEKLENITAPTTLKQLQSILGLLNFARNFIPDFTELIAPLYALIPKSTKNYVPWQIEHSTTLETLITKLNGAEYLQGRKGDKTLIMKVNASYTTGYIRYYNEGEKKPISYVSIVFSKTELKFTELEKLLTTVHKGLLKALDLSMGQNIHVYSPIVSMQNIQKTPQTAKKALASRWLSWLSYLEDPRIRFFYDPQMPALKDLPAVDTGKDNKKHPSNFQHIFYTDGSAITSPTKEGHLNAGMGIVYFINKDGNLQKQQEWSISLGNHTAQFAEIAAFEFALKKCLPLGGNILVVTDSNYVAKAYNEELDVWASNGFVNNRKKPLKHISKWKSVADLKRLRPDVVVTHEPGHQKLDSSPHAYGNNLADQLATQASFKVHAGKRTADGSEFEKRTADGSEFESPKKKAKVE

SEQ ID NO: 6170 - protein, 2101 aa, synthetic construct
MPAAKRVKLDGGDKKYSIGLDIGTNSVGWAVITDEYKVPSKKFKVLGNTDRHSIKKNLIGALLFDSGETAEATRLKRTARRRYTRRKNRICYLQEIFSNEMAKVDDSFFHRLEESFLVEEDKKHERHPIFGNIVDEVAYHEKYPTIYHLRKKLVDSTDKADLRLIYLALAHMIKFRGHFLIEGDLNPDNSDVDKLFIQLVQTYNQLFEENPINASGVDAKAILSARLSKSRRLENLIAQLPGEKKNGLFGNLIALSLGLTPNFKSNFDLAEDAKLQLSKDTYDDDLDNLLAQIGDQYADLFLAAKNLSDAILLSDILRVNTEITKAPLSASMIKRYDEHHQDLTLLKALVRQQLPEKYKEIFFDQSKNGYAGYIDGGASQEEFYKFIKPILEKMDGTEELLVKLNREDLLRKQRTFDNGSIPHQIHLGELHAILRRQEDFYPFLKDNREKIEKILTFRIPYYVGPLARGNSRFAWMTRKSEETITPWNFEEVVDKGASAQSFIERMTNFDKNLPNEKVLPKHSLLYEYFTVYNELTKVKYVTEGMRKPAFLSGEQKKAIVDLLFKTNRKVTVKQLKEDYFKKIECFDSVEISGVEDRFNASLGTYHDLLKIIKDKDFLDNEENEDILEDIVLTLTLFEDREMIEERLKTYAHLFDDKVMKQLKRRRYTGWGRLSRKLINGIRDKQSGKTILDFLKSDGFANRNFMQLIHDDSLTFKEDIQKAQVSGQGDSLHEHIANLAGSPAIKKGILQTVKVVDELVKVMGRHKPENIVIEMARENQTTQKGQKNSRERMKRIEEGIKELGSQILKEHPVENTQLQNEKLYLYYLQNGRDMYVDQELDINRLSDYDVDHIVPQSFLKDDSIDNKVLTRSDKARGKSDNVPSEEVVKKMKNYWRQLLNAKLITQRKFDNLTKAERGGLSELDKAGFIKRQLVETRQITKHVAQILDSRMNTKYDENDKLIREVKVITLKSKLVSDFRKDFQFYKVREINNYHHAHDAYLNAVVGTALIKKYPKLESEFVYGDYKVYDVRKMIAKSEQEIGKATAKYFFYSNIMNFFKTEITLANGEIRKRPLIETNGETGEIVWDKGRDFATVRKVLSMPQVNIVKKTEVQTGGFSKESILPKRNSDKLIARKKDWDPKKYGGFDSPTVAYSVLVVAKVEKGKSKKLKSVKELLGITIMERSSFEKNPIDFLEAKGYKEVKKDLIIKLPKYSLFELENGRKRMLASAGELQKGNELALPSKYVNFLYLASHYEKLKGSPEDNEQKQLFVEQHKHYLDEIIEQISEFSKRVILADANLDKVLSAYNKHRDKPIREQAENIIHLFTLTNLGAPAAFKYFDTTIDRKRYTSTKEVLDATLIHQSITGLYETRIDLSQLGGDGGGGGGSGGGGSGGGGSGGGGSGGGGSGGVPWILKKPLELTIKLDLEEQQGTLLNNSILSKKGKEELKQLFEKYSALWQSWENQVGHRRIRPHKIATGTVKPTPQKQYHINPKAKPDIQIVINDLLKQGVLIQKESTMNTPVYPVPKPNGRWRMVLDYRAVNKVTPLIAVQNQHSYGILGSLFKGRYKTTIDLSNGFWAHPIVPEDYWITAFTWQGKQYCWTVLPQGFLNSPGLFNGDVVDLLQGIPNVEVYVDDVYISHDSEKEHLEYLDILFNRLKEAGYIISLKKSNIANSIVDFLGFQITNEGRGLTDTFKEKLENITAPTTLKQLQSILGLLNFARNFIPDFTELIAPLYALIPKSPKNYVPWQIEHSTTLETLITKLNGAEYLQGRKGDKTLIMKVNASYTTGYIRYYNEGEKKPISYVSIVFSKTELKFTELEKLLTTVHKGLLKALDLSMGQNIHVYSPIVSMQNIQKTPQTAKKALASRWLSWLSYLEDPRIRFFYDPQMPALKDLPAVDTGKDNKKHPSNFQHIFYTDGSAITSPTKEGHLNAGMGIVYFINKDGNLQKQQEWSISLGNHTAQFAEIAAFEFALKKCLPLGGNILVVTDSNYVAKAYNEELDVWASNGFVNNRKKPLKHISKWKSVADLKRLRPDVVVTHEPGHQKLDSSPHAYGNNLADQLATQASFKVHAGKRTADGSEFEKRTADGSEFESPKKKAKVE

SEQ ID NO: 6171 - protein, 2109 aa, synthetic construct
MPAAKRVKLDGGDKKYSIGLDIGTNSVGWAVITDEYKVPSKKFKVLGNTDRHSIKKNLIGALLFDSGETAEATRLKRTARRRYTRRKNRICYLQEIFSNEMAKVDDSFFHRLEESFLVEEDKKHERHPIFGNIVDEVAYHEKYPTIYHLRKKLVDSTDKADLRLIYLALAHMIKFRGHFLIEGDLNPDNSDVDKLFIQLVQTYNQLFEENPINASGVDAKAILSARLSKSRRLENLIAQLPGEKKNGLFGNLIALSLGLTPNFKSNFDLAEDAKLQLSKDTYDDDLDNLLAQIGDQYADLFLAAKNLSDAILLSDILRVNTEITKAPLSASMIKRYDEHHQDLTLLKALVRQQLPEKYKEIFFDQSKNGYAGYIDGGASQEEFYKFIKPILEKMDGTEELLVKLNREDLLRKQRTFDNGSIPHQIHLGELHAILRRQEDFYPFLKDNREKIEKILTFRIPYYVGPLARGNSRFAWMTRKSEETITPWNFEEVVDKGASAQSFIERMTNFDKNLPNEKVLPKHSLLYEYFTVYNELTKVKYVTEGMRKPAFLSGEQKKAIVDLLFKTNRKVTVKQLKEDYFKKIECFDSVEISGVEDRFNASLGTYHDLLKIIKDKDFLDNEENEDILEDIVLTLTLFEDREMIEERLKTYAHLFDDKVMKQLKRRRYTGWGRLSRKLINGIRDKQSGKTILDFLKSDGFANRNFMQLIHDDSLTFKEDIQKAQVSGQGDSLHEHIANLAGSPAIKKGILQTVKVVDELVKVMGRHKPENIVIEMARENQTTQKGQKNSRERMKRIEEGIKELGSQILKEHPVENTQLQNEKLYLYYLQNGRDMYVDQELDINRLSDYDVDHIVPQSFLKDDSIDNKVLTRSDKARGKSDNVPSEEVVKKMKNYWRQLLNAKLITQRKFDNLTKAERGGLSELDKAGFIKRQLVETRQITKHVAQILDSRMNTKYDENDKLIREVKVITLKSKLVSDFRKDFQFYKVREINNYHHAHDAYLNAVVGTALIKKYPKLESEFVYGDYKVYDVRKMIAKSEQEIGKATAKYFFYSNIMNFFKTEITLANGEIRKRPLIETNGETGEIVWDKGRDFATVRKVLSMPQVNIVKKTEVQTGGFSKESILPKRNSDKLIARKKDWDPKKYGGFDSPTVAYSVLVVAKVEKGKSKKLKSVKELLGITIMERSSFEKNPIDFLEAKGYKEVKKDLIIKLPKYSLFELENGRKRMLASAGELQKGNELALPSKYVNFLYLASHYEKLKGSPEDNEQKQLFVEQHKHYLDEIIEQISEFSKRVILADANLDKVLSAYNKHRDKPIREQAENIIHLFTLTNLGAPAAFKYFDTTIDRKRYTSTKEVLDATLIHQSITGLYETRIDLSQLGGDGGGGGGSGGGGSGGGGSGGGGSGGGGSGGTLQLEEEYRLFEPESTQKQEMDIWLKNFPQAWAETGGMGTAHCQAPVLIQLKATATPISIRQYPMPHEAYQGIKPHIRRMLDQGILKPCQSPWNTPLLPVKKPGTEDYRPVQDLREVNKRVEDIHPTVPNPYNLLSTLPPSHPWYTVLDLKDAFFCLRLHSESQLLFAFEWRDPEIGLSGQLTWTRLPQGFKNSPTLFNEALHSDLADFRVRYPALVLLQYVDDLLLAAATRTECLEGTKALLETLGNKGYRASAKKAQICLQEVTYLGYSLKDGQRWLTKARKEAILSIPVPKNSRQVREFLGTAGYCRLWIPGFAELAAPLYPLTRPGTLFQWGTEQQLAFEDIKKALLSSPALGLPDITKPFELFIDENSGFAKGVLVQKLGPWKRPVAYLSKKLDTVASGWPPCLRMVAAIAILVKDAGKLTLGQPLTILTSHPVEALVRQPPNKWLSNARMTHYQAMLLDAERVHFGPTVSLNPATLLPLPSGGNHHDCLQILAETHGTRPDLTDQPLPDADLTWYTDGSSFIRNGEREAGAAVTTESEVIWAAPLPPGTSAQRAELIALTQALKMAEGKKLTVYTDSRYAFATTHVHGEIYRRRGWLTSEGKEIKNKNEILALLEALFLPKRLSIIHCPGHQKGDSPQAKGNRLADDTAKKAATETHSSLTVLPAGKRTADGSEFEKRTADGSEFESPKKKAKVE

SEQ ID NO: 6172 - protein, 2108 aa, synthetic construct
MPAAKRVKLDGGDKKYSIGLDIGTNSVGWAVITDEYKVPSKKFKVLGNTDRHSIKKNLIGALLFDSGETAEATRLKRTARRRYTRRKNRICYLQEIFSNEMAKVDDSFFHRLEESFLVEEDKKHERHPIFGNIVDEVAYHEKYPTIYHLRKKLVDSTDKADLRLIYLALAHMIKFRGHFLIEGDLNPDNSDVDKLFIQLVQTYNQLFEENPINASGVDAKAILSARLSKSRRLENLIAQLPGEKKNGLFGNLIALSLGLTPNFKSNFDLAEDAKLQLSKDTYDDDLDNLLAQIGDQYADLFLAAKNLSDAILLSDILRVNTEITKAPLSASMIKRYDEHHQDLTLLKALVRQQLPEKYKEIFFDQSKNGYAGYIDGGASQEEFYKFIKPILEKMDGTEELLVKLNREDLLRKQRTFDNGSIPHQIHLGELHAILRRQEDFYPFLKDNREKIEKILTFRIPYYVGPLARGNSRFAWMTRKSEETITPWNFEEVVDKGASAQSFIERMTNFDKNLPNEKVLPKHSLLYEYFTVYNELTKVKYVTEGMRKPAFLSGEQKKAIVDLLFKTNRKVTVKQLKEDYFKKIECFDSVEISGVEDRFNASLGTYHDLLKIIKDKDFLDNEENEDILEDIVLTLTLFEDREMIEERLKTYAHLFDDKVMKQLKRRRYTGWGRLSRKLINGIRDKQSGKTILDFLKSDGFANRNFMQLIHDDSLTFKEDIQKAQVSGQGDSLHEHIANLAGSPAIKKGILQTVKVVDELVKVMGRHKPENIVIEMARENQTTQKGQKNSRERMKRIEEGIKELGSQILKEHPVENTQLQNEKLYLYYLQNGRDMYVDQELDINRLSDYDVDHIVPQSFLKDDSIDNKVLTRSDKARGKSDNVPSEEVVKKMKNYWRQLLNAKLITQRKFDNLTKAERGGLSELDKAGFIKRQLVETRQITKHVAQILDSRMNTKYDENDKLIREVKVITLKSKLVSDFRKDFQFYKVREINNYHHAHDAYLNAVVGTALIKKYPKLESEFVYGDYKVYDVRKMIAKSEQEIGKATAKYFFYSNIMNFFKTEITLANGEIRKRPLIETNGETGEIVWDKGRDFATVRKVLSMPQVNIVKKTEVQTGGFSKESILPKRNSDKLIARKKDWDPKKYGGFDSPTVAYSVLVVAKVEKGKSKKLKSVKELLGITIMERSSFEKNPIDFLEAKGYKEVKKDLIIKLPKYSLFELENGRKRMLASAGELQKGNELALPSKYVNFLYLASHYEKLKGSPEDNEQKQLFVEQHKHYLDEIIEQISEFSKRVILADANLDKVLSAYNKHRDKPIREQAENIIHLFTLTNLGAPAAFKYFDTTIDRKRYTSTKEVLDATLIHQSITGLYETRIDLSQLGGDGGGGGGSGGGGSGGGGSGGGGSGGGGSGGVLNLEEEYRLHEKPVPSSIDPSWLQLFPTVWAERAGMGLANQVPPVVVELRSGASPVAVRQYPMSKEAREGIRPHIQKFLDLGVLVPCRSPWNTPLLPVKKPGTNDYRPVQDLREINKRVQDIHPTVPNPYNLLSSLPPSYTWYSVLDLKDAFFCLRLHPNSQPLFAFEWKDPEKGNTGQLTWTRLPQGFKNSPTLFNEALHRDLAPFRALNPQVVLLQYVDDLLVAAPTYEDCKKGTQKLLQELSKLGYRVSAKKAQLCQREVTYLGYLLKEGKRWLTPARKATVMKIPVPTTPRQVREFLGKAGFCRLFIPGFASLAAPLYPLTKPSIPFIWTEEHQQAFDHIKKALLSAPALALPDLTKPFTLYIDERAGVARGVLTQTLGPWRRPVAYLSKKLDPVASGWPTCLKAVAAVALLLKDADKLTLGQNVTVIASHSLESIVRQPPDRWMTNARMTHYQSLLLNERVSFAPPAVLNPATLLPVESEATPVHRCSEILAEETGTRRDLEDQPLPGVPTWYTDGSSFITEGKRRAGAPIVDGKRTVWASSLPEGTSAQKAELVALTQALRLAEGKNINIYTDSRYAFATAHIHGAIYKQRGWLTSAGKDIKNKEEILALLEAIHLPRRVAIIHCPGHQRGSNPVATGNRRADEAAKQAALSTRVLAGTTKPAGKRTADGSEFEKRTADGSEFESPKKKAKVE

SEQ ID NO: 6173 - protein, 2232 aa, synthetic construct
MPAAKRVKLDGGDKKYSIGLDIGTNSVGWAVITDEYKVPSKKFKVLGNTDRHSIKKNLIGALLFDSGETAEATRLKRTARRRYTRRKNRICYLQEIFSNEMAKVDDSFFHRLEESFLVEEDKKHERHPIFGNIVDEVAYHEKYPTIYHLRKKLVDSTDKADLRLIYLALAHMIKFRGHFLIEGDLNPDNSDVDKLFIQLVQTYNQLFEENPINASGVDAKAILSARLSKSRRLENLIAQLPGEKKNGLFGNLIALSLGLTPNFKSNFDLAEDAKLQLSKDTYDDDLDNLLAQIGDQYADLFLAAKNLSDAILLSDILRVNTEITKAPLSASMIKRYDEHHQDLTLLKALVRQQLPEKYKEIFFDQSKNGYAGYIDGGASQEEFYKFIKPILEKMDGTEELLVKLNREDLLRKQRTFDNGSIPHQIHLGELHAILRRQEDFYPFLKDNREKIEKILTFRIPYYVGPLARGNSRFAWMTRKSEETITPWNFEEVVDKGASAQSFIERMTNFDKNLPNEKVLPKHSLLYEYFTVYNELTKVKYVTEGMRKPAFLSGEQKKAIVDLLFKTNRKVTVKQLKEDYFKKIECFDSVEISGVEDRFNASLGTYHDLLKIIKDKDFLDNEENEDILEDIVLTLTLFEDREMIEERLKTYAHLFDDKVMKQLKRRRYTGWGRLSRKLINGIRDKQSGKTILDFLKSDGFANRNFMQLIHDDSLTFKEDIQKAQVSGQGDSLHEHIANLAGSPAIKKGILQTVKVVDELVKVMGRHKPENIVIEMARENQTTQKGQKNSRERMKRIEEGIKELGSQILKEHPVENTQLQNEKLYLYYLQNGRDMYVDQELDINRLSDYDVDHIVPQSFLKDDSIDNKVLTRSDKARGKSDNVPSEEVVKKMKNYWRQLLNAKLITQRKFDNLTKAERGGLSELDKAGFIKRQLVETRQITKHVAQILDSRMNTKYDENDKLIREVKVITLKSKLVSDFRKDFQFYKVREINNYHHAHDAYLNAVVGTALIKKYPKLESEFVYGDYKVYDVRKMIAKSEQEIGKATAKYFFYSNIMNFFKTEITLANGEIRKRPLIETNGETGEIVWDKGRDFATVRKVLSMPQVNIVKKTEVQTGGFSKESILPKRNSDKLIARKKDWDPKKYGGFDSPTVAYSVLVVAKVEKGKSKKLKSVKELLGITIMERSSFEKNPIDFLEAKGYKEVKKDLIIKLPKYSLFELENGRKRMLASAGELQKGNELALPSKYVNFLYLASHYEKLKGSPEDNEQKQLFVEQHKHYLDEIIEQISEFSKRVILADANLDKVLSAYNKHRDKPIREQAENIIHLFTLTNLGAPAAFKYFDTTIDRKRYTSTKEVLDATLIHQSITGLYETRIDLSQLGGDGGGGGGSGGGGSGGGGSGGGGSGGGGSGGTLGDQGSRGSDPLPEPRVTLTVEGIPTEFLVNTGAEHSVLTKPMGKMGSKRTVVAGATGSKVYPWTTKRLLKIGQKQVTHSFLVIPECPAPLLGRDLLTKLKAQIQFSTEGPQVTWEDRPAMCLVLNLEEEYRLHEKPVPPSIDPSWLQLFPMVWAEKAGMGLANQVPPVVVELKSDASPVAVRQYPMSKEAREGIRPHIQRFLDLGILVPCQSPWNTPLLPVKKPGTNDYRPVQDLREVNKRVQDIHPTVPNPYNLLSSLPPSHTWYSVLDLKDAFFCLKLHPNSQPLFAFEWRDPEKGNTGQLTWTRLPQGFKNSPTLFDEALHRDLASFRALNPQVVMLQYVDDLLVAAPTYRDCKEGTRRLLQELSKLGYRVSAKKAQLCREEVTYLGYLLKGGKRWLTPARKATVMKIPTPTTPRQVREFLGTAGFCRLWIPGFASLAAPLYPLTREKVPFTWTEAHQEAFGRIKEALLSAPALALPDLTKPFALYVDEKEGVARGVLTQTLGPWRRPVAYLSKKLDPVASGWPTCLKAIAAVALLLKDADKLTLGQNVLVIAPHNLESIVRQPPDRWMTNARMTHYQSLLLNERVSFAPPAILNPATLLPVESDDTPIHICSEILAEETGTRPDLRDQPLPGVPAWYTDGSSFIMDGRRQAGAAIVDNKRTVWASNLPEGTSAQKAELIALTQALRLAEGKSINIYTDSRYAFATAHVHGAIYKQRGLLTSAGKDIKNKEEILALLEAIHLPKRVAIIHCPGHQRGTDPVATGNRKADEAAKQAAQSTRILTETTKNAGKRTADGSEFEKRTADGSEFESPKKKAKVE

SEQ ID NO: 6174 - protein, 2141 aa, synthetic construct
MPAAKRVKLDGGDKKYSIGLDIGTNSVGWAVITDEYKVPSKKFKVLGNTDRHSIKKNLIGALLFDSGETAEATRLKRTARRRYTRRKNRICYLQEIFSNEMAKVDDSFFHRLEESFLVEEDKKHERHPIFGNIVDEVAYHEKYPTIYHLRKKLVDSTDKADLRLIYLALAHMIKFRGHFLIEGDLNPDNSDVDKLFIQLVQTYNQLFEENPINASGVDAKAILSARLSKSRRLENLIAQLPGEKKNGLFGNLIALSLGLTPNFKSNFDLAEDAKLQLSKDTYDDDLDNLLAQIGDQYADLFLAAKNLSDAILLSDILRVNTEITKAPLSASMIKRYDEHHQDLTLLKALVRQQLPEKYKEIFFDQSKNGYAGYIDGGASQEEFYKFIKPILEKMDGTEELLVKLNREDLLRKQRTFDNGSIPHQIHLGELHAILRRQEDFYPFLKDNREKIEKILTFRIPYYVGPLARGNSRFAWMTRKSEETITPWNFEEVVDKGASAQSFIERMTNFDKNLPNEKVLPKHSLLYEYFTVYNELTKVKYVTEGMRKPAFLSGEQKKAIVDLLFKTNRKVTVKQLKEDYFKKIECFDSVEISGVEDRFNASLGTYHDLLKIIKDKDFLDNEENEDILEDIVLTLTLFEDREMIEERLKTYAHLFDDKVMKQLKRRRYTGWGRLSRKLINGIRDKQSGKTILDFLKSDGFANRNFMQLIHDDSLTFKEDIQKAQVSGQGDSLHEHIANLAGSPAIKKGILQTVKVVDELVKVMGRHKPENIVIEMARENQTTQKGQKNSRERMKRIEEGIKELGSQILKEHPVENTQLQNEKLYLYYLQNGRDMYVDQELDINRLSDYDVDHIVPQSFLKDDSIDNKVLTRSDKARGKSDNVPSEEVVKKMKNYWRQLLNAKLITQRKFDNLTKAERGGLSELDKAGFIKRQLVETRQITKHVAQILDSRMNTKYDENDKLIREVKVITLKSKLVSDFRKDFQFYKVREINNYHHAHDAYLNAVVGTALIKKYPKLESEFVYGDYKVYDVRKMIAKSEQEIGKATAKYFFYSNIMNFFKTEITLANGEIRKRPLIETNGETGEIVWDKGRDFATVRKVLSMPQVNIVKKTEVQTGGFSKESILPKRNSDKLIARKKDWDPKKYGGFDSPTVAYSVLVVAKVEKGKSKKLKSVKELLGITIMERSSFEKNPIDFLEAKGYKEVKKDLIIKLPKYSLFELENGRKRMLASAGELQKGNELALPSKYVNFLYLASHYEKLKGSPEDNEQKQLFVEQHKHYLDEIIEQISEFSKRVILADANLDKVLSAYNKHRDKPIREQAENIIHLFTLTNLGAPAAFKYFDTTIDRKRYTSTKEVLDATLIHQSITGLYETRIDLSQLGGDGGGGGGSGGGGSGGGGSGGGGSGGGGSGGLLGRDLLTKLKAQIQFSTEGPQVTWEDRPAMCLVLNLEEEYRLHEKPVPPSIDPSWLQLFPMVWAEKAGMGLANQVPPVVVELKSDASPVAVRQYPMSKEAREGIRPHIQRFLDLGILVPCQSPWNTPLLPVKKPGTNDYRPVQDLREVNKRVQDIHPTVPNPYNLLSSLPPSHTWYSVLDLKDAFFCLKLHPNSQPLFAFEWRDPEKGNTGQLTWTRLPQGFKNSPTLFDEALHRDLASFRALNPQVVMLQYVDDLLVAAPTYRDCKEGTRRLLQELSKLGYRVSAKKAQLCREEVTYLGYLLKGGKRWLTPARKATVMKIPTPTTPRQVREFLGTAGFCRLWIPGFASLAAPLYPLTREKVPFTWTEAHQEAFGRIKEALLSAPALALPDLTKPFALYVDEKEGVARGVLTQTLGPWRRPVAYLSKKLDPVASGWPTCLKAIAAVALLLKDADKLTLGQNVLVIAPHNLESIVRQPPDRWMTNARMTHYQSLLLNERVSFAPPAILNPATLLPVESDDTPIHICSEILAEETGTRPDLRDQPLPGVPAWYTDGSSFIMDGRRQAGAAIVDNKRTVWASNLPEGTSAQKAELIALTQALRLAEGKSINIYTDSRYAFATAHVHGAIYKQRGLLTSAGKDIKNKEEILALLEAIHLPKRVAIIHCPGHQRGTDPVATGNRKADEAAKQAAQSTRILTETTKNAGKRTADGSEFEKRTADGSEFESPKKKAKVE

SEQ ID NO: 6175 - protein, 2141 aa, synthetic construct
MPAAKRVKLDGGDKKYSIGLDIGTNSVGWAVITDEYKVPSKKFKVLGNTDRHSIKKNLIGALLFDSGETAEATRLKRTARRRYTRRKNRICYLQEIFSNEMAKVDDSFFHRLEESFLVEEDKKHERHPIFGNIVDEVAYHEKYPTIYHLRKKLVDSTDKADLRLIYLALAHMIKFRGHFLIEGDLNPDNSDVDKLFIQLVQTYNQLFEENPINASGVDAKAILSARLSKSRRLENLIAQLPGEKKNGLFGNLIALSLGLTPNFKSNFDLAEDAKLQLSKDTYDDDLDNLLAQIGDQYADLFLAAKNLSDAILLSDILRVNTEITKAPLSASMIKRYDEHHQDLTLLKALVRQQLPEKYKEIFFDQSKNGYAGYIDGGASQEEFYKFIKPILEKMDGTEELLVKLNREDLLRKQRTFDNGSIPHQIHLGELHAILRRQEDFYPFLKDNREKIEKILTFRIPYYVGPLARGNSRFAWMTRKSEETITPWNFEEVVDKGASAQSFIERMTNFDKNLPNEKVLPKHSLLYEYFTVYNELTKVKYVTEGMRKPAFLSGEQKKAIVDLLFKTNRKVTVKQLKEDYFKKIECFDSVEISGVEDRFNASLGTYHDLLKIIKDKDFLDNEENEDILEDIVLTLTLFEDREMIEERLKTYAHLFDDKVMKQLKRRRYTGWGRLSRKLINGIRDKQSGKTILDFLKSDGFANRNFMQLIHDDSLTFKEDIQKAQVSGQGDSLHEHIANLAGSPAIKKGILQTVKVVDELVKVMGRHKPENIVIEMARENQTTQKGQKNSRERMKRIEEGIKELGSQILKEHPVENTQLQNEKLYLYYLQNGRDMYVDQELDINRLSDYDVDHIVPQSFLKDDSIDNKVLTRSDKARGKSDNVPSEEVVKKMKNYWRQLLNAKLITQRKFDNLTKAERGGLSELDKAGFIKRQLVETRQITKHVAQILDSRMNTKYDENDKLIREVKVITLKSKLVSDFRKDFQFYKVREINNYHHAHDAYLNAVVGTALIKKYPKLESEFVYGDYKVYDVRKMIAKSEQEIGKATAKYFFYSNIMNFFKTEITLANGEIRKRPLIETNGETGEIVWDKGRDFATVRKVLSMPQVNIVKKTEVQTGGFSKESILPKRNSDKLIARKKDWDPKKYGGFDSPTVAYSVLVVAKVEKGKSKKLKSVKELLGITIMERSSFEKNPIDFLEAKGYKEVKKDLIIKLPKYSLFELENGRKRMLASAGELQKGNELALPSKYVNFLYLASHYEKLKGSPEDNEQKQLFVEQHKHYLDEIIEQISEFSKRVILADANLDKVLSAYNKHRDKPIREQAENIIHLFTLTNLGAPAAFKYFDTTIDRKRYTSTKEVLDATLIHQSITGLYETRIDLSQLGGDGGGGGGSGGGGSGGGGSGGGGSGGGGSGGLLGRDLLTKLKAQIQFSTEGPQVTWEDRPAMCLVLNLEEEYRLHEKPVPPSIDPSWLQLFPMVWAEKAGMGLANQVPPVVVELKSDASPVAVRQYPMSKEAREGIRPHIQRFLDLGILVPCQSPWNTPLLPVKKPGTNDYRPVQDLREVNKRVQDIHPTVPNPYNLLSSLPPSHTWYSVLDLKDAFFCLKLHPNSQPLFAFEWRDPEKGNTGQLTWTRLPQGFKNSPTLFNEALHRDLASFRALNPQVVMLQYVDDLLVAAPTYRDCKEGTRRLLQELSKLGYRVSAKKAQLCREEVTYLGYLLKGGKRWLTPARKATVMKIPTPTTPRQVREFLGTAGFCRLWIPGFASLAAPLYPLTRPKVPFTWTEAHQEAFGRIKEALLSAPALALPDLTKPFALYVDEKEGVARGVLTQTLGPWRRPVAYLSKKLDPVASGWPTCLKAIAAVALLLKDADKLTLGQNVLVIAPHNLESIVRQPPDRWMTNARMTHYQSLLLNERVSFAPPAILNPATLLPVESDDTPIHICSEILAEETGTRPDLRDQPLPGVPAWYTDGSSFIMDGRRQAGAAIVDNKRTVWASNLPEGTSAQKAELIALTQALRLAEGKSINIYTDSRYAFATAHVHGAIYKQRGWLTSAGKDIKNKEEILALLEAIHLPKRVAIIHCPGHQRGTDPVATGNRKADEAAKQAAQSTRILTETTKNAGKRTADGSEFEKRTADGSEFESPKKKAKVE

SEQ ID NO: 6176 - protein, 2141 aa, synthetic construct
MPAAKRVKLDGGDKKYSIGLDIGTNSVGWAVITDEYKVPSKKFKVLGNTDRHSIKKNLIGALLFDSGETAEATRLKRTARRRYTRRKNRICYLQEIFSNEMAKVDDSFFHRLEESFLVEEDKKHERHPIFGNIVDEVAYHEKYPTIYHLRKKLVDSTDKADLRLIYLALAHMIKFRGHFLIEGDLNPDNSDVDKLFIQLVQTYNQLFEENPINASGVDAKAILSARLSKSRRLENLIAQLPGEKKNGLFGNLIALSLGLTPNFKSNFDLAEDAKLQLSKDTYDDDLDNLLAQIGDQYADLFLAAKNLSDAILLSDILRVNTEITKAPLSASMIKRYDEHHQDLTLLKALVRQQLPEKYKEIFFDQSKNGYAGYIDGGASQEEFYKFIKPILEKMDGTEELLVKLNREDLLRKQRTFDNGSIPHQIHLGELHAILRRQEDFYPFLKDNREKIEKILTFRIPYYVGPLARGNSRFAWMTRKSEETITPWNFEEVVDKGASAQSFIERMTNFDKNLPNEKVLPKHSLLYEYFTVYNELTKVKYVTEGMRKPAFLSGEQKKAIVDLLFKTNRKVTVKQLKEDYFKKIECFDSVEISGVEDRFNASLGTYHDLLKIIKDKDFLDNEENEDILEDIVLTLTLFEDREMIEERLKTYAHLFDDKVMKQLKRRRYTGWGRLSRKLINGIRDKQSGKTILDFLKSDGFANRNFMQLIHDDSLTFKEDIQKAQVSGQGDSLHEHIANLAGSPAIKKGILQTVKVVDELVKVMGRHKPENIVIEMARENQTTQKGQKNSRERMKRIEEGIKELGSQILKEHPVENTQLQNEKLYLYYLQNGRDMYVDQELDINRLSDYDVDHIVPQSFLKDDSIDNKVLTRSDKARGKSDNVPSEEVVKKMKNYWRQLLNAKLITQRKFDNLTKAERGGLSELDKAGFIKRQLVETRQITKHVAQILDSRMNTKYDENDKLIREVKVITLKSKLVSDFRKDFQFYKVREINNYHHAHDAYLNAVVGTALIKKYPKLESEFVYGDYKVYDVRKMIAKSEQEIGKATAKYFFYSNIMNFFKTEITLANGEIRKRPLIETNGETGEIVWDKGRDFATVRKVLSMPQVNIVKKTEVQTGGFSKESILPKRNSDKLIARKKDWDPKKYGGFDSPTVAYSVLVVAKVEKGKSKKLKSVKELLGITIMERSSFEKNPIDFLEAKGYKEVKKDLIIKLPKYSLFELENGRKRMLASAGELQKGNELALPSKYVNFLYLASHYEKLKGSPEDNEQKQLFVEQHKHYLDEIIEQISEFSKRVILADANLDKVLSAYNKHRDKPIREQAENIIHLFTLTNLGAPAAFKYFDTTIDRKRYTSTKEVLDATLIHQSITGLYETRIDLSQLGGDGGGGGGSGGGGSGGGGSGGGGSGGGGSGGLLGRDLLTKLKAQIQFSTEGPQVTWEDRPAMCLVLNLEEEYRLHEKPVPPSIDPSWLQLFPMVWAEKAGMGLANQVPPVVVELKSDASPVAVRQYPMSKEAREGIRPHIQRFLDLGILVPCQSPWNTPLLPVKKPGTNDYRPVQDLREVNKRVQDIHPTVPNPYNLLSSLPPSHTWYSVLDLKDAFFCLKLHPNSQPLFAFEWRDPEKGNTGQLTWTRLPQGFKNSPTLFNEALHRDLASFRALNPQVVMLQYVDDLLVAAPTYRDCKEGTRRLLQELSKLGYRVSAKKAQLCREEVTYLGYLLKGGKRWLTPARKATVMKIPTPTTPRQVREFLGKAGFCRLFIPGFASLAAPLYPLTRPKVPFTWTEAHQEAFGRIKEALLSAPALALPDLTKPFALYVDEKEGVARGVLTQTLGPWRRPVAYLSKKLDPVASGWPTCLKAIAAVALLLKDADKLTLGQNVLVIAPHNLESIVRQPPDRWMTNARMTHYQSLLLNERVSFAPPAILNPATLLPVESDDTPIHICSEILAEETGTRPDLRDQPLPGVPAWYTDGSSFIMDGRRQAGAAIVDNKRTVWASNLPEGTSAQKAELIALTQALRLAEGKSINIYTDSRYAFATAHVHGAIYKQRGWLTSAGKDIKNKEEILALLEAIHLPKRVAIIHCPGHQRGTDPVATGNRKADEAAKQAAQSTRILTETTKNAGKRTADGSEFEKRTADGSEFESPKKKAKVE

SEQ ID NO: 6177 - protein, 2232 aa, synthetic construct
MPAAKRVKLDGGDKKYSIGLDIGTNSVGWAVITDEYKVPSKKFKVLGNTDRHSIKKNLIGALLFDSGETAEATRLKRTARRRYTRRKNRICYLQEIFSNEMAKVDDSFFHRLEESFLVEEDKKHERHPIFGNIVDEVAYHEKYPTIYHLRKKLVDSTDKADLRLIYLALAHMIKFRGHFLIEGDLNPDNSDVDKLFIQLVQTYNQLFEENPINASGVDAKAILSARLSKSRRLENLIAQLPGEKKNGLFGNLIALSLGLTPNFKSNFDLAEDAKLQLSKDTYDDDLDNLLAQIGDQYADLFLAAKNLSDAILLSDILRVNTEITKAPLSASMIKRYDEHHQDLTLLKALVRQQLPEKYKEIFFDQSKNGYAGYIDGGASQEEFYKFIKPILEKMDGTEELLVKLNREDLLRKQRTFDNGSIPHQIHLGELHAILRRQEDFYPFLKDNREKIEKILTFRIPYYVGPLARGNSRFAWMTRKSEETITPWNFEEVVDKGASAQSFIERMTNFDKNLPNEKVLPKHSLLYEYFTVYNELTKVKYVTEGMRKPAFLSGEQKKAIVDLLFKTNRKVTVKQLKEDYFKKIECFDSVEISGVEDRFNASLGTYHDLLKIIKDKDFLDNEENEDILEDIVLTLTLFEDREMIEERLKTYAHLFDDKVMKQLKRRRYTGWGRLSRKLINGIRDKQSGKTILDFLKSDGFANRNFMQLIHDDSLTFKEDIQKAQVSGQGDSLHEHIANLAGSPAIKKGILQTVKVVDELVKVMGRHKPENIVIEMARENQTTQKGQKNSRERMKRIEEGIKELGSQILKEHPVENTQLQNEKLYLYYLQNGRDMYVDQELDINRLSDYDVDHIVPQSFLKDDSIDNKVLTRSDKARGKSDNVPSEEVVKKMKNYWRQLLNAKLITQRKFDNLTKAERGGLSELDKAGFIKRQLVETRQITKHVAQILDSRMNTKYDENDKLIREVKVITLKSKLVSDFRKDFQFYKVREINNYHHAHDAYLNAVVGTALIKKYPKLESEFVYGDYKVYDVRKMIAKSEQEIGKATAKYFFYSNIMNFFKTEITLANGEIRKRPLIETNGETGEIVWDKGRDFATVRKVLSMPQVNIVKKTEVQTGGFSKESILPKRNSDKLIARKKDWDPKKYGGFDSPTVAYSVLVVAKVEKGKSKKLKSVKELLGITIMERSSFEKNPIDFLEAKGYKEVKKDLIIKLPKYSLFELENGRKRMLASAGELQKGNELALPSKYVNFLYLASHYEKLKGSPEDNEQKQLFVEQHKHYLDEIIEQISEFSKRVILADANLDKVLSAYNKHRDKPIREQAENIIHLFTLTNLGAPAAFKYFDTTIDRKRYTSTKEVLDATLIHQSITGLYETRIDLSQLGGDGGGGGGSGGGGSGGGGSGGGGSGGGGSGGTLGDQGSRGSDPLPEPRVTLTVEGIPTEFLVNTGAEHSVLTKPMGKMGSKRTVVAGATGSKVYPWTTKRLLKIGQKQVTHSFLVIPECPAPLLGRDLLTKLKAQIQFSTEGPQVTWEDRPAMCLVLNLEEEYRLHEKPVPPSIDPSWLQLFPMVWAEKAGMGLANQVPPVVVELKSDASPVAVRQYPMSKEAREGIRPHIQRFLDLGILVPCQSPWNTPLLPVKKPGTNDYRPVQDLREVNKRVQDIHPTVPNPYNLLSSLPPSHTWYSVLDLKDAFFCLKLHPNSQPLFAFEWRDPEKGNTGQLTWTRLPQGFKNSPTLFNEALHRDLASFRALNPQVVMLQYVDDLLVAAPTYRDCKEGTRRLLQELSKLGYRVSAKKAQLCREEVTYLGYLLKGGKRWLTPARKATVMKIPTPTTPRQVREFLGTAGFCRLWIPGFASLAAPLYPLTRPKVPFTWTEAHQEAFGRIKEALLSAPALALPDLTKPFALYVDEKEGVARGVLTQTLGPWRRPVAYLSKKLDPVASGWPTCLKAIAAVALLLKDADKLTLGQNVLVIAPHNLESIVRQPPDRWMTNARMTHYQSLLLNERVSFAPPAILNPATLLPVESDDTPIHICSEILAEETGTRPDLRDQPLPGVPAWYTDGSSFIMDGRRQAGAAIVDNKRTVWASNLPEGTSAQKAELIALTQALRLAEGKSINIYTDSRYAFATAHVHGAIYKQRGWLTSAGKDIKNKEEILALLEAIHLPKRVAIIHCPGHQRGTDPVATGNRKADEAAKQAAQSTRILTETTKNAGKRTADGSEFEKRTADGSEFESPKKKAKVE

SEQ ID NO: 6178 - protein, 2110 aa, synthetic construct
MPAAKRVKLDGGDKKYSIGLDIGTNSVGWAVITDEYKVPSKKFKVLGNTDRHSIKKNLIGALLFDSGETAEATRLKRTARRRYTRRKNRICYLQEIFSNEMAKVDDSFFHRLEESFLVEEDKKHERHPIFGNIVDEVAYHEKYPTIYHLRKKLVDSTDKADLRLIYLALAHMIKFRGHFLIEGDLNPDNSDVDKLFIQLVQTYNQLFEENPINASGVDAKAILSARLSKSRRLENLIAQLPGEKKNGLFGNLIALSLGLTPNFKSNFDLAEDAKLQLSKDTYDDDLDNLLAQIGDQYADLFLAAKNLSDAILLSDILRVNTEITKAPLSASMIKRYDEHHQDLTLLKALVRQQLPEKYKEIFFDQSKNGYAGYIDGGASQEEFYKFIKPILEKMDGTEELLVKLNREDLLRKQRTFDNGSIPHQIHLGELHAILRRQEDFYPFLKDNREKIEKILTFRIPYYVGPLARGNSRFAWMTRKSEETITPWNFEEVVDKGASAQSFIERMTNFDKNLPNEKVLPKHSLLYEYFTVYNELTKVKYVTEGMRKPAFLSGEQKKAIVDLLFKTNRKVTVKQLKEDYFKKIECFDSVEISGVEDRFNASLGTYHDLLKIIKDKDFLDNEENEDILEDIVLTLTLFEDREMIEERLKTYAHLFDDKVMKQLKRRRYTGWGRLSRKLINGIRDKQSGKTILDFLKSDGFANRNFMQLIHDDSLTFKEDIQKAQVSGQGDSLHEHIANLAGSPAIKKGILQTVKVVDELVKVMGRHKPENIVIEMARENQTTQKGQKNSRERMKRIEEGIKELGSQILKEHPVENTQLQNEKLYLYYLQNGRDMYVDQELDINRLSDYDVDHIVPQSFLKDDSIDNKVLTRSDKARGKSDNVPSEEVVKKMKNYWRQLLNAKLITQRKFDNLTKAERGGLSELDKAGFIKRQLVETRQITKHVAQILDSRMNTKYDENDKLIREVKVITLKSKLVSDFRKDFQFYKVREINNYHHAHDAYLNAVVGTALIKKYPKLESEFVYGDYKVYDVRKMIAKSEQEIGKATAKYFFYSNIMNFFKTEITLANGEIRKRPLIETNGETGEIVWDKGRDFATVRKVLSMPQVNIVKKTEVQTGGFSKESILPKRNSDKLIARKKDWDPKKYGGFDSPTVAYSVLVVAKVEKGKSKKLKSVKELLGITIMERSSFEKNPIDFLEAKGYKEVKKDLIIKLPKYSLFELENGRKRMLASAGELQKGNELALPSKYVNFLYLASHYEKLKGSPEDNEQKQLFVEQHKHYLDEIIEQISEFSKRVILADANLDKVLSAYNKHRDKPIREQAENIIHLFTLTNLGAPAAFKYFDTTIDRKRYTSTKEVLDATLIHQSITGLYETRIDLSQLGGDGGGGGGSGGGGSGGGGSGGGGSGGGGSGGTLNLEDEYRLYETSAEPEVSPGSTWLSDFPQAWAETGGMGLAVRQAPLIIPLKATSTPVSIKQYPMSQEAKLGIKPHIQRLLDQGILVPCQSPWNTPLLPVKKPGTNDYRPVQDLREVNKRVEDIHPTVPNPYNLLSGLPPSHRWYTVLDLKDAFFCLRLHPTSQPLFAFEWRDPGMGISGQLTWTRLPQGFKNSPTLFNEALHRDLADFRIQHPDLILLQYVDDILLAATSELDCQQGTRALLLTLGNLGYRASAKKAQLCQKQVKYLGYLLKEGQRWLTEARKETVMGQPTPKTPRQLREFLGKAGFCRLFIPGFAEMAAPLYPLTKPGTLFNWGPDQQKAYQEIKQALLTAPALGLPDLTKPFELFVDEKQGYAKGVLTQKLGPWRRPVAYLSKKLDPVAAGWPPCLRMVAAIAVLRKDAGKLTMGQPLVILAPHAVEALVKQPPDRWLSNARMTHYQAMLLDTDRVQFGPVVALNPATLLPLPEEGAPHDCLEILAETHGTRPDLTDQPIPDADHTWYTDGSSFLQEGQRKAGAAVTTETEVIWARALPAGTSAQRAELIALTQALKMAEGKRLNVYTDSRYAFATAHIHGEIYRRRGWLTSEGREIKNKSEILALLKALFLPKRLSIIHCLGHQKGDSAEARGNRLADQAAREAAIKTPPDTSTLLAGKRTADGSEFEKRTADGSEFESPKKKAKVE

SEQ ID NO: 6179 - protein, 2110 aa, synthetic construct
MPAAKRVKLDGGDKKYSIGLDIGTNSVGWAVITDEYKVPSKKFKVLGNTDRHSIKKNLIGALLFDSGETAEATRLKRTARRRYTRRKNRICYLQEIFSNEMAKVDDSFFHRLEESFLVEEDKKHERHPIFGNIVDEVAYHEKYPTIYHLRKKLVDSTDKADLRLIYLALAHMIKFRGHFLIEGDLNPDNSDVDKLFIQLVQTYNQLFEENPINASGVDAKAILSARLSKSRRLENLIAQLPGEKKNGLFGNLIALSLGLTPNFKSNFDLAEDAKLQLSKDTYDDDLDNLLAQIGDQYADLFLAAKNLSDAILLSDILRVNTEITKAPLSASMIKRYDEHHQDLTLLKALVRQQLPEKYKEIFFDQSKNGYAGYIDGGASQEEFYKFIKPILEKMDGTEELLVKLNREDLLRKQRTFDNGSIPHQIHLGELHAILRRQEDFYPFLKDNREKIEKILTFRIPYYVGPLARGNSRFAWMTRKSEETITPWNFEEVVDKGASAQSFIERMTNFDKNLPNEKVLPKHSLLYEYFTVYNELTKVKYVTEGMRKPAFLSGEQKKAIVDLLFKTNRKVTVKQLKEDYFKKIECFDSVEISGVEDRFNASLGTYHDLLKIIKDKDFLDNEENEDILEDIVLTLTLFEDREMIEERLKTYAHLFDDKVMKQLKRRRYTGWGRLSRKLINGIRDKQSGKTILDFLKSDGFANRNFMQLIHDDSLTFKEDIQKAQVSGQGDSLHEHIANLAGSPAIKKGILQTVKVVDELVKVMGRHKPENIVIEMARENQTTQKGQKNSRERMKRIEEGIKELGSQILKEHPVENTQLQNEKLYLYYLQNGRDMYVDQELDINRLSDYDVDHIVPQSFLKDDSIDNKVLTRSDKARGKSDNVPSEEVVKKMKNYWRQLLNAKLITQRKFDNLTKAERGGLSELDKAGFIKRQLVETRQITKHVAQILDSRMNTKYDENDKLIREVKVITLKSKLVSDFRKDFQFYKVREINNYHHAHDAYLNAVVGTALIKKYPKLESEFVYGDYKVYDVRKMIAKSEQEIGKATAKYFFYSNIMNFFKTEITLANGEIRKRPLIETNGETGEIVWDKGRDFATVRKVLSMPQVNIVKKTEVQTGGFSKESILPKRNSDKLIARKKDWDPKKYGGFDSPTVAYSVLVVAKVEKGKSKKLKSVKELLGITIMERSSFEKNPIDFLEAKGYKEVKKDLIIKLPKYSLFELENGRKRMLASAGELQKGNELALPSKYVNFLYLASHYEKLKGSPEDNEQKQLFVEQHKHYLDEIIEQISEFSKRVILADANLDKVLSAYNKHRDKPIREQAENIIHLFTLTNLGAPAAFKYFDTTIDRKRYTSTKEVLDATLIHQSITGLYETRIDLSQLGGDGGGGGGSGGGGSGGGGSGGGGSGGGGSGGTLNIEDEYRLHETSKGPDVPLGSTWLSDFPQAWAETGGMGLAFRQAPLIISLKATSTPVSIKQYPMSQEARLGIKPHIQRLLDQGILVPCQSPWNTPLLPVKKPGTNDYRPVQDLREVNKRVEDIHPTVPNPYNLLSGLPPSHQWYTVLDLKDAFFCLRLHPTSQSLFAFEWKDPEMGISGQLTWTRLPQGFKNSPTLFNEALHRDLADFRIQHPDLILLQYVDDLLLAATSELDCQQGTRALLQTLGDLGYRASAKKAQICQKQVKYLGYLLKEGQRWLTEARKETVMGQPTPKTPRQLREFLGTAGLCRLWIPGFAEMAAPLYPLTKPGTLFKWGPDQQKAYQEIKQALLTAPALGLPDLTKPFELFVDEKQGYAKGVLTQKLGPWRRPVAYLSKKLDPVAAGWPPCLRMVAAIAVLTKDVGKLTMGQPLVILAPHAVEALVKQPPDRWLSNARMTHYQALLLDTDRVQFGPIVALNPATLLPLPEEGLQHDCLDILAEAHGTRPDLTDQPLPDADHTWYTDGSSFLQEGQRRAGAAVTTETEVIWAKALPAGTSAQRAELIALTQALKMAAGKKLNVYTDSRYAFATAHIHGEIYRRRGWLTSEGKEIKNKDEILALLKALFLPKRLSIIHCPGHQKGNHAEARGNRMADQAAREVATRETPETSTLLAGKRTADGSEFEKRTADGSEFESPKKKAKVE

SEQ ID NO: 6180 - protein, 2110 aa, synthetic construct
MPAAKRVKLDGGDKKYSIGLDIGTNSVGWAVITDEYKVPSKKFKVLGNTDRHSIKKNLIGALLFDSGETAEATRLKRTARRRYTRRKNRICYLQEIFSNEMAKVDDSFFHRLEESFLVEEDKKHERHPIFGNIVDEVAYHEKYPTIYHLRKKLVDSTDKADLRLIYLALAHMIKFRGHFLIEGDLNPDNSDVDKLFIQLVQTYNQLFEENPINASGVDAKAILSARLSKSRRLENLIAQLPGEKKNGLFGNLIALSLGLTPNFKSNFDLAEDAKLQLSKDTYDDDLDNLLAQIGDQYADLFLAAKNLSDAILLSDILRVNTEITKAPLSASMIKRYDEHHQDLTLLKALVRQQLPEKYKEIFFDQSKNGYAGYIDGGASQEEFYKFIKPILEKMDGTEELLVKLNREDLLRKQRTFDNGSIPHQIHLGELHAILRRQEDFYPFLKDNREKIEKILTFRIPYYVGPLARGNSRFAWMTRKSEETITPWNFEEVVDKGASAQSFIERMTNFDKNLPNEKVLPKHSLLYEYFTVYNELTKVKYVTEGMRKPAFLSGEQKKAIVDLLFKTNRKVTVKQLKEDYFKKIECFDSVEISGVEDRFNASLGTYHDLLKIIKDKDFLDNEENEDILEDIVLTLTLFEDREMIEERLKTYAHLFDDKVMKQLKRRRYTGWGRLSRKLINGIRDKQSGKTILDFLKSDGFANRNFMQLIHDDSLTFKEDIQKAQVSGQGDSLHEHIANLAGSPAIKKGILQTVKVVDELVKVMGRHKPENIVIEMARENQTTQKGQKNSRERMKRIEEGIKELGSQILKEHPVENTQLQNEKLYLYYLQNGRDMYVDQELDINRLSDYDVDHIVPQSFLKDDSIDNKVLTRSDKARGKSDNVPSEEVVKKMKNYWRQLLNAKLITQRKFDNLTKAERGGLSELDKAGFIKRQLVETRQITKHVAQILDSRMNTKYDENDKLIREVKVITLKSKLVSDFRKDFQFYKVREINNYHHAHDAYLNAVVGTALIKKYPKLESEFVYGDYKVYDVRKMIAKSEQEIGKATAKYFFYSNIMNFFKTEITLANGEIRKRPLIETNGETGEIVWDKGRDFATVRKVLSMPQVNIVKKTEVQTGGFSKESILPKRNSDKLIARKKDWDPKKYGGFDSPTVAYSVLVVAKVEKGKSKKLKSVKELLGITIMERSSFEKNPIDFLEAKGYKEVKKDLIIKLPKYSLFELENGRKRMLASAGELQKGNELALPSKYVNFLYLASHYEKLKGSPEDNEQKQLFVEQHKHYLDEIIEQISEFSKRVILADANLDKVLSAYNKHRDKPIREQAENIIHLFTLTNLGAPAAFKYFDTTIDRKRYTSTKEVLDATLIHQSITGLYETRIDLSQLGGDGGGGGGSGGGGSGGGGSGGGGSGGGGSGGTLNIEDEHRLHETSKEPDVSLGSTWLSDFPQAWAETGGMGLAVRQAPLIIPLKATSTPVSIKQYPMSQEARLGIKPHIQRLLDQGILVPCQSPWNTPLLPVKKPGTNDYRPVQDLREVNKRVEDIHPTVPNPYNLLSGLPPSHQWYTVLDLKDAFFCLRLHPTSQPLFAFEWRDPEMGISGQLTWTRLPQGFKNSPTLFNEALHRDLADFRIQHPDLILLQYVDDLLLAATSELDCQQGTRALLQTLGNLGYRASAKKAQICQKQVKYLGYLLKEGQRWLTEARKETVMGQPTPKTPRQLREFLGTAGFCRLWIPGFAEMAAPLYPLTKPGTLFNWGPDQQKAYQEIKQALLTAPALGLPDLTKPFELFVDEKQGYAKGVLTQKLGPWRRPVAYLSKKLDPVAAGWPPCLRMVAAIAVLTKDAGKLTMGQPLVILAPHAVEALVKQPPDRWLSNARMTHYQALLLDTDRVQFGPVVALNPATLLPLPEEGLQHNCLDILAEAHGTRPDLTDQPLPDADHTWYTDGSSLLQEGQRKAGAAVTTETEVIWAKALPAGTSAQRAELIALTQALKMAEGKKLNVYTDSRYAFATAHIHGEIYRRRGWLTSEGKEIKNKDEILALLKALFLPKRLSIIHCPGHQKGHSAEARGNRMADQAARKAAITETPDTSTLLAGKRTADGSEFEKRTADGSEFESPKKKAKVE

SEQ ID NO: 6181 - protein, 2110 aa, synthetic construct; identical to SEQ ID NO: 4504

SEQ ID NO: 6182 - protein, 2110 aa, synthetic construct; identical to SEQ ID NO: 6180

SEQ ID NO: 6183 - protein, 2110 aa, synthetic construct; identical to SEQ ID NO: 4504

SEQ ID NO: 6184 - protein, 2130 aa, synthetic construct
MPAAKRVKLDGGDKKYSIGLDIGTNSVGWAVITDEYKVPSKKFKVLGNTDRHSIKKNLIGALLFDSGETAEATRLKRTARRRYTRRKNRICYLQEIFSNEMAKVDDSFFHRLEESFLVEEDKKHERHPIFGNIVDEVAYHEKYPTIYHLRKKLVDSTDKADLRLIYLALAHMIKFRGHFLIEGDLNPDNSDVDKLFIQLVQTYNQLFEENPINASGVDAKAILSARLSKSRRLENLIAQLPGEKKNGLFGNLIALSLGLTPNFKSNFDLAEDAKLQLSKDTYDDDLDNLLAQIGDQYADLFLAAKNLSDAILLSDILRVNTEITKAPLSASMIKRYDEHHQDLTLLKALVRQQLPEKYKEIFFDQSKNGYAGYIDGGASQEEFYKFIKPILEKMDGTEELLVKLNREDLLRKQRTFDNGSIPHQIHLGELHAILRRQEDFYPFLKDNREKIEKILTFRIPYYVGPLARGNSRFAWMTRKSEETITPWNFEEVVDKGASAQSFIERMTNFDKNLPNEKVLPKHSLLYEYFTVYNELTKVKYVTEGMRKPAFLSGEQKKAIVDLLFKTNRKVTVKQLKEDYFKKIECFDSVEISGVEDRFNASLGTYHDLLKIIKDKDFLDNEENEDILEDIVLTLTLFEDREMIEERLKTYAHLFDDKVMKQLKRRRYTGWGRLSRKLINGIRDKQSGKTILDFLKSDGFANRNFMQLIHDDSLTFKEDIQKAQVSGQGDSLHEHIANLAGSPAIKKGILQTVKVVDELVKVMGRHKPENIVIEMARENQTTQKGQKNSRERMKRIEEGIKELGSQILKEHPVENTQLQNEKLYLYYLQNGRDMYVDQELDINRLSDYDVDHIVPQSFLKDDSIDNKVLTRSDKARGKSDNVPSEEVVKKMKNYWRQLLNAKLITQRKFDNLTKAERGGLSELDKAGFIKRQLVETRQITKHVAQILDSRMNTKYDENDKLIREVKVITLKSKLVSDFRKDFQFYKVREINNYHHAHDAYLNAVVGTALIKKYPKLESEFVYGDYKVYDVRKMIAKSEQEIGKATAKYFFYSNIMNFFKTEITLANGEIRKRPLIETNGETGEIVWDKGRDFATVRKVLSMPQVNIVKKTEVQTGGFSKESILPKRNSDKLIARKKDWDPKKYGGFDSPTVAYSVLVVAKVEKGKSKKLKSVKELLGITIMERSSFEKNPIDFLEAKGYKEVKKDLIIKLPKYSLFELENGRKRMLASAGELQKGNELALPSKYVNFLYLASHYEKLKGSPEDNEQKQLFVEQHKHYLDEIIEQISEFSKRVILADANLDKVLSAYNKHRDKPIREQAENIIHLFTLTNLGAPAAFKYFDTTIDRKRYTSTKEVLDATLIHQSITGLYETRIDLSQLGGDGGGGGGSGGGGSGGGGSGGGGSGGGGSGGVQEISDSRPMLHIYLNGRRFLGLLDTGADKTCIAGRDWPANWPIHQTESSLQGLGMACGVARSSQPLRWQHEDKSGIIHPFVIPTLPFTLWGRDIMKDIKVRLMTDSPDDSQDLMIGAIESNLFADQISWKSDQPVWLNQWPLKQEKLQALQQLVTEQLQLGHLEESNSPWNTPVFVIKKKSGKWRLLQDLRAVNATMHDMGALQPGLPSPVAVPKGWEIIIIDLQDCFFNIKLHPEDCKRFAFSVPSPNFKRPYQRFQWKVLPQGMKNSPTLCQKFVDKAILTVRDKYQDSYIVHYMDDILLAHPSRSIVDEILTSMIQALNKHGLVVSTEKIQKYDNLKYLGTHIQGDSVSYQKLQIRTDKLRTLNDFQKLLGNINWIRPFLKLTTGELKPLFEILNGDSNPISTRKLTPEACKALQLMNERLSTARVKRLDLSQPWSLCILKTEYTPTACLWQDGVVEWIHLPHISPKVITPYDIFCTQLIIKGRHRSKELFSKDPDYIVVPYTKVQFDLLLQEKEDWPISLLGFLGEVHFHLPKDPLLTFTLQTAIIFPHMTSTTPLEKGIVIFTDGSANGRSVTYIQGREPIIKENTQNTAQQAEIVAVITAFEEVSQPFNLYTDSKYVTGLFPEIETATLSPRTKIYTELKHLQRLIHKRQEKFYIGHIRGHTGLPGPLAQGNAYADSLTRILTAAGKRTADGSEFEKRTADGSEFESPKKKAKVE

SEQ ID NO: 6185 - protein, 2130 aa, synthetic construct
MPAAKRVKLDGGDKKYSIGLDIGTNSVGWAVITDEYKVPSKKFKVLGNTDRHSIKKNLIGALLFDSGETAEATRLKRTARRRYTRRKNRICYLQEIFSNEMAKVDDSFFHRLEESFLVEEDKKHERHPIFGNIVDEVAYHEKYPTIYHLRKKLVDSTDKADLRLIYLALAHMIKFRGHFLIEGDLNPDNSDVDKLFIQLVQTYNQLFEENPINASGVDAKAILSARLSKSRRLENLIAQLPGEKKNGLFGNLIALSLGLTPNFKSNFDLAEDAKLQLSKDTYDDDLDNLLAQIGDQYADLFLAAKNLSDAILLSDILRVNTEITKAPLSASMIKRYDEHHQDLTLLKALVRQQLPEKYKEIFFDQSKNGYAGYIDGGASQEEFYKFIKPILEKMDGTEELLVKLNREDLLRKQRTFDNGSIPHQIHLGELHAILRRQEDFYPFLKDNREKIEKILTFRIPYYVGPLARGNSRFAWMTRKSEETITPWNFEEVVDKGASAQSFIERMTNFDKNLPNEKVLPKHSLLYEYFTVYNELTKVKYVTEGMRKPAFLSGEQKKAIVDLLFKTNRKVTVKQLKEDYFKKIECFDSVEISGVEDRFNASLGTYHDLLKIIKDKDFLDNEENEDILEDIVLTLTLFEDREMIEERLKTYAHLFDDKVMKQLKRRRYTGWGRLSRKLINGIRDKQSGKTILDFLKSDGFANRNFMQLIHDDSLTFKEDIQKAQVSGQGDSLHEHIANLAGSPAIKKGILQTVKVVDELVKVMGRHKPENIVIEMARENQTTQKGQKNSRERMKRIEEGIKELGSQILKEHPVENTQLQNEKLYLYYLQNGRDMYVDQELDINRLSDYDVDHIVPQSFLKDDSIDNKVLTRSDKARGKSDNVPSEEVVKKMKNYWRQLLNAKLITQRKFDNLTKAERGGLSELDKAGFIKRQLVETRQITKHVAQILDSRMNTKYDENDKLIREVKVITLKSKLVSDFRKDFQFYKVREINNYHHAHDAYLNAVVGTALIKKYPKLESEFVYGDYKVYDVRKMIAKSEQEIGKATAKYFFYSNIMNFFKTEITLANGEIRKRPLIETNGETGEIVWDKGRDFATVRKVLSMPQVNIVKKTEVQTGGFSKESILPKRNSDKLIARKKDWDPKKYGGFDSPTVAYSVLVVAKVEKGKSKKLKSVKELLGITIMERSSFEKNPIDFLEAKGYKEVKKDLIIKLPKYSLFELENGRKRMLASAGELQKGNELALPSKYVNFLYLASHYEKLKGSPEDNEQKQLFVEQHKHYLDEIIEQISEFSKRVILADANLDKVLSAYNKHRDKPIREQAENIIHLFTLTNLGAPAAFKYFDTTIDRKRYTSTKEVLDATLIHQSITGLYETRIDLSQLGGDGGGGGGSGGGGSGGGGSGGGGSGGGGSGGWVQEISDSRPMLHIYLNGRRFLGLLNTGADKTCIAGRDWPANWPIHQTESSLQGLGMACGVARSSQPLRWQHEDKSGIIHPFVIPTLPFTLWGRDIMKDIKVRLMTDSPDDSQDLMIGAIESNLFADQISWKSDQPVWLNQWPLKQEKLQALQQLVTEQLQLGHLEESNSPWNTPVFVIKKKSGKWRLLQDLRAVNATMHDMGALQPGLPSPVAVPKGWEIIIIDLQDCFFNIKLHPEDCKRFAFSVPSPNFKRPYQRFQWKVLPQGMKNSPTLCQKFVDKAILTVRDKYQDSYIVHYMDDILLAHPSRSIVDEILTSMIQALNKHGLVVSTEKIQKYDNLKYLGTHIQGDSVSYQKLQIRTDKLRTLNDFQKLLGNINWIRPFLKLTTGELKPLFEILNGDSNPISTRKLTPEACKALQLMNERLSTARVKRLDLSQPWSLCILKTEYTPTACLWQDGVVEWIHLPHISPKVITPYDIFCTQLIIKGRHRSKELFSKDPDYIVVPYTKVQFDLLLQEKEDWPISLLGFLGEVHFHLPKDPLLTFTLQTAIIFPHMTSTTPLEKGIVIFTDGSANGRSVTYIQGREPIIKENTQNTAQQAEIVAVITAFEEVSQPFNLYTDSKYVTGLFPEIETATLSPRTKIYTELKHLQRLIHKRQEKFYIGHIRGHTGLPGPLAQGNAYADSLTRILTAGKRTADGSEFEKRTADGSEFESPKKKAKVE

SEQ ID NO: 6186 - protein, 2130 aa, synthetic construct; identical to SEQ ID NO: 6185

SEQ ID NO: 6187 - protein, 2038 aa, synthetic construct
MPAAKRVKLDGGDKKYSIGLDIGTNSVGWAVITDEYKVPSKKFKVLGNTDRHSIKKNLIGALLFDSGETAEATRLKRTARRRYTRRKNRICYLQEIFSNEMAKVDDSFFHRLEESFLVEEDKKHERHPIFGNIVDEVAYHEKYPTIYHLRKKLVDSTDKADLRLIYLALAHMIKFRGHFLIEGDLNPDNSDVDKLFIQLVQTYNQLFEENPINASGVDAKAILSARLSKSRRLENLIAQLPGEKKNGLFGNLIALSLGLTPNFKSNFDLAEDAKLQLSKDTYDDDLDNLLAQIGDQYADLFLAAKNLSDAILLSDILRVNTEITKAPLSASMIKRYDEHHQDLTLLKALVRQQLPEKYKEIFFDQSKNGYAGYIDGGASQEEFYKFIKPILEKMDGTEELLVKLNREDLLRKQRTFDNGSIPHQIHLGELHAILRRQEDFYPFLKDNREKIEKILTFRIPYYVGPLARGNSRFAWMTRKSEETITPWNFEEVVDKGASAQSFIERMTNFDKNLPNEKVLPKHSLLYEYFTVYNELTKVKYVTEGMRKPAFLSGEQKKAIVDLLFKTNRKVTVKQLKEDYFKKIECFDSVEISGVEDRFNASLGTYHDLLKIIKDKDFLDNEENEDILEDIVLTLTLFEDREMIEERLKTYAHLFDDKVMKQLKRRRYTGWGRLSRKLINGIRDKQSGKTILDFLKSDGFANRNFMQLIHDDSLTFKEDIQKAQVSGQGDSLHEHIANLAGSPAIKKGILQTVKVVDELVKVMGRHKPENIVIEMARENQTTQKGQKNSRERMKRIEEGIKELGSQILKEHPVENTQLQNEKLYLYYLQNGRDMYVDQELDINRLSDYDVDHIVPQSFLKDDSIDNKVLTRSDKARGKSDNVPSEEVVKKMKNYWRQLLNAKLITQRKFDNLTKAERGGLSELDKAGFIKRQLVETRQITKHVAQILDSRMNTKYDENDKLIREVKVITLKSKLVSDFRKDFQFYKVREINNYHHAHDAYLNAVVGTALIKKYPKLESEFVYGDYKVYDVRKMIAKSEQEIGKATAKYFFYSNIMNFFKTEITLANGEIRKRPLIETNGETGEIVWDKGRDFATVRKVLSMPQVNIVKKTEVQTGGFSKESILPKRNSDKLIARKKDWDPKKYGGFDSPTVAYSVLVVAKVEKGKSKKLKSVKELLGITIMERSSFEKNPIDFLEAKGYKEVKKDLIIKLPKYSLFELENGRKRMLASAGELQKGNELALPSKYVNFLYLASHYEKLKGSPEDNEQKQLFVEQHKHYLDEIIEQISEFSKRVILADANLDKVLSAYNKHRDKPIREQAENIIHLFTLTNLGAPAAFKYFDTTIDRKRYTSTKEVLDATLIHQSITGLYETRIDLSQLGGDGGGGGGSGGGGSGGGGSGGGGSGGGGSGGGRDIMKDIKVRLMTDSPDDSQDLMIGAIESNLFADQISWKSDQPVWLNQWPLKQEKLQALQQLVTEQLQLGHLEESNSPWNTPVFVIKKKSGKWRLLQDLRAVNATMHDMGALQPGLPSPVAVPKGWEIIIIDLQDCFFNIKLHPEDCKRFAFSVPSPNFKRPYQRFQWKVLPQGMKNSPTLCQKFVDKAILTVRDKYQDSYIVHYMDDILLAHPSRSIVDEILTSMIQALNKHGLVVSTEKIQKYDNLKYLGTHIQGDSVSYQKLQIRTDKLRTLNDFQKLLGNINWIRPFLKLTTGELKPLFEILNGDSNPISTRKLTPEACKALQLMNERLSTARVKRLDLSQPWSLCILKTEYTPTACLWQDGVVEWIHLPHISPKVITPYDIFCTQLIIKGRHRSKELFSKDPDYIVVPYTKVQFDLLLQEKEDWPISLLGFLGEVHFHLPKDPLLTFTLQTAIIFPHMTSTTPLEKGIVIFTDGSANGRSVTYIQGREPIIKENTQNTAQQAEIVAVITAFEEVSQPFNLYTDSKYVTGLFPEIETATLSPRTKIYTELKHLQRLIHKRQEKFYIGHIRGHTGLPGPLAQGNAYADSLTRILTAGKRTADGSEFEKRTADGSEFESPKKKAKVE

SEQ ID NO: 6188 - protein, 2102 aa, synthetic construct
MPAAKRVKLDGGDKKYSIGLDIGTNSVGWAVITDEYKVPSKKFKVLGNTDRHSIKKNLIGALLFDSGETAEATRLKRTARRRYTRRKNRICYLQEIFSNEMAKVDDSFFHRLEESFLVEEDKKHERHPIFGNIVDEVAYHEKYPTIYHLRKKLVDSTDKADLRLIYLALAHMIKFRGHFLIEGDLNPDNSDVDKLFIQLVQTYNQLFEENPINASGVDAKAILSARLSKSRRLENLIAQLPGEKKNGLFGNLIALSLGLTPNFKSNFDLAEDAKLQLSKDTYDDDLDNLLAQIGDQYADLFLAAKNLSDAILLSDILRVNTEITKAPLSASMIKRYDEHHQDLTLLKALVRQQLPEKYKEIFFDQSKNGYAGYIDGGASQEEFYKFIKPILEKMDGTEELLVKLNREDLLRKQRTFDNGSIPHQIHLGELHAILRRQEDFYPFLKDNREKIEKILTFRIPYYVGPLARGNSRFAWMTRKSEETITPWNFEEVVDKGASAQSFIERMTNFDKNLPNEKVLPKHSLLYEYFTVYNELTKVKYVTEGMRKPAFLSGEQKKAIVDLLFKTNRKVTVKQLKEDYFKKIECFDSVEISGVEDRFNASLGTYHDLLKIIKDKDFLDNEENEDILEDIVLTLTLFEDREMIEERLKTYAHLFDDKVMKQLKRRRYTGWGRLSRKLINGIRDKQSGKTILDFLKSDGFANRNFMQLIHDDSLTFKEDIQKAQVSGQGDSLHEHIANLAGSPAIKKGILQTVKVVDELVKVMGRHKPENIVIEMARENQTTQKGQKNSRERMKRIEEGIKELGSQILKEHPVENTQLQNEKLYLYYLQNGRDMYVDQELDINRLSDYDVDHIVPQSFLKDDSIDNKVLTRSDKARGKSDNVPSEEVVKKMKNYWRQLLNAKLITQRKFDNLTKAERGGLSELDKAGFIKRQLVETRQITKHVAQILDSRMNTKYDENDKLIREVKVITLKSKLVSDFRKDFQFYKVREINNYHHAHDAYLNAVVGTALIKKYPKLESEFVYGDYKVYDVRKMIAKSEQEIGKATAKYFFYSNIMNFFKTEITLANGEIRKRPLIETNGETGEIVWDKGRDFATVRKVLSMPQVNIVKKTEVQTGGFSKESILPKRNSDKLIARKKDWDPKKYGGFDSPTVAYSVLVVAKVEKGKSKKLKSVKELLGITIMERSSFEKNPIDFLEAKGYKEVKKDLIIKLPKYSLFELENGRKRMLASAGELQKGNELALPSKYVNFLYLASHYEKLKGSPEDNEQKQLFVEQHKHYLDEIIEQISEFSKRVILADANLDKVLSAYNKHRDKPIREQAENIIHLFTLTNLGAPAAFKYFDTTIDRKRYTSTKEVLDATLIHQSITGLYETRIDLSQLGGDGGGGGGSGGGGSGGGGSGGGGSGGGGSGGLDDEYRLYSPLVKPDQNIQFWLEQFPQAWAETAGMGLAKQVPPQVIQLKASATPVSVRQYPLSKEAQEGIRPHVQRLIQQGILVPVQSPWNTPLLPVRKPGTNDYRPVQDLREVNKRVQDIHPTVPNPYNLLCALPPQRSWYTVLDLKDAFFCLRLHPTSQPLFAFEWRDPGTGRTGQLTWTRLPQGFKNSPTIFNEALHRDLANFRIQHPQVTLLQYVDDLLLAGATKQDCLEGTKALLLELSDLGYRASAKKAQICRREVTYLGYSLRDGQRWLTEARKKTVVQIPAPTTAKQVREFLGKAGFCRLFIPGFATLAAPLYPLTKPKGEFSWAPEHQKAFDAIKKALLSAPALALPDVTKPFTLYVDERKGVARGVLTQTLGPWRRPVAYLSKKLDPVASGWPVCLKAIAAVAILVKDADKLTLGQNITVIAPHALENIVRQPPDRWMTNARMTHYQSLLLTERVTFAPPAALNPATLLPEETDEPVTHDCHQLLIEETGVRKDLTDIPLTGEVLTWFTDGSSYVVEGKRMAGAAVVDGTRTIWASSLPEGTSAQKAELMALTQALRLAEGKSINIYTDSRYAFATAHVHGAIYKQRGWLTSAGREIKNKEEILSLLEALHLPKRLAIIHCPGHQKAKDPISRGNQMADRVAKQAAQGVNLLPAGKRTADGSEFEKRTADGSEFESPKKKAKVE

SEQ ID NO: 6189 - protein, 2104 aa, synthetic construct
MPAAKRVKLDGGDKKYSIGLDIGTNSVGWAVITDEYKVPSKKFKVLGNTDRHSIKKNLIGALLFDSGETAEATRLKRTARRRYTRRKNRICYLQEIFSNEMAKVDDSFFHRLEESFLVEEDKKHERHPIFGNIVDEVAYHEKYPTIYHLRKKLVDSTDKADLRLIYLALAHMIKFRGHFLIEGDLNPDNSDVDKLFIQLVQTYNQLFEENPINASGVDAKAILSARLSKSRRLENLIAQLPGEKKNGLFGNLIALSLGLTPNFKSNFDLAEDAKLQLSKDTYDDDLDNLLAQIGDQYADLFLAAKNLSDAILLSDILRVNTEITKAPLSASMIKRYDEHHQDLTLLKALVRQQLPEKYKEIFFDQSKNGYAGYIDGGASQEEFYKFIKPILEKMDGTEELLVKLNREDLLRKQRTFDNGSIPHQIHLGELHAILRRQEDFYPFLKDNREKIEKILTFRIPYYVGPLARGNSRFAWMTRKSEETITPWNFEEVVDKGASAQSFIERMTNFDKNLPNEKVLPKHSLLYEYFTVYNELTKVKYVTEGMRKPAFLSGEQKKAIVDLLFKTNRKVTVKQLKEDYFKKIECFDSVEISGVEDRFNASLGTYHDLLKIIKDKDFLDNEENEDILEDIVLTLTLFEDREMIEERLKTYAHLFDDKVMKQLKRRRYTGWGRLSRKLINGIRDKQSGKTILDFLKSDGFANRNFMQLIHDDSLTFKEDIQKAQVSGQGDSLHEHIANLAGSPAIKKGILQTVKVVDELVKVMGRHKPENIVIEMARENQTTQKGQKNSRERMKRIEEGIKELGSQILKEHPVENTQLQNEKLYLYYLQNGRDMYVDQELDINRLSDYDVDHIVPQSFLKDDSIDNKVLTRSDKARGKSDNVPSEEVVKKMKNYWRQLLNAKLITQRKFDNLTKAERGGLSELDKAGFIKRQLVETRQITKHVAQILDSRMNTKYDENDKLIREVKVITLKSKLVSDFRKDFQFYKVREINNYHHAHDAYLNAVVGTALIKKYPKLESEFVYGDYKVYDVRKMIAKSEQEIGKATAKYFFYSNIMNFFKTEITLANGEIRKRPLIETNGETGEIVWDKGRDFATVRKVLSMPQVNIVKKTEVQTGGFSKESILPKRNSDKLIARKKDWDPKKYGGFDSPTVAYSVLVVAKVEKGKSKKLKSVKELLGITIMERSSFEKNPIDFLEAKGYKEVKKDLIIKLPKYSLFELENGRKRMLASAGELQKGNELALPSKYVNFLYLASHYEKLKGSPEDNEQKQLFVEQHKHYLDEIIEQISEFSKRVILADANLDKVLSAYNKHRDKPIREQAENIIHLFTLTNLGAPAAFKYFDTTIDRKRYTSTKEVLDATLIHQSITGLYETRIDLSQLGGDGGGGGGSGGGGSGGGGSGGGGSGGGGSGGTLQLDDEYRLYSPLVKPDQNIQFWLEQFPQAWAETAGMGLAKQVPPQVIQLKASATPVSVRQYPLSKEAQEGIRPHVQRLIQQGILVPVQSPWNTPLLPVRKPGTNDYRPVQDLREVNKRVQDIHPTVPNPYNLLCALPPQRSWYTVLDLKDAFFCLRLHPTSQPLFAFEWRDPGTGRTGQLTWTRLPQGFKNSPTIFDEALHRDLANFRIQHPQVTLLQYVDDLLLAGATKQDCLEGTKALLLELSDLGYRASAKKAQICRREVTYLGYSLRDGQRWLTEARKKTVVQIPAPTTAKQVREFLGTAGFCRLWIPGFATLAAPLYPLTKEKGEFSWAPEHQKAFDAIKKALLSAPALALPDVTKPFTLYVDERKGVARGVLTQTLGPWRRPVAYLSKKLDPVASGWPVCLKAIAAVAILVKDADKLTLGQNITVIAPHALENIVRQPPDRWMTNARMTHYQSLLLTERVTFAPPAALNPATLLPEETDEPVTHDCHQLLIEETGVRKDLTDIPLTGEVLTWFTDGSSYVVEGKRMAGAAVVDGTRTIWASSLPEGTSAQKAELMALTQALRLAEGKSINIYTDSRYAFATAHVHGAIYKQRGLLTSAGREIKNKEEILSLLEALHLPKRLAIIHCPGHQKAKDPISRGNQMADRVAKQAAQGVNLLAGKRTADGSEFEKRTADGSEFESPKKKAKVE

SEQ ID NO: 6190 - protein, 2104 aa, synthetic construct
MPAAKRVKLDGGDKKYSIGLDIGTNSVGWAVITDEYKVPSKKFKVLGNTDRHSIKKNLIGALLFDSGETAEATRLKRTARRRYTRRKNRICYLQEIFSNEMAKVDDSFFHRLEESFLVEEDKKHERHPIFGNIVDEVAYHEKYPTIYHLRKKLVDSTDKADLRLIYLALAHMIKFRGHFLIEGDLNPDNSDVDKLFIQLVQTYNQLFEENPINASGVDAKAILSARLSKSRRLENLIAQLPGEKKNGLFGNLIALSLGLTPNFKSNFDLAEDAKLQLSKDTYDDDLDNLLAQIGDQYADLFLAAKNLSDAILLSDILRVNTEITKAPLSASMIKRYDEHHQDLTLLKALVRQQLPEKYKEIFFDQSKNGYAGYIDGGASQEEFYKFIKPILEKMDGTEELLVKLNREDLLRKQRTFDNGSIPHQIHLGELHAILRRQEDFYPFLKDNREKIEKILTFRIPYYVGPLARGNSRFAWMTRKSEETITPWNFEEVVDKGASAQSFIERMTNFDKNLPNEKVLPKHSLLYEYFTVYNELTKVKYVTEGMRKPAFLSGEQKKAIVDLLFKTNRKVTVKQLKEDYFKKIECFDSVEISGVEDRFNASLGTYHDLLKIIKDKDFLDNEENEDILEDIVLTLTLFEDREMIEERLKTYAHLFDDKVMKQLKRRRYTGWGRLSRKLINGIRDKQSGKTILDFLKSDGFANRNFMQLIHDDSLTFKEDIQKAQVSGQGDSLHEHIANLAGSPAIKKGILQTVKVVDELVKVMGRHKPENIVIEMARENQTTQKGQKNSRERMKRIEEGIKELGSQILKEHPVENTQLQNEKLYLYYLQNGRDMYVDQELDINRLSDYDVDHIVPQSFLKDDSIDNKVLTRSDKARGKSDNVPSEEVVKKMKNYWRQLLNAKLITQRKFDNLTKAERGGLSELDKAGFIKRQLVETRQITKHVAQILDSRMNTKYDENDKLIREVKVITLKSKLVSDFRKDFQFYKVREINNYHHAHDAYLNAVVGTALIKKYPKLESEFVYGDYKVYDVRKMIAKSEQEIGKATAKYFFYSNIMNFFKTEITLANGEIRKRPLIETNGETGEIVWDKGRDFATVRKVLSMPQVNIVKKTEVQTGGFSKESILPKRNSDKLIARKKDWDPKKYGGFDSPTVAYSVLVVAKVEKGKSKKLKSVKELLGITIMERSSFEKNPIDFLEAKGYKEVKKDLIIKLPKYSLFELENGRKRMLASAGELQKGNELALPSKYVNFLYLASHYEKLKGSPEDNEQKQLFVEQHKHYLDEIIEQISEFSKRVILADANLDKVLSAYNKHRDKPIREQAENIIHLFTLTNLGAPAAFKYFDTTIDRKRYTSTKEVLDATLIHQSITGLYETRIDLSQLGGDGGGGGGSGGGGSGGGGSGGGGSGGGGSGGTLQLDDEYRLYSPLVKPDQNIQFWLEQFPQAWAETAGMGLAKQVPPQVIQLKASATPVSVRQYPLSKEAQEGIRPHVQRLIQQGILVPVQSPWNTPLLPVRKPGTNDYRPVQDLREVNKRVQDIHPTVPNPYNLLCALPPQRSWYTVLDLKDAFFCLRLHPTSQPLFAFEWRDPGTGRTGQLTWTRLPQGFKNSPTIFNEALHRDLANFRIQHPQVTLLQYVDDLLLAGATKQDCLEGTKALLLELSDLGYRASAKKAQICRREVTYLGYSLRDGQRWLTEARKKTVVQIPAPTTAKQVREFLGTAGFCRLWIPGFATLAAPLYPLTKPKGEFSWAPEHQKAFDAIKKALLSAPALALPDVTKPFTLYVDERKGVARGVLTQTLGPWRRPVAYLSKKLDPVASGWPVCLKAIAAVAILVKDADKLTLGQNITVIAPHALENIVRQPPDRWMTNARMTHYQSLLLTERVTFAPPAALNPATLLPEETDEPVTHDCHQLLIEETGVRKDLTDIPLTGEVLTWFTDGSSYVVEGKRMAGAAVVDGTRTIWASSLPEGTSAQKAELMALTQALRLAEGKSINIYTDSRYAFATAHVHGAIYKQRGWLTSAGREIKNKEEILSLLEALHLPKRLAIIHCPGHQKAKDPISRGNQMADRVAKQAAQGVNLLAGKRTADGSEFEKRTADGSEFESPKKKAKVE

SEQ ID NO: 6191 - protein, 2190 aa, synthetic construct
MPAAKRVKLDGGDKKYSIGLDIGTNSVGWAVITDEYKVPSKKFKVLGNTDRHSIKKNLIGALLFDSGETAEATRLKRTARRRYTRRKNRICYLQEIFSNEMAKVDDSFFHRLEESFLVEEDKKHERHPIFGNIVDEVAYHEKYPTIYHLRKKLVDSTDKADLRLIYLALAHMIKFRGHFLIEGDLNPDNSDVDKLFIQLVQTYNQLFEENPINASGVDAKAILSARLSKSRRLENLIAQLPGEKKNGLFGNLIALSLGLTPNFKSNFDLAEDAKLQLSKDTYDDDLDNLLAQIGDQYADLFLAAKNLSDAILLSDILRVNTEITKAPLSASMIKRYDEHHQDLTLLKALVRQQLPEKYKEIFFDQSKNGYAGYIDGGASQEEFYKFIKPILEKMDGTEELLVKLNREDLLRKQRTFDNGSIPHQIHLGELHAILRRQEDFYPFLKDNREKIEKILTFRIPYYVGPLARGNSRFAWMTRKSEETITPWNFEEVVDKGASAQSFIERMTNFDKNLPNEKVLPKHSLLYEYFTVYNELTKVKYVTEGMRKPAFLSGEQKKAIVDLLFKTNRKVTVKQLKEDYFKKIECFDSVEISGVEDRFNASLGTYHDLLKIIKDKDFLDNEENEDILEDIVLTLTLFEDREMIEERLKTYAHLFDDKVMKQLKRRRYTGWGRLSRKLINGIRDKQSGKTILDFLKSDGFANRNFMQLIHDDSLTFKEDIQKAQVSGQGDSLHEHIANLAGSPAIKKGILQTVKVVDELVKVMGRHKPENIVIEMARENQTTQKGQKNSRERMKRIEEGIKELGSQILKEHPVENTQLQNEKLYLYYLQNGRDMYVDQELDINRLSDYDVDHIVPQSFLKDDSIDNKVLTRSDKARGKSDNVPSEEVVKKMKNYWRQLLNAKLITQRKFDNLTKAERGGLSELDKAGFIKRQLVETRQITKHVAQILDSRMNTKYDENDKLIREVKVITLKSKLVSDFRKDFQFYKVREINNYHHAHDAYLNAVVGTALIKKYPKLESEFVYGDYKVYDVRKMIAKSEQEIGKATAKYFFYSNIMNFFKTEITLANGEIRKRPLIETNGETGEIVWDKGRDFATVRKVLSMPQVNIVKKTEVQTGGFSKESILPKRNSDKLIARKKDWDPKKYGGFDSPTVAYSVLVVAKVEKGKSKKLKSVKELLGITIMERSSFEKNPIDFLEAKGYKEVKKDLIIKLPKYSLFELENGRKRMLASAGELQKGNELALPSKYVNFLYLASHYEKLKGSPEDNEQKQLFVEQHKHYLDEIIEQISEFSKRVILADANLDKVLSAYNKHRDKPIREQAENIIHLFTLTNLGAPAAFKYFDTTIDRKRYTSTKEVLDATLIHQSITGLYETRIDLSQLGGDGGGGGGSGGGGSGGGGSGGGGSGGGGSGGMDPLQLLQPLEAEIKGTKLKAHWNSGATITCVPEAFLEDERPIQTMLIKTIHGEKQQDVYYLTFKVQGRKVEAEVLASPYDYILLNPSDVPWLMKKPLQLTVLVPLHEYQERLLQQTALPKEQKELLQKLFLKYDALWQHWENQVGHRRIKPHNIATGTLAPRPQKQYPINPKAKPSIQIVIDDLLKQGVLIQQNSTMNTPVYPVPKPDGKWRMVLDYREVNKTIPLIAAQNQHSAGILSSIYRGKYKTTLDLTNGFWAHPITPESYWLTAFTWQGKQYCWTRLPQGFLNSPALFTADVVDLLKEIPNVQAYVDDIYISHDDPQEHLEQLEKIFSILLNAGYVVSLKKSEIAQREVEFLGFNITKEGRGLTDTFKQKLLNITPPKDLKQLQSILGLLNFARNFIPNYSELVKPLYTIVANANGKFISWTEDNSNQLQHIISVLNQADNLEERNPETRLIIKVNSSPSAGYIRYYNEGSKRPIMYVNYIFSKAEAKFTQTEKLLTTMHKGLIKAMDLAMGQEILVYSPIVSMTKIQRTPLPERKALPVRWITWMTYLEDPRIQFHYDKSLPELQQIPNVTEDVIAKTKHPSEFAMVFYTDGSAIKHPDVNKSHSAGMGIAQVQFIPEYKIVHQWSIPLGDHTAQLAEIAAVEFACKKALKISGPVLIVTDSFYVAESANKELPYWKSNGFLNNKKKPLRHVSKWKSIAECLQLKPDIIIMHEKGHQQPMTTLHTEGNNLADKLATQGSYVVHAGKRTADGSEFEKRTADGSEFESPKKKAKVE

SEQ ID NO: 6192 - protein, 2101 aa, synthetic construct
MPAAKRVKLDGGDKKYSIGLDIGTNSVGWAVITDEYKVPSKKFKVLGNTDRHSIKKNLIGALLFDSGETAEATRLKRTARRRYTRRKNRICYLQEIFSNEMAKVDDSFFHRLEESFLVEEDKKHERHPIFGNIVDEVAYHEKYPTIYHLRKKLVDSTDKADLRLIYLALAHMIKFRGHFLIEGDLNPDNSDVDKLFIQLVQTYNQLFEENPINASGVDAKAILSARLSKSRRLENLIAQLPGEKKNGLFGNLIALSLGLTPNFKSNFDLAEDAKLQLSKDTYDDDLDNLLAQIGDQYADLFLAAKNLSDAILLSDILRVNTEITKAPLSASMIKRYDEHHQDLTLLKALVRQQLPEKYKEIFFDQSKNGYAGYIDGGASQEEFYKFIKPILEKMDGTEELLVKLNREDLLRKQRTFDNGSIPHQIHLGELHAILRRQEDFYPFLKDNREKIEKILTFRIPYYVGPLARGNSRFAWMTRKSEETITPWNFEEVVDKGASAQSFIERMTNFDKNLPNEKVLPKHSLLYEYFTVYNELTKVKYVTEGMRKPAFLSGEQKKAIVDLLFKTNRKVTVKQLKEDYFKKIECFDSVEISGVEDRFNASLGTYHDLLKIIKDKDFLDNEENEDILEDIVLTLTLFEDREMIEERLKTYAHLFDDKVMKQLKRRRYTGWGRLSRKLINGIRDKQSGKTILDFLKSDGFANRNFMQLIHDDSLTFKEDIQKAQVSGQGDSLHEHIANLAGSPAIKKGILQTVKVVDELVKVMGRHKPENIVIEMARENQTTQKGQKNSRERMKRIEEGIKELGSQILKEHPVENTQLQNEKLYLYYLQNGRDMYVDQELDINRLSDYDVDHIVPQSFLKDDSIDNKVLTRSDKARGKSDNVPSEEVVKKMKNYWRQLLNAKLITQRKFDNLTKAERGGLSELDKAGFIKRQLVETRQITKHVAQILDSRMNTKYDENDKLIREVKVITLKSKLVSDFRKDFQFYKVREINNYHHAHDAYLNAVVGTALIKKYPKLESEFVYGDYKVYDVRKMIAKSEQEIGKATAKYFFYSNIMNFFKTEITLANGEIRKRPLIETNGETGEIVWDKGRDFATVRKVLSMPQVNIVKKTEVQTGGFSKESILPKRNSDKLIARKKDWDPKKYGGFDSPTVAYSVLVVAKVEKGKSKKLKSVKELLGITIMERSSFEKNPIDFLEAKGYKEVKKDLIIKLPKYSLFELENGRKRMLASAGELQKGNELALPSKYVNFLYLASHYEKLKGSPEDNEQKQLFVEQHKHYLDEIIEQISEFSKRVILADANLDKVLSAYNKHRDKPIREQAENIIHLFTLTNLGAPAAFKYFDTTIDRKRYTSTKEVLDATLIHQSITGLYETRIDLSQLGGDGGGGGGSGGGGSGGGGSGGGGSGGGGSGGVPWLMKKPLQLTVLVPLHEYQERLLQQTALPKEQKELLQKLFLKYDALWQHWENQVGHRRIKPHNIATGTLAPRPQKQYPINPKAKPSIQIVIDDLLKQGVLIQQNSTMNTPVYPVPKPDGKWRMVLDYREVNKTIPLIAAQNQHSAGILSSIYRGKYKTTLDLTNGFWAHPITPESYWLTAFTWQGKQYCWTRLPQGFLNSPALFNADVVDLLKEIPNVQAYVDDIYISHDDPQEHLEQLEKIFSILLNAGYVVSLKKSEIAQREVEFLGFNITKEGRGLTDTFKQKLLNITPPKDLKQLQSILGKLNFARNFIPNYSELVKPLYTIVAPANGKFISWTEDNSNQLQHIISVLNQADNLEERNPETRLIIKVNSSPSAGYIRYYNEGSKRPIMYVNYIFSKAEAKFTQTEKLLTTMHKGLIKAMDLAMGQEILVYSPIVSMTKIQRTPLPERKALPVRWITWMTYLEDPRIQFHYDKSLPELQQIPNVTEDVIAKTKHPSEFAMVFYTDGSAIKHPDVNKSHSAGMGIAQVQFIPEYKIVHQWSIPLGDHTAQLAEIAAVEFACKKALKISGPVLIVTDSFYVAESANKELPYWKSNGFLNNKKKPLRHVSKWKSIAECLQLKPDIIIMHEKGHQQPMTTLHTEGNNLADKLATQGSYVVHAGKRTADGSEFEKRTADGSEFESPKKKAKVE

SEQ ID NO: 6193 - protein, 2190 aa, synthetic construct
MPAAKRVKLDGGDKKYSIGLDIGTNSVGWAVITDEYKVPSKKFKVLGNTDRHSIKKNLIGALLFDSGETAEATRLKRTARRRYTRRKNRICYLQEIFSNEMAKVDDSFFHRLEESFLVEEDKKHERHPIFGNIVDEVAYHEKYPTIYHLRKKLVDSTDKADLRLIYLALAHMIKFRGHFLIEGDLNPDNSDVDKLFIQLVQTYNQLFEENPINASGVDAKAILSARLSKSRRLENLIAQLPGEKKNGLFGNLIALSLGLTPNFKSNFDLAEDAKLQLSKDTYDDDLDNLLAQIGDQYADLFLAAKNLSDAILLSDILRVNTEITKAPLSASMIKRYDEHHQDLTLLKALVRQQLPEKYKEIFFDQSKNGYAGYIDGGASQEEFYKFIKPILEKMDGTEELLVKLNREDLLRKQRTFDNGSIPHQIHLGELHAILRRQEDFYPFLKDNREKIEKILTFRIPYYVGPLARGNSRFAWMTRKSEETITPWNFEEVVDKGASAQSFIERMTNFDKNLPNEKVLPKHSLLYEYFTVYNELTKVKYVTEGMRKPAFLSGEQKKAIVDLLFKTNRKVTVKQLKEDYFKKIECFDSVEISGVEDRFNASLGTYHDLLKIIKDKDFLDNEENEDILEDIVLTLTLFEDREMIEERLKTYAHLFDDKVMKQLKRRRYTGWGRLSRKLINGIRDKQSGKTILDFLKSDGFANRNFMQLIHDDSLTFKEDIQKAQVSGQGDSLHEHIANLAGSPAIKKGILQTVKVVDELVKVMGRHKPENIVIEMARENQTTQKGQKNSRERMKRIEEGIKELGSQILKEHPVENTQLQNEKLYLYYLQNGRDMYVDQELDINRLSDYDVDHIVPQSFLKDDSIDNKVLTRSDKARGKSDNVPSEEVVKKMKNYWRQLLNAKLITQRKFDNLTKAERGGLSELDKAGFIKRQLVETRQITKHVAQILDSRMNTKYDENDKLIREVKVITLKSKLVSDFRKDFQFYKVREINNYHHAHDAYLNAVVGTALIKKYPKLESEFVYGDYKVYDVRKMIAKSEQEIGKATAKYFFYSNIMNFFKTEITLANGEIRKRPLIETNGETGEIVWDKGRDFATVRKVLSMPQVNIVKKTEVQTGGFSKESILPKRNSDKLIARKKDWDPKKYGGFDSPTVAYSVLVVAKVEKGKSKKLKSVKELLGITIMERSSFEKNPIDFLEAKGYKEVKKDLIIKLPKYSLFELENGRKRMLASAGELQKGNELALPSKYVNFLYLASHYEKLKGSPEDNEQKQLFVEQHKHYLDEIIEQISEFSKRVILADANLDKVLSAYNKHRDKPIREQAENIIHLFTLTNLGAPAAFKYFDTTIDRKRYTSTKEVLDATLIHQSITGLYETRIDLSQLGGDGGGGGGSGGGGSGGGGSGGGGSGGGGSGGMDPLQLLQPLEAEIKGTKLKAHWNSGATITCVPEAFLEDERPIQTMLIKTIHGEKQQDVYYLTFKVQGRKVEAEVLASPYDYILLNPSDVPWLMKKPLQLTVLVPLHEYQERLLQQTALPKEQKELLQKLFLKYDALWQHWENQVGHRRIKPHNIATGTLAPRPQKQYPINPKAKPSIQIVIDDLLKQGVLIQQNSTMNTPVYPVPKPDGKWRMVLDYREVNKTIPLIAAQNQHSAGILSSIYRGKYKTTLDLTNGFWAHPITPESYWLTAFTWQGKQYCWTRLPQGFLNSPALFNADVVDLLKEIPNVQAYVDDIYISHDDPQEHLEQLEKIFSILLNAGYVVSLKKSEIAQREVEFLGFNITKEGRGLTDTFKQKLLNITPPKDLKQLQSILGLLNFARNFIPNYSELVKPLYTIVAPANGKFISWTEDNSNQLQHIISVLNQADNLEERNPETRLIIKVNSSPSAGYIRYYNEGSKRPIMYVNYIFSKAEAKFTQTEKLLTTMHKGLIKAMDLAMGQEILVYSPIVSMTKIQRTPLPERKALPVRWITWMTYLEDPRIQFHYDKSLPELQQIPNVTEDVIAKTKHPSEFAMVFYTDGSAIKHPDVNKSHSAGMGIAQVQFIPEYKIVHQWSIPLGDHTAQLAEIAAVEFACKKALKISGPVLIVTDSFYVAESANKELPYWKSNGFLNNKKKPLRHVSKWKSIAECLQLKPDIIIMHEKGHQQPMTTLHTEGNNLADKLATQGSYVVHAGKRTADGSEFEKRTADGSEFESPKKKAKVE

SEQ ID NO: 6194 - protein, 2190 aa, synthetic construct
MPAAKRVKLDGGDKKYSIGLDIGTNSVGWAVITDEYKVPSKKFKVLGNTDRHSIKKNLIGALLFDSGETAEATRLKRTARRRYTRRKNRICYLQEIFSNEMAKVDDSFFHRLEESFLVEEDKKHERHPIFGNIVDEVAYHEKYPTIYHLRKKLVDSTDKADLRLIYLALAHMIKFRGHFLIEGDLNPDNSDVDKLFIQLVQTYNQLFEENPINASGVDAKAILSARLSKSRRLENLIAQLPGEKKNGLFGNLIALSLGLTPNFKSNFDLAEDAKLQLSKDTYDDDLDNLLAQIGDQYADLFLAAKNLSDAILLSDILRVNTEITKAPLSASMIKRYDEHHQDLTLLKALVRQQLPEKYKEIFFDQSKNGYAGYIDGGASQEEFYKFIKPILEKMDGTEELLVKLNREDLLRKQRTFDNGSIPHQIHLGELHAILRRQEDFYPFLKDNREKIEKILTFRIPYYVGPLARGNSRFAWMTRKSEETITPWNFEEVVDKGASAQSFIERMTNFDKNLPNEKVLPKHSLLYEYFTVYNELTKVKYVTEGMRKPAFLSGEQKKAIVDLLFKTNRKVTVKQLKEDYFKKIECFDSVEISGVEDRFNASLGTYHDLLKIIKDKDFLDNEENEDILEDIVLTLTLFEDREMIEERLKTYAHLFDDKVMKQLKRRRYTGWGRLSRKLINGIRDKQSGKTILDFLKSDGFANRNFMQLIHDDSLTFKEDIQKAQVSGQGDSLHEHIANLAGSPAIKKGILQTVKVVDELVKVMGRHKPENIVIEMARENQTTQKGQKNSRERMKRIEEGIKELGSQILKEHPVENTQLQNEKLYLYYLQNGRDMYVDQELDINRLSDYDVDHIVPQSFLKDDSIDNKVLTRSDKARGKSDNVPSEEVVKKMKNYWRQLLNAKLITQRKFDNLTKAERGGLSELDKAGFIKRQLVETRQITKHVAQILDSRMNTKYDENDKLIREVKVITLKSKLVSDFRKDFQFYKVREINNYHHAHDAYLNAVVGTALIKKYPKLESEFVYGDYKVYDVRKMIAKSEQEIGKATAKYFFYSNIMNFFKTEITLANGEIRKRPLIETNGETGEIVWDKGRDFATVRKVLSMPQVNIVKKTEVQTGGFSKESILPKRNSDKLIARKKDWDPKKYGGFDSPTVAYSVLVVAKVEKGKSKKLKSVKELLGITIMERSSFEKNPIDFLEAKGYKEVKKDLIIKLPKYSLFELENGRKRMLASAGELQKGNELALPSKYVNFLYLASHYEKLKGSPEDNEQKQLFVEQHKHYLDEIIEQISEFSKRVILADANLDKVLSAYNKHRDKPIREQAENIIHLFTLTNLGAPAAFKYFDTTIDRKRYTSTKEVLDATLIHQSITGLYETRIDLSQLGGDGGGGGGSGGGGSGGGGSGGGGSGGGGSGGMDPLQLLQPLEAEIKGTKLKAHWNSGATITCVPEAFLEDERPIQTMLIKTIHGEKQQDVYYLTFKVQGRKVEAEVLASPYDYILLNPSDVPWLMKKPLQLTVLVPLHEYQERLLQQTALPKEQKELLQKLFLKYDALWQHWENQVGHRRIKPHNIATGTLAPRPQKQYPINPKAKPSIQIVIDDLLKQGVLIQQNSTMNTPVYPVPKPDGKWRMVLDYREVNKTIPLIAAQNQHSAGILSSIYRGKYKTTLDLTNGFWAHPITPESYWLTAFTWQGKQYCWTRLPQGFLNSPALFNADVVDLLKEIPNVQAYVDDIYISHDDPQEHLEQLEKIFSILLNAGYVVSLKKSEIAQREVEFLGFNITKEGRGLTDTFKQKLLNITPPKDLKQLQSILGKLNFARNFIPNYSELVKPLYTIVAPANGKFISWTEDNSNQLQHIISVLNQADNLEERNPETRLIIKVNSSPSAGYIRYYNEGSKRPIMYVNYIFSKAEAKFTQTEKLLTTMHKGLIKAMDLAMGQEILVYSPIVSMTKIQRTPLPERKALPVRWITWMTYLEDPRIQFHYDKSLPELQQIPNVTEDVIAKTKHPSEFAMVFYTDGSAIKHPDVNKSHSAGMGIAQVQFIPEYKIVHQWSIPLGDHTAQLAEIAAVEFACKKALKISGPVLIVTDSFYVAESANKELPYWKSNGFLNNKKKPLRHVSKWKSIAECLQLKPDIIIMHEKGHQQPMTTLHTEGNNLADKLATQGSYVVHAGKRTADGSEFEKRTADGSEFESPKKKAKVE

SEQ ID NO: 6195 - protein, 2101 aa, synthetic construct
MPAAKRVKLDGGDKKYSIGLDIGTNSVGWAVITDEYKVPSKKFKVLGNTDRHSIKKNLIGALLFDSGETAEATRLKRTARRRYTRRKNRICYLQEIFSNEMAKVDDSFFHRLEESFLVEEDKKHERHPIFGNIVDEVAYHEKYPTIYHLRKKLVDSTDKADLRLIYLALAHMIKFRGHFLIEGDLNPDNSDVDKLFIQLVQTYNQLFEENPINASGVDAKAILSARLSKSRRLENLIAQLPGEKKNGLFGNLIALSLGLTPNFKSNFDLAEDAKLQLSKDTYDDDLDNLLAQIGDQYADLFLAAKNLSDAILLSDILRVNTEITKAPLSASMIKRYDEHHQDLTLLKALVRQQLPEKYKEIFFDQSKNGYAGYIDGGASQEEFYKFIKPILEKMDGTEELLVKLNREDLLRKQRTFDNGSIPHQIHLGELHAILRRQEDFYPFLKDNREKIEKILTFRIPYYVGPLARGNSRFAWMTRKSEETITPWNFEEVVDKGASAQSFIERMTNFDKNLPNEKVLPKHSLLYEYFTVYNELTKVKYVTEGMRKPAFLSGEQKKAIVDLLFKTNRKVTVKQLKEDYFKKIECFDSVEISGVEDRFNASLGTYHDLLKIIKDKDFLDNEENEDILEDIVLTLTLFEDREMIEERLKTYAHLFDDKVMKQLKRRRYTGWGRLSRKLINGIRDKQSGKTILDFLKSDGFANRNFMQLIHDDSLTFKEDIQKAQVSGQGDSLHEHIANLAGSPAIKKGILQTVKVVDELVKVMGRHKPENIVIEMARENQTTQKGQKNSRERMKRIEEGIKELGSQILKEHPVENTQLQNEKLYLYYLQNGRDMYVDQELDINRLSDYDVDHIVPQSFLKDDSIDNKVLTRSDKARGKSDNVPSEEVVKKMKNYWRQLLNAKLITQRKFDNLTKAERGGLSELDKAGFIKRQLVETRQITKHVAQILDSRMNTKYDENDKLIREVKVITLKSKLVSDFRKDFQFYKVREINNYHHAHDAYLNAVVGTALIKKYPKLESEFVYGDYKVYDVRKMIAKSEQEIGKATAKYFFYSNIMNFFKTEITLANGEIRKRPLIETNGETGEIVWDKGRDFATVRKVLSMPQVNIVKKTEVQTGGFSKESILPKRNSDKLIARKKDWDPKKYGGFDSPTVAYSVLVVAKVEKGKSKKLKSVKELLGITIMERSSFEKNPIDFLEAKGYKEVKKDLIIKLPKYSLFELENGRKRMLASAGELQKGNELALPSKYVNFLYLASHYEKLKGSPEDNEQKQLFVEQHKHYLDEIIEQISEFSKRVILADANLDKVLSAYNKHRDKPIREQAENIIHLFTLTNLGAPAAFKYFDTTIDRKRYTSTKEVLDATLIHQSITGLYETRIDLSQLGGDGGGGGGSGGGGSGGGGSGGGGSGGGGSGGIPWLMKKPLQLTTLVPLQEYEERLLKQTMLTGSYKEKLQSLFLKYDALWQHWENQVGHRRIKPHHIATGTVNPRPQKQYPINPKAKASIQTVINDLLKQGVLIQQNSIMNTPVYPVPKPDGKWRMVLDYREVNKTIPLIAAQNQHSAGILSSIFRGKYKTTLDLSNGFWAHSITPESYWLTAFTWLGQQYCWTRLPQGFLNSPALFNADVVDLLKEVPNVQVYVDDIYISHDDPREHLEQLEKVFSLLLNAGYVVSLKKSEIAQHEVEFLGFNITKEGRGLTETFKQKLLNITPPRDLKQLQSILGKLNFARNFIPNFSELVKPLYNIIATAPGKYITWTTDNSQQLQNIISMLNSAENLEERNPEVRLIMKVNTSPSAGYIRFYNEFAKRPIMYLNYVYTKAEVKFTNTEKLLTTIHKGLIKALDLGMGQEILVYSPIVSMTKIQKTPLPERKALPIRWITWMSYLEDPRIQFHYDKTLPELQQVPTVTDDIIAKIKHPSEFSMVFYTDGSAIKHPNVNKSHNAGMGIAQVQFKPEFTVINTWSIPLGDHTAQLAEVAAVEFACKKALKIDGPVLIVTDSFYVAESVNKELPYWQSNGFFNNKKKPLKHVSKWKSIADCIQLKPDIIIIHEKGHQPTASTFHTEGNNLADKLATQGSYVVNAGKRTADGSEFEKRTADGSEFESPKKKAKVE

SEQ ID NO: 6196 - protein, 2190 aa, synthetic construct
MPAAKRVKLDGGDKKYSIGLDIGTNSVGWAVITDEYKVPSKKFKVLGNTDRHSIKKNLIGALLFDSGETAEATRLKRTARRRYTRRKNRICYLQEIFSNEMAKVDDSFFHRLEESFLVEEDKKHERHPIFGNIVDEVAYHEKYPTIYHLRKKLVDSTDKADLRLIYLALAHMIKFRGHFLIEGDLNPDNSDVDKLFIQLVQTYNQLFEENPINASGVDAKAILSARLSKSRRLENLIAQLPGEKKNGLFGNLIALSLGLTPNFKSNFDLAEDAKLQLSKDTYDDDLDNLLAQIGDQYADLFLAAKNLSDAILLSDILRVNTEITKAPLSASMIKRYDEHHQDLTLLKALVRQQLPEKYKEIFFDQSKNGYAGYIDGGASQEEFYKFIKPILEKMDGTEELLVKLNREDLLRKQRTFDNGSIPHQIHLGELHAILRRQEDFYPFLKDNREKIEKILTFRIPYYVGPLARGNSRFAWMTRKSEETITPWNFEEVVDKGASAQSFIERMTNFDKNLPNEKVLPKHSLLYEYFTVYNELTKVKYVTEGMRKPAFLSGEQKKAIVDLLFKTNRKVTVKQLKEDYFKKIECFDSVEISGVEDRFNASLGTYHDLLKIIKDKDFLDNEENEDILEDIVLTLTLFEDREMIEERLKTYAHLFDDKVMKQLKRRRYTGWGRLSRKLINGIRDKQSGKTILDFLKSDGFANRNFMQLIHDDSLTFKEDIQKAQVSGQGDSLHEHIANLAGSPAIKKGILQTVKVVDELVKVMGRHKPENIVIEMARENQTTQKGQKNSRERMKRIEEGIKELGSQILKEHPVENTQLQNEKLYLYYLQNGRDMYVDQELDINRLSDYDVDHIVPQSFLKDDSIDNKVLTRSDKARGKSDNVPSEEVVKKMKNYWRQLLNAKLITQRKFDNLTKAERGGLSELDKAGFIKRQLVETRQITKHVAQILDSRMNTKYDENDKLIREVKVITLKSKLVSDFRKDFQFYKVREINNYHHAHDAYLNAVVGTALIKKYPKLESEFVYGDYKVYDVRKMIAKSEQEIGKATAKYFFYSNIMNFFKTEITLANGEIRKRPLIETNGETGEIVWDKGRDFATVRKVLSMPQVNIVKKTEVQTGGFSKESILPKRNSDKLIARKKDWDPKKYGGFDSPTVAYSVLVVAKVEKGKSKKLKSVKELLGITIMERSSFEKNPIDFLEAKGYKEVKKDLIIKLPKYSLFELENGRKRMLASAGELQKGNELALPSKYVNFLYLASHYEKLKGSPEDNEQKQLFVEQHKHYLDEIIEQISEFSKRVILADANLDKVLSAYNKHRDKPIREQAENIIHLFTLTNLGAPAAFKYFDTTIDRKRYTSTKEVLDATLIHQSITGLYETRIDLSQLGGDGGGGGGSGGGGSGGGGSGGGGSGGGGSGGMDPLQLLQPLEAEIKGTKLKAHWNSGATITCVPQAFLEEEVPIKNIWIKTIHGEKEQPVYYLTFKIQGRKVEAEVISSPYDYILVSPSDIPWLMKKPLQLTTLVPLQEYEERLLKQTMLTGSYKEKLQSLFLKYDALWQHWENQVGHRRIKPHHIATGTVNPRPQKQYPINPKAKASIQTVINDLLKQGVLIQQNSIMNTPVYPVPKPDGKWRMVLDYREVNKTIPLIAAQNQHSAGILSSIFRGKYKTTLDLSNGFWAHSITPESYWLTAFTWLGQQYCWTRLPQGFLNSPALFNADVVDLLKEVPNVQVYVDDIYISHDDPREHLEQLEKVFSLLLNAGYVVSLKKSEIAQHEVEFLGFNITKEGRGLTETFKQKLLNITPPRDLKQLQSILGLLNFARNFIPNFSELVKPLYNIIATAPGKYITWTTDNSQQLQNIISMLNSAENLEERNPEVRLIMKVNTSPSAGYIRFYNEFAKRPIMYLNYVYTKAEVKFTNTEKLLTTIHKGLIKALDLGMGQEILVYSPIVSMTKIQKTPLPERKALPIRWITWMSYLEDPRIQFHYDKTLPELQQVPTVTDDIIAKIKHPSEFSMVFYTDGSAIKHPNVNKSHNAGMGIAQVQFKPEFTVINTWSIPLGDHTAQLAEVAAVEFACKKALKIDGPVLIVTDSFYVAESVNKELPYWQSNGFFNNKKKPLKHVSKWKSIADCIQLKPDIIIIHEKGHQPTASTFHTEGNNLADKLATQGSYVVNAGKRTADGSEFEKRTADGSEFESPKKKAKVE

SEQ ID NO: 6197 - protein, 2190 aa, synthetic construct
MPAAKRVKLDGGDKKYSIGLDIGTNSVGWAVITDEYKVPSKKFKVLGNTDRHSIKKNLIGALLFDSGETAEATRLKRTARRRYTRRKNRICYLQEIFSNEMAKVDDSFFHRLEESFLVEEDKKHERHPIFGNIVDEVAYHEKYPTIYHLRKKLVDSTDKADLRLIYLALAHMIKFRGHFLIEGDLNPDNSDVDKLFIQLVQTYNQLFEENPINASGVDAKAILSARLSKSRRLENLIAQLPGEKKNGLFGNLIALSLGLTPNFKSNFDLAEDAKLQLSKDTYDDDLDNLLAQIGDQYADLFLAAKNLSDAILLSDILRVNTEITKAPLSASMIKRYDEHHQDLTLLKALVRQQLPEKYKEIFFDQSKNGYAGYIDGGASQEEFYKFIKPILEKMDGTEELLVKLNREDLLRKQRTFDNGSIPHQIHLGELHAILRRQEDFYPFLKDNREKIEKILTFRIPYYVGPLARGNSRFAWMTRKSEETITPWNFEEVVDKGASAQSFIERMTNFDKNLPNEKVLPKHSLLYEYFTVYNELTKVKYVTEGMRKPAFLSGEQKKAIVDLLFKTNRKVTVKQLKEDYFKKIECFDSVEISGVEDRFNASLGTYHDLLKIIKDKDFLDNEENEDILEDIVLTLTLFEDREMIEERLKTYAHLFDDKVMKQLKRRRYTGWGRLSRKLINGIRDKQSGKTILDFLKSDGFANRNFMQLIHDDSLTFKEDIQKAQVSGQGDSLHEHIANLAGSPAIKKGILQTVKVVDELVKVMGRHKPENIVIEMARENQTTQKGQKNSRERMKRIEEGIKELGSQILKEHPVENTQLQNEKLYLYYLQNGRDMYVDQELDINRLSDYDVDHIVPQSFLKDDSIDNKVLTRSDKARGKSDNVPSEEVVKKMKNYWRQLLNAKLITQRKFDNLTKAERGGLSELDKAGFIKRQLVETRQITKHVAQILDSRMNTKYDENDKLIREVKVITLKSKLVSDFRKDFQFYKVREINNYHHAHDAYLNAVVGTALIKKYPKLESEFVYGDYKVYDVRKMIAKSEQEIGKATAKYFFYSNIMNFFKTEITLANGEIRKRPLIETNGETGEIVWDKGRDFATVRKVLSMPQVNIVKKTEVQTGGFSKESILPKRNSDKLIARKKDWDPKKYGGFDSPTVAYSVLVVAKVEKGKSKKLKSVKELLGITIMERSSFEKNPIDFLEAKGYKEVKKDLIIKLPKYSLFELENGRKRMLASAGELQKGNELALPSKYVNFLYLASHYEKLKGSPEDNEQKQLFVEQHKHYLDEIIEQISEFSKRVILADANLDKVLSAYNKHRDKPIREQAENIIHLFTLTNLGAPAAFKYFDTTIDRKRYTSTKEVLDATLIHQSITGLYETRIDLSQLGGDGGGGGGSGGGGSGGGGSGGGGSGGGGSGGMDPLQLLQPLEAEIKGTKLKAHWNSGATITCVPQAFLEEEVPIKNIWIKTIHGEKEQPVYYLTFKIQGRKVEAEVISSPYDYILVSPSDIPWLMKKPLQLTTLVPLQEYEERLLKQTMLTGSYKEKLQSLFLKYDALWQHWENQVGHRRIKPHHIATGTVNPRPQKQYPINPKAKASIQTVINDLLKQGVLIQQNSIMNTPVYPVPKPDGKWRMVLDYREVNKTIPLIAAQNQHSAGILSSIFRGKYKTTLDLSNGFWAHSITPESYWLTAFTWLGQQYCWTRLPQGFLNSPALFNADVVDLLKEVPNVQVYVDDIYISHDDPREHLEQLEKVFSLLLNAGYVVSLKKSEIAQHEVEFLGFNITKEGRGLTETFKQKLLNITPPRDLKQLQSILGKLNFARNFIPNFSELVKPLYNIIATAPGKYITWTTDNSQQLQNIISMLNSAENLEERNPEVRLIMKVNTSPSAGYIRFYNEFAKRPIMYLNYVYTKAEVKFTNTEKLLTTIHKGLIKALDLGMGQEILVYSPIVSMTKIQKTPLPERKALPIRWITWMSYLEDPRIQFHYDKTLPELQQVPTVTDDIIAKIKHPSEFSMVFYTDGSAIKHPNVNKSHNAGMGIAQVQFKPEFTVINTWSIPLGDHTAQLAEVAAVEFACKKALKIDGPVLIVTDSFYVAESVNKELPYWQSNGFFNNKKKPLKHVSKWKSIADCIQLKPDIIIIHEKGHQPTASTFHTEGNNLADKLATQGSYVVNAGKRTADGSEFEKRTADGSEFESPKKKAKVE

SEQ ID NO: 6198 - protein, 2108 aa, synthetic construct
MPAAKRVKLDGGDKKYSIGLDIGTNSVGWAVITDEYKVPSKKFKVLGNTDRHSIKKNLIGALLFDSGETAEATRLKRTARRRYTRRKNRICYLQEIFSNEMAKVDDSFFHRLEESFLVEEDKKHERHPIFGNIVDEVAYHEKYPTIYHLRKKLVDSTDKADLRLIYLALAHMIKFRGHFLIEGDLNPDNSDVDKLFIQLVQTYNQLFEENPINASGVDAKAILSARLSKSRRLENLIAQLPGEKKNGLFGNLIALSLGLTPNFKSNFDLAEDAKLQLSKDTYDDDLDNLLAQIGDQYADLFLAAKNLSDAILLSDILRVNTEITKAPLSASMIKRYDEHHQDLTLLKALVRQQLPEKYKEIFFDQSKNGYAGYIDGGASQEEFYKFIKPILEKMDGTEELLVKLNREDLLRKQRTFDNGSIPHQIHLGELHAILRRQEDFYPFLKDNREKIEKILTFRIPYYVGPLARGNSRFAWMTRKSEETITPWNFEEVVDKGASAQSFIERMTNFDKNLPNEKVLPKHSLLYEYFTVYNELTKVKYVTEGMRKPAFLSGEQKKAIVDLLFKTNRKVTVKQLKEDYFKKIECFDSVEISGVEDRFNASLGTYHDLLKIIKDKDFLDNEENEDILEDIVLTLTLFEDREMIEERLKTYAHLFDDKVMKQLKRRRYTGWGRLSRKLINGIRDKQSGKTILDFLKSDGFANRNFMQLIHDDSLTFKEDIQKAQVSGQGDSLHEHIANLAGSPAIKKGILQTVKVVDELVKVMGRHKPENIVIEMARENQTTQKGQKNSRERMKRIEEGIKELGSQILKEHPVENTQLQNEKLYLYYLQNGRDMYVDQELDINRLSDYDVDHIVPQSFLKDDSIDNKVLTRSDKARGKSDNVPSEEVVKKMKNYWRQLLNAKLITQRKFDNLTKAERGGLSELDKAGFIKRQLVETRQITKHVAQILDSRMNTKYDENDKLIREVKVITLKSKLVSDFRKDFQFYKVREINNYHHAHDAYLNAVVGTALIKKYPKLESEFVYGDYKVYDVRKMIAKSEQEIGKATAKYFFYSNIMNFFKTEITLANGEIRKRPLIETNGETGEIVWDKGRDFATVRKVLSMPQVNIVKKTEVQTGGFSKESILPKRNSDKLIARKKDWDPKKYGGFDSPTVAYSVLVVAKVEKGKSKKLKSVKELLGITIMERSSFEKNPIDFLEAKGYKEVKKDLIIKLPKYSLFELENGRKRMLASAGELQKGNELALPSKYVNFLYLASHYEKLKGSPEDNEQKQLFVEQHKHYLDEIIEQISEFSKRVILADANLDKVLSAYNKHRDKPIREQAENIIHLFTLTNLGAPAAFKYFDTTIDRKRYTSTKEVLDATLIHQSITGLYETRIDLSQLGGDGGGGGGSGGGGSGGGGSGGGGSGGGGSGGVLNLEEEYRLHEKPVPSSIDPSWLQLFPTVWAERAGMGLANQVPPVVVELRSGASPVAVRQYPMSKEAREGIRPHIQRFLDLGVLVPCQSPWNTPLLPVKKPGTNDYRPVQDLREINKRVQDIHPTVPNPYNLLSSLPPSHTWYSVLDLKDAFFCLKLHPNSQPLFAFEWRDPEKGNTGQLTWTRLPQGFKNSPTLFNEALHRDLAPFRALNPQVVLLQYVDDLLVAAPTYRDCKEGTQKLLQELSKLGYRVSAKKAQLCQKEVTYLGYLLKEGKRWLTPARKATVMKIPPPTTPRQVREFLGTAGFCRLWIPGFASLAAPLYPLTKPSIPFIWTEEHQKAFDRIKEALLSAPALALPDLTKPFTLYVDERAGVARGVLTQTLGPWRRPVAYLSKKLDPVASGWPTCLKAVAAVALLLKDADKLTLGQNVTVIASHSLESIVRQPPDRWMTNARMTHYQSLLLNERVSFAPPAVLNPATLLPVESEATPVHRCSEILAEETGTRRDLKDQPLPGVPAWYTDGSSFIAEGKRRAGAAIVDGKRTVWASSLPEGTSAQKAELVALTQALRLAEGKDINIYTDSRYAFATAHIHGAIYKQRGWLTSAGKDIKNKEEILALLEAIHLPKRVAIIHCPGHQKGNDPVATGNRRADEAAKQAALSTRVLAETTKPAGKRTADGSEFEKRTADGSEFESPKKKAKVE

SEQ ID NO: 6199 - protein, 2110 aa, synthetic construct
MPAAKRVKLDGGDKKYSIGLDIGTNSVGWAVITDEYKVPSKKFKVLGNTDRHSIKKNLIGALLFDSGETAEATRLKRTARRRYTRRKNRICYLQEIFSNEMAKVDDSFFHRLEESFLVEEDKKHERHPIFGNIVDEVAYHEKYPTIYHLRKKLVDSTDKADLRLIYLALAHMIKFRGHFLIEGDLNPDNSDVDKLFIQLVQTYNQLFEENPINASGVDAKAILSARLSKSRRLENLIAQLPGEKKNGLFGNLIALSLGLTPNFKSNFDLAEDAKLQLSKDTYDDDLDNLLAQIGDQYADLFLAAKNLSDAILLSDILRVNTEITKAPLSASMIKRYDEHHQDLTLLKALVRQQLPEKYKEIFFDQSKNGYAGYIDGGASQEEFYKFIKPILEKMDGTEELLVKLNREDLLRKQRTFDNGSIPHQIHLGELHAILRRQEDFYPFLKDNREKIEKILTFRIPYYVGPLARGNSRFAWMTRKSEETITPWNFEEVVDKGASAQSFIERMTNFDKNLPNEKVLPKHSLLYEYFTVYNELTKVKYVTEGMRKPAFLSGEQKKAIVDLLFKTNRKVTVKQLKEDYFKKIECFDSVEISGVEDRFNASLGTYHDLLKIIKDKDFLDNEENEDILEDIVLTLTLFEDREMIEERLKTYAHLFDDKVMKQLKRRRYTGWGRLSRKLINGIRDKQSGKTILDFLKSDGFANRNFMQLIHDDSLTFKEDIQKAQVSGQGDSLHEHIANLAGSPAIKKGILQTVKVVDELVKVMGRHKPENIVIEMARENQTTQKGQKNSRERMKRIEEGIKELGSQILKEHPVENTQLQNEKLYLYYLQNGRDMYVDQELDINRLSDYDVDHIVPQSFLKDDSIDNKVLTRSDKARGKSDNVPSEEVVKKMKNYWRQLLNAKLITQRKFDNLTKAERGGLSELDKAGFIKRQLVETRQITKHVAQILDSRMNTKYDENDKLIREVKVITLKSKLVSDFRKDFQFYKVREINNYHHAHDAYLNAVVGTALIKKYPKLESEFVYGDYKVYDVRKMIAKSEQEIGKATAKYFFYSNIMNFFKTEITLANGEIRKRPLIETNGETGEIVWDKGRDFATVRKVLSMPQVNIVKKTEVQTGGFSKESILPKRNSDKLIARKKDWDPKKYGGFDSPTVAYSVLVVAKVEKGKSKKLKSVKELLGITIMERSSFEKNPIDFLEAKGYKEVKKDLIIKLPKYSLFELENGRKRMLASAGELQKGNELALPSKYVNFLYLASHYEKLKGSPEDNEQKQLFVEQHKHYLDEIIEQISEFSKRVILADANLDKVLSAYNKHRDKPIREQAENIIHLFTLTNLGAPAAFKYFDTTIDRKRYTSTKEVLDATLIHQSITGLYETRIDLSQLGGDGGGGGGSGGGGSGGGGSGGGGSGGGGSGGTLNIEDEYRLHETSKEPDVPLGSTWLSDFPQAWAETGGMGLAVRQAPLIIPLKATSTPVSIKQYPMSQEARLGIKPHIQRLLDQGILVPCQSPWNTPLLPVKKPGTNDYRPVQDLREVNKRVEDIHPTVPNPYNLLSGLPPSHQWYTVLDLKDAFFCLRLHPTSQPLFAFEWRDPEMGISGQLTWTRLPQGFKNSPTLFNEALHRDLADFRIQHPDLILLQYVDDLLLAATSEQDCQRGTRALLQTLGNLGYRASAKKAQICQKQVKYLGYLLKEGQRWLTEARKETVMGQPTPKTPRQLREFLGTAGFCRLWIPGFAEMAAPLYPLTKPGTLFNWGPDQQKAYQEIKQALLTAPALGLPDLTKPFELFVDEKQGYAKGVLTQKLGPWRRPVAYLSKKLDPVAAGWPPCLRMVAAIAVLTKDAGKLTMGQPLVILAPHAVEALVKQPPDRWLSNARMTHYQAMLLDTDRVQFGPVVALNPATLLPLPEKEAPHDCLEILAETHGTRPDLTDQPIPDADYTWYTDGSSFLQEGQRRAGAAVTTETEVIWARALPAGTSAQRAELIALTQALKMAEGKKLNVYTDSRYAFATAHVHGEIYRRRGWLTSEGREIKNKNEILALLKALFLPKRLSIIHCPGHQKGNSAEARGNRMADQAAREAAMKAVLETSTLLAGKRTADGSEFEKRTADGSEFESPKKKAKVE

SEQ ID NO: 6200 - protein, 2117 aa, synthetic construct
MPAAKRVKLDGGDKKYSIGLDIGTNSVGWAVITDEYKVPSKKFKVLGNTDRHSIKKNLIGALLFDSGETAEATRLKRTARRRYTRRKNRICYLQEIFSNEMAKVDDSFFHRLEESFLVEEDKKHERHPIFGNIVDEVAYHEKYPTIYHLRKKLVDSTDKADLRLIYLALAHMIKFRGHFLIEGDLNPDNSDVDKLFIQLVQTYNQLFEENPINASGVDAKAILSARLSKSRRLENLIAQLPGEKKNGLFGNLIALSLGLTPNFKSNFDLAEDAKLQLSKDTYDDDLDNLLAQIGDQYADLFLAAKNLSDAILLSDILRVNTEITKAPLSASMIKRYDEHHQDLTLLKALVRQQLPEKYKEIFFDQSKNGYAGYIDGGASQEEFYKFIKPILEKMDGTEELLVKLNREDLLRKQRTFDNGSIPHQIHLGELHAILRRQEDFYPFLKDNREKIEKILTFRIPYYVGPLARGNSRFAWMTRKSEETITPWNFEEVVDKGASAQSFIERMTNFDKNLPNEKVLPKHSLLYEYFTVYNELTKVKYVTEGMRKPAFLSGEQKKAIVDLLFKTNRKVTVKQLKEDYFKKIECFDSVEISGVEDRFNASLGTYHDLLKIIKDKDFLDNEENEDILEDIVLTLTLFEDREMIEERLKTYAHLFDDKVMKQLKRRRYTGWGRLSRKLINGIRDKQSGKTILDFLKSDGFANRNFMQLIHDDSLTFKEDIQKAQVSGQGDSLHEHIANLAGSPAIKKGILQTVKVVDELVKVMGRHKPENIVIEMARENQTTQKGQKNSRERMKRIEEGIKELGSQILKEHPVENTQLQNEKLYLYYLQNGRDMYVDQELDINRLSDYDVDHIVPQSFLKDDSIDNKVLTRSDKARGKSDNVPSEEVVKKMKNYWRQLLNAKLITQRKFDNLTKAERGGLSELDKAGFIKRQLVETRQITKHVAQILDSRMNTKYDENDKLIREVKVITLKSKLVSDFRKDFQFYKVREINNYHHAHDAYLNAVVGTALIKKYPKLESEFVYGDYKVYDVRKMIAKSEQEIGKATAKYFFYSNIMNFFKTEITLANGEIRKRPLIETNGETGEIVWDKGRDFATVRKVLSMPQVNIVKKTEVQTGGFSKESILPKRNSDKLIARKKDWDPKKYGGFDSPTVAYSVLVVAKVEKGKSKKLKSVKELLGITIMERSSFEKNPIDFLEAKGYKEVKKDLIIKLPKYSLFELENGRKRMLASAGELQKGNELALPSKYVNFLYLASHYEKLKGSPEDNEQKQLFVEQHKHYLDEIIEQISEFSKRVILADANLDKVLSAYNKHRDKPIREQAENIIHLFTLTNLGAPAAFKYFDTTIDRKRYTSTKEVLDATLIHQSITGLYETRIDLSQLGGDGGGGGGSGGGGSGGGGSGGGGSGGGGSGGGGSGGTAPLEEEYRLFLEAPIQNVTLLEQWKREIPKVWAEINPPGLASTQAPIHVQLLSTALPVRVRQYPITLEAKRSLRETIRKFRAAGILRPVHSPWNTPLLPVRKSGTSEYRMVQDLREVNKRVETIHPTVPNPYTLLSLLPPDRIWYSVLDLKDAFFCIPLAPESQLIFAFEWADAEEGESGQLTWTRLPQGFKNSPTLFDEALNRDLQGFRLDHPSVSLLQYVDDLLIAADTQAACLSATRDLLMTLAELGYRVSGKKAQLCQEEVTYLGFKIHKGSRSLSNSRTQAILQIPVPKTKRQVREFLGTIGYCRLWIPGFAELAQPLYAATRGGNDPLVWGEKEEEAFQSLKLALTQPPALALPSLDKPFQLFVEETSGAAKGVLTQALGPWKRPVAYLSKRLDPVAAGWPRCLRAIAAAALLTREASKLTFGQDIEITSSHNLESLLRSPPDKWLTNARITQYQVLLLDPPRVRFKQTAALNPATLLPETDDTLPIHHCLDTLDSLTSTRPDLTDQPLAQAEATLFTDGSSYIRDGKRYAGAAVVTLDSVIWAEPLPIGTSAQKAELIALTKALEWSKDKSVNIYTDSRYAFATLHVHGMIYRERGLLTAGGKAIKNAPEILALLTAVWLPKRVAVMHCKGHQKDDAPTSTGNRRADEVAREVAIRPLSTQATISAGKRTADGSEFEKRTADGSEFESPKKKAKVE

SEQ ID NO: 6201 - protein, 2117 aa, synthetic construct
MPAAKRVKLDGGDKKYSIGLDIGTNSVGWAVITDEYKVPSKKFKVLGNTDRHSIKKNLIGALLFDSGETAEATRLKRTARRRYTRRKNRICYLQEIFSNEMAKVDDSFFHRLEESFLVEEDKKHERHPIFGNIVDEVAYHEKYPTIYHLRKKLVDSTDKADLRLIYLALAHMIKFRGHFLIEGDLNPDNSDVDKLFIQLVQTYNQLFEENPINASGVDAKAILSARLSKSRRLENLIAQLPGEKKNGLFGNLIALSLGLTPNFKSNFDLAEDAKLQLSKDTYDDDLDNLLAQIGDQYADLFLAAKNLSDAILLSDILRVNTEITKAPLSASMIKRYDEHHQDLTLLKALVRQQLPEKYKEIFFDQSKNGYAGYIDGGASQEEFYKFIKPILEKMDGTEELLVKLNREDLLRKQRTFDNGSIPHQIHLGELHAILRRQEDFYPFLKDNREKIEKILTFRIPYYVGPLARGNSRFAWMTRKSEETITPWNFEEVVDKGASAQSFIERMTNFDKNLPNEKVLPKHSLLYEYFTVYNELTKVKYVTEGMRKPAFLSGEQKKAIVDLLFKTNRKVTVKQLKEDYFKKIECFDSVEISGVEDRFNASLGTYHDLLKIIKDKDFLDNEENEDILEDIVLTLTLFEDREMIEERLKTYAHLFDDKVMKQLKRRRYTGWGRLSRKLINGIRDKQSGKTILDFLKSDGFANRNFMQLIHDDSLTFKEDIQKAQVSGQGDSLHEHIANLAGSPAIKKGILQTVKVVDELVKVMGRHKPENIVIEMARENQTTQKGQKNSRERMKRIEEGIKELGSQILKEHPVENTQLQNEKLYLYYLQNGRDMYVDQELDINRLSDYDVDHIVPQSFLKDDSIDNKVLTRSDKARGKSDNVPSEEVVKKMKNYWRQLLNAKLITQRKFDNLTKAERGGLSELDKAGFIKRQLVETRQITKHVAQILDSRMNTKYDENDKLIREVKVITLKSKLVSDFRKDFQFYKVREINNYHHAHDAYLNAVVGTALIKKYPKLESEFVYGDYKVYDVRKMIAKSEQEIGKATAKYFFYSNIMNFFKTEITLANGEIRKRPLIETNGETGEIVWDKGRDFATVRKVLSMPQVNIVKKTEVQTGGFSKESILPKRNSDKLIARKKDWDPKKYGGFDSPTVAYSVLVVAKVEKGKSKKLKSVKELLGITIMERSSFEKNPIDFLEAKGYKEVKKDLIIKLPKYSLFELENGRKRMLASAGELQKGNELALPSKYVNFLYLASHYEKLKGSPEDNEQKQLFVEQHKHYLDEIIEQISEFSKRVILADANLDKVLSAYNKHRDKPIREQAENIIHLFTLTNLGAPAAFKYFDTTIDRKRYTSTKEVLDATLIHQSITGLYETRIDLSQLGGDGGGGGGSGGGGSGGGGSGGGGSGGGGSGGGGSGGTAPLEEEYRLFLEAPIQNVTLLEQWKREIPKVWAEINPPGLASTQAPIHVQLLSTALPVRVRQYPITLEAKRSLRETIRKFRAAGILRPVHSPWNTPLLPVRKSGTSEYRMVQDLREVNKRVETIHPTVPNPYTLLSLLPPDRIWYSVLDLKDAFFCIPLAPESQLIFAFEWADAEEGESGQLTWTRLPQGFKNSPTLFNEALNRDLQGFRLDHPSVSLLQYVDDLLIAADTQAACLSATRDLLMTLAELGYRVSGKKAQLCQEEVTYLGFKIHKGSRSLSNSRTQAILQIPVPKTKRQVREFLGTIGYCRLWIPGFAELAQPLYAATRPGNDPLVWGEKEEEAFQSLKLALTQPPALALPSLDKPFQLFVEETSGAAKGVLTQALGPWKRPVAYLSKRLDPVAAGWPRCLRAIAAAALLTREASKLTFGQDIEITSSHNLESLLRSPPDKWLTNARITQYQVLLLDPPRVRFKQTAALNPATLLPETDDTLPIHHCLDTLDSLTSTRPDLTDQPLAQAEATLFTDGSSYIRDGKRYAGAAVVTLDSVIWAEPLPIGTSAQKAELIALTKALEWSKDKSVNIYTDSRYAFATLHVHGMIYRERGWLTAGGKAIKNAPEILALLTAVWLPKRVAVMHCKGHQKDDAPTSTGNRRADEVAREVAIRPLSTQATISAGKRTADGSEFEKRTADGSEFESPKKKAKVE

SEQ ID NO: 6202 - protein, 2121 aa, synthetic construct
MPAAKRVKLDGGDKKYSIGLDIGTNSVGWAVITDEYKVPSKKFKVLGNTDRHSIKKNLIGALLFDSGETAEATRLKRTARRRYTRRKNRICYLQEIFSNEMAKVDDSFFHRLEESFLVEEDKKHERHPIFGNIVDEVAYHEKYPTIYHLRKKLVDSTDKADLRLIYLALAHMIKFRGHFLIEGDLNPDNSDVDKLFIQLVQTYNQLFEENPINASGVDAKAILSARLSKSRRLENLIAQLPGEKKNGLFGNLIALSLGLTPNFKSNFDLAEDAKLQLSKDTYDDDLDNLLAQIGDQYADLFLAAKNLSDAILLSDILRVNTEITKAPLSASMIKRYDEHHQDLTLLKALVRQQLPEKYKEIFFDQSKNGYAGYIDGGASQEEFYKFIKPILEKMDGTEELLVKLNREDLLRKQRTFDNGSIPHQIHLGELHAILRRQEDFYPFLKDNREKIEKILTFRIPYYVGPLARGNSRFAWMTRKSEETITPWNFEEVVDKGASAQSFIERMTNFDKNLPNEKVLPKHSLLYEYFTVYNELTKVKYVTEGMRKPAFLSGEQKKAIVDLLFKTNRKVTVKQLKEDYFKKIECFDSVEISGVEDRFNASLGTYHDLLKIIKDKDFLDNEENEDILEDIVLTLTLFEDREMIEERLKTYAHLFDDKVMKQLKRRRYTGWGRLSRKLINGIRDKQSGKTILDFLKSDGFANRNFMQLIHDDSLTFKEDIQKAQVSGQGDSLHEHIANLAGSPAIKKGILQTVKVVDELVKVMGRHKPENIVIEMARENQTTQKGQKNSRERMKRIEEGIKELGSQILKEHPVENTQLQNEKLYLYYLQNGRDMYVDQELDINRLSDYDVDHIVPQSFLKDDSIDNKVLTRSDKARGKSDNVPSEEVVKKMKNYWRQLLNAKLITQRKFDNLTKAERGGLSELDKAGFIKRQLVETRQITKHVAQILDSRMNTKYDENDKLIREVKVITLKSKLVSDFRKDFQFYKVREINNYHHAHDAYLNAVVGTALIKKYPKLESEFVYGDYKVYDVRKMIAKSEQEIGKATAKYFFYSNIMNFFKTEITLANGEIRKRPLIETNGETGEIVWDKGRDFATVRKVLSMPQVNIVKKTEVQTGGFSKESILPKRNSDKLIARKKDWDPKKYGGFDSPTVAYSVLVVAKVEKGKSKKLKSVKELLGITIMERSSFEKNPIDFLEAKGYKEVKKDLIIKLPKYSLFELENGRKRMLASAGELQKGNELALPSKYVNFLYLASHYEKLKGSPEDNEQKQLFVEQHKHYLDEIIEQISEFSKRVILADANLDKVLSAYNKHRDKPIREQAENIIHLFTLTNLGAPAAFKYFDTTIDRKRYTSTKEVLDATLIHQSITGLYETRIDLSQLGGDGGGGGGSGGGGSGGGGSGGGGSGGGGSGGGGSGGTVSLQDEHRLFDIPVTTSLPDVWLQDFPQAWAETGGLGRAKCQAPIIIDLKPTAVPVSIKQYPMSLEAHMGIRQHIIKFLELGVLRPCRSPWNTPLLPVKKPGTQDYRPVQDLREINKRTVDIHPTVPNPYNLLSTLKPDYSWYTVLDLKDAFFCLPLAPQSQELFAFEWKDPERGISGQLTWTRLPQGFKNSPTLFDEALHRDLTDFRTQHPEVTLLQYVDDLLLAAPTKKACTQGTRHLLQELGEKGYRASAKKAQICQTKVTYLGYILSEGKRWLTPGRIETVARIPPPRNPREVREFLGTAGFCRLWIPGFAELAAPLYALTKESTPFTWQTEHQLAFEALKKALLSAPALGLPDTSKPFTLFLDERQGIAKGVLTQKLGPWKRPVAYLSKKLDPVAAGWPPCLRIMAATAMLVKDSAKLTLGQPLTVITPHTLEAIVRQPPDRWITNARLTHYQALLLDTDRVQFGPPVTLNPATLLPVPENQPSPHDCRQVLAETHGTREDLKDQELPDADHTWYTDGSSYLDSGTRRAGAAVVDGHNTIWAQSLPPGTSAQKAELIALTKALELSKGKKANIYTDSRYAFATAHTHGSIYERRGLLTSEGKEIKNKAEIIALLKALFLPQEVAIIHCPGHQKGQDPVAVGNRQADRVARQAAMAEVLTLATEPDNTSHITAGKRTADGSEFEKRTADGSEFESPKKKAKVE

SEQ ID NO: 6203 - protein, 2121 aa, synthetic construct
MPAAKRVKLDGGDKKYSIGLDIGTNSVGWAVITDEYKVPSKKFKVLGNTDRHSIKKNLIGALLFDSGETAEATRLKRTARRRYTRRKNRICYLQEIFSNEMAKVDDSFFHRLEESFLVEEDKKHERHPIFGNIVDEVAYHEKYPTIYHLRKKLVDSTDKADLRLIYLALAHMIKFRGHFLIEGDLNPDNSDVDKLFIQLVQTYNQLFEENPINASGVDAKAILSARLSKSRRLENLIAQLPGEKKNGLFGNLIALSLGLTPNFKSNFDLAEDAKLQLSKDTYDDDLDNLLAQIGDQYADLFLAAKNLSDAILLSDILRVNTEITKAPLSASMIKRYDEHHQDLTLLKALVRQQLPEKYKEIFFDQSKNGYAGYIDGGASQEEFYKFIKPILEKMDGTEELLVKLNREDLLRKQRTFDNGSIPHQIHLGELHAILRRQEDFYPFLKDNREKIEKILTFRIPYYVGPLARGNSRFAWMTRKSEETITPWNFEEVVDKGASAQSFIERMTNFDKNLPNEKVLPKHSLLYEYFTVYNELTKVKYVTEGMRKPAFLSGEQKKAIVDLLFKTNRKVTVKQLKEDYFKKIECFDSVEISGVEDRFNASLGTYHDLLKIIKDKDFLDNEENEDILEDIVLTLTLFEDREMIEERLKTYAHLFDDKVMKQLKRRRYTGWGRLSRKLINGIRDKQSGKTILDFLKSDGFANRNFMQLIHDDSLTFKEDIQKAQVSGQGDSLHEHIANLAGSPAIKKGILQTVKVVDELVKVMGRHKPENIVIEMARENQTTQKGQKNSRERMKRIEEGIKELGSQILKEHPVENTQLQNEKLYLYYLQNGRDMYVDQELDINRLSDYDVDHIVPQSFLKDDSIDNKVLTRSDKARGKSDNVPSEEVVKKMKNYWRQLLNAKLITQRKFDNLTKAERGGLSELDKAGFIKRQLVETRQITKHVAQILDSRMNTKYDENDKLIREVKVITLKSKLVSDFRKDFQFYKVREINNYHHAHDAYLNAVVGTALIKKYPKLESEFVYGDYKVYDVRKMIAKSEQEIGKATAKYFFYSNIMNFFKTEITLANGEIRKRPLIETNGETGEIVWDKGRDFATVRKVLSMPQVNIVKKTEVQTGGFSKESILPKRNSDKLIARKKDWDPKKYGGFDSPTVAYSVLVVAKVEKGKSKKLKSVKELLGITIMERSSFEKNPIDFLEAKGYKEVKKDLIIKLPKYSLFELENGRKRMLASAGELQKGNELALPSKYVNFLYLASHYEKLKGSPEDNEQKQLFVEQHKHYLDEIIEQISEFSKRVILADANLDKVLSAYNKHRDKPIREQAENIIHLFTLTNLGAPAAFKYFDTTIDRKRYTSTKEVLDATLIHQSITGLYETRIDLSQLGGDGGGGGGSGGGGSGGGGSGGGGSGGGGSGGGGSGGTVSLQDEHRLFDIPVTTSLPDVWLQDFPQAWAETGGLGRAKCQAPIIIDLKPTAVPVSIKQYPMSLEAHMGIRQHIIKFLELGVLRPCRSPWNTPLLPVKKPGTQDYRPVQDLREINKRTVDIHPTVPNPYNLLSTLKPDYSWYTVLDLKDAFFCLPLAPQSQELFAFEWKDPERGISGQLTWTRLPQGFKNSPTLFNEALHRDLTDFRTQHPEVTLLQYVDDLLLAAPTKKACTQGTRHLLQELGEKGYRASAKKAQICQTKVTYLGYILSEGKRWLTPGRIETVARIPPPRNPREVREFLGTAGFCRLWIPGFAELAAPLYALTKPSTPFTWQTEHQLAFEALKKALLSAPALGLPDTSKPFTLFLDERQGIAKGVLTQKLGPWKRPVAYLSKKLDPVAAGWPPCLRIMAATAMLVKDSAKLTLGQPLTVITPHTLEAIVRQPPDRWITNARLTHYQALLLDTDRVQFGPPVTLNPATLLPVPENQPSPHDCRQVLAETHGTREDLKDQELPDADHTWYTDGSSYLDSGTRRAGAAVVDGHNTIWAQSLPPGTSAQKAELIALTKALELSKGKKANIYTDSRYAFATAHTHGSIYERRGWLTSEGKEIKNKAEIIALLKALFLPQEVAIIHCPGHQKGQDPVAVGNRQADRVARQAAMAEVLTLATEPDNTSHITAGKRTADGSEFEKRTADGSEFESPKKKAKVE

SEQ ID NO: 6204 - protein, 2106 aa, synthetic construct
MPAAKRVKLDGGDKKYSIGLDIGTNSVGWAVITDEYKVPSKKFKVLGNTDRHSIKKNLIGALLFDSGETAEATRLKRTARRRYTRRKNRICYLQEIFSNEMAKVDDSFFHRLEESFLVEEDKKHERHPIFGNIVDEVAYHEKYPTIYHLRKKLVDSTDKADLRLIYLALAHMIKFRGHFLIEGDLNPDNSDVDKLFIQLVQTYNQLFEENPINASGVDAKAILSARLSKSRRLENLIAQLPGEKKNGLFGNLIALSLGLTPNFKSNFDLAEDAKLQLSKDTYDDDLDNLLAQIGDQYADLFLAAKNLSDAILLSDILRVNTEITKAPLSASMIKRYDEHHQDLTLLKALVRQQLPEKYKEIFFDQSKNGYAGYIDGGASQEEFYKFIKPILEKMDGTEELLVKLNREDLLRKQRTFDNGSIPHQIHLGELHAILRRQEDFYPFLKDNREKIEKILTFRIPYYVGPLARGNSRFAWMTRKSEETITPWNFEEVVDKGASAQSFIERMTNFDKNLPNEKVLPKHSLLYEYFTVYNELTKVKYVTEGMRKPAFLSGEQKKAIVDLLFKTNRKVTVKQLKEDYFKKIECFDSVEISGVEDRFNASLGTYHDLLKIIKDKDFLDNEENEDILEDIVLTLTLFEDREMIEERLKTYAHLFDDKVMKQLKRRRYTGWGRLSRKLINGIRDKQSGKTILDFLKSDGFANRNFMQLIHDDSLTFKEDIQKAQVSGQGDSLHEHIANLAGSPAIKKGILQTVKVVDELVKVMGRHKPENIVIEMARENQTTQKGQKNSRERMKRIEEGIKELGSQILKEHPVENTQLQNEKLYLYYLQNGRDMYVDQELDINRLSDYDVDHIVPQSFLKDDSIDNKVLTRSDKARGKSDNVPSEEVVKKMKNYWRQLLNAKLITQRKFDNLTKAERGGLSELDKAGFIKRQLVETRQITKHVAQILDSRMNTKYDENDKLIREVKVITLKSKLVSDFRKDFQFYKVREINNYHHAHDAYLNAVVGTALIKKYPKLESEFVYGDYKVYDVRKMIAKSEQEIGKATAKYFFYSNIMNFFKTEITLANGEIRKRPLIETNGETGEIVWDKGRDFATVRKVLSMPQVNIVKKTEVQTGGFSKESILPKRNSDKLIARKKDWDPKKYGGFDSPTVAYSVLVVAKVEKGKSKKLKSVKELLGITIMERSSFEKNPIDFLEAKGYKEVKKDLIIKLPKYSLFELENGRKRMLASAGELQKGNELALPSKYVNFLYLASHYEKLKGSPEDNEQKQLFVEQHKHYLDEIIEQISEFSKRVILADANLDKVLSAYNKHRDKPIREQAENIIHLFTLTNLGAPAAFKYFDTTIDRKRYTSTKEVLDATLIHQSITGLYETRIDLSQLGGDGGGGGGSGGGGSGGGGSGGGGSGGGGSGGGGSGGVPWILKKPLELTIKLDLEEQQGTLLNNSILSKKGKEELKQLFEKYSALWQSWENQVGHRRIRPHKIATGTVKPTPQKQYHINPKAKPDIQIVINDLLKQGVLIQKESTMNTPVYPVPKPNGRWRMVLDYRAVNKVTPLIAVQNQHSYGILGSLFKGRYKTTIDLSNGFWAHPIVPEDYWITAFTWQGKQYCWTVLPQGFLNSPGLFNGDVVDLLQGIPNVEVYVDDVYISHDSEKEHLEYLDILFNRLKEAGYIISLKKSNIANSIVDFLGFQITNEGRGLTDTFKEKLENITAPTTLKQLQSILGLLNFARNFIPDFTELIAPLYALIPKSPKNYVPWQIEHSTTLETLITKLNGAEYLQGRKGDKTLIMKVNASYTTGYIRYYNEGEKKPISYVSIVFSKTELKFTELEKLLTTVHKGLLKALDLSMGQNIHVYSPIVSMQNIQKTPQTAKKALASRWLSWLSYLEDPRIRFFYDPQMPALKDLPAVDTGKDNKKHPSNFQHIFYTDGSAITSPTKEGHLNAGMGIVYFINKDGNLQKQQEWSISLGNHTAQFAEIAAFEFALKKCLPLGGNILVVTDSNYVAKAYNEELDVWASNGFVNNRKKPLKHISKWKSVADLKRLRPDVVVTHEPGHQKLDSSPHAYGNNLADQLATQASFKVHAGKRTADGSEFEKRTADGSEFESPKKKAKVE

SEQ ID NO: 6205 - protein, 2114 aa, synthetic construct
MPAAKRVKLDGGDKKYSIGLDIGTNSVGWAVITDEYKVPSKKFKVLGNTDRHSIKKNLIGALLFDSGETAEATRLKRTARRRYTRRKNRICYLQEIFSNEMAKVDDSFFHRLEESFLVEEDKKHERHPIFGNIVDEVAYHEKYPTIYHLRKKLVDSTDKADLRLIYLALAHMIKFRGHFLIEGDLNPDNSDVDKLFIQLVQTYNQLFEENPINASGVDAKAILSARLSKSRRLENLIAQLPGEKKNGLFGNLIALSLGLTPNFKSNFDLAEDAKLQLSKDTYDDDLDNLLAQIGDQYADLFLAAKNLSDAILLSDILRVNTEITKAPLSASMIKRYDEHHQDLTLLKALVRQQLPEKYKEIFFDQSKNGYAGYIDGGASQEEFYKFIKPILEKMDGTEELLVKLNREDLLRKQRTFDNGSIPHQIHLGELHAILRRQEDFYPFLKDNREKIEKILTFRIPYYVGPLARGNSRFAWMTRKSEETITPWNFEEVVDKGASAQSFIERMTNFDKNLPNEKVLPKHSLLYEYFTVYNELTKVKYVTEGMRKPAFLSGEQKKAIVDLLFKTNRKVTVKQLKEDYFKKIECFDSVEISGVEDRFNASLGTYHDLLKIIKDKDFLDNEENEDILEDIVLTLTLFEDREMIEERLKTYAHLFDDKVMKQLKRRRYTGWGRLSRKLINGIRDKQSGKTILDFLKSDGFANRNFMQLIHDDSLTFKEDIQKAQVSGQGDSLHEHIANLAGSPAIKKGILQTVKVVDELVKVMGRHKPENIVIEMARENQTTQKGQKNSRERMKRIEEGIKELGSQILKEHPVENTQLQNEKLYLYYLQNGRDMYVDQELDINRLSDYDVDHIVPQSFLKDDSIDNKVLTRSDKARGKSDNVPSEEVVKKMKNYWRQLLNAKLITQRKFDNLTKAERGGLSELDKAGFIKRQLVETRQITKHVAQILDSRMNTKYDENDKLIREVKVITLKSKLVSDFRKDFQFYKVREINNYHHAHDAYLNAVVGTALIKKYPKLESEFVYGDYKVYDVRKMIAKSEQEIGKATAKYFFYSNIMNFFKTEITLANGEIRKRPLIETNGETGEIVWDKGRDFATVRKVLSMPQVNIVKKTEVQTGGFSKESILPKRNSDKLIARKKDWDPKKYGGFDSPTVAYSVLVVAKVEKGKSKKLKSVKELLGITIMERSSFEKNPIDFLEAKGYKEVKKDLIIKLPKYSLFELENGRKRMLASAGELQKGNELALPSKYVNFLYLASHYEKLKGSPEDNEQKQLFVEQHKHYLDEIIEQISEFSKRVILADANLDKVLSAYNKHRDKPIREQAENIIHLFTLTNLGAPAAFKYFDTTIDRKRYTSTKEVLDATLIHQSITGLYETRIDLSQLGGDGGGGGGSGGGGSGGGGSGGGGSGGGGSGGGGSGGTLQLEEEYRLFEPESTQKQEMDIWLKNFPQAWAETGGMGTAHCQAPVLIQLKATATPISIRQYPMPHEAYQGIKPHIRRMLDQGILKPCQSPWNTPLLPVKKPGTEDYRPVQDLREVNKRVEDIHPTVPNPYNLLSTLPPSHPWYTVLDLKDAFFCLRLHSESQLLFAFEWRDPEIGLSGQLTWTRLPQGFKNSPTLFNEALHSDLADFRVRYPALVLLQYVDDLLLAAATRTECLEGTKALLETLGNKGYRASAKKAQICLQEVTYLGYSLKDGQRWLTKARKEAILSIPVPKNSRQVREFLGTAGYCRLWIPGFAELAAPLYPLTRPGTLFQWGTEQQLAFEDIKKALLSSPALGLPDITKPFELFIDENSGFAKGVLVQKLGPWKRPVAYLSKKLDTVASGWPPCLRMVAAIAILVKDAGKLTLGQPLTILTSHPVEALVRQPPNKWLSNARMTHYQAMLLDAERVHFGPTVSLNPATLLPLPSGGNHHDCLQILAETHGTRPDLTDQPLPDADLTWYTDGSSFIRNGEREAGAAVTTESEVIWAAPLPPGTSAQRAELIALTQALKMAEGKKLTVYTDSRYAFATTHVHGEIYRRRGWLTSEGKEIKNKNEILALLEALFLPKRLSIIHCPGHQKGDSPQAKGNRLADDTAKKAATETHSSLTVLPAGKRTADGSEFEKRTADGSEFESPKKKAKVE

SEQ ID NO: 6206 - protein, 2106 aa, synthetic construct
MPAAKRVKLDGGDKKYSIGLDIGTNSVGWAVITDEYKVPSKKFKVLGNTDRHSIKKNLIGALLFDSGETAEATRLKRTARRRYTRRKNRICYLQEIFSNEMAKVDDSFFHRLEESFLVEEDKKHERHPIFGNIVDEVAYHEKYPTIYHLRKKLVDSTDKADLRLIYLALAHMIKFRGHFLIEGDLNPDNSDVDKLFIQLVQTYNQLFEENPINASGVDAKAILSARLSKSRRLENLIAQLPGEKKNGLFGNLIALSLGLTPNFKSNFDLAEDAKLQLSKDTYDDDLDNLLAQIGDQYADLFLAAKNLSDAILLSDILRVNTEITKAPLSASMIKRYDEHHQDLTLLKALVRQQLPEKYKEIFFDQSKNGYAGYIDGGASQEEFYKFIKPILEKMDGTEELLVKLNREDLLRKQRTFDNGSIPHQIHLGELHAILRRQEDFYPFLKDNREKIEKILTFRIPYYVGPLARGNSRFAWMTRKSEETITPWNFEEVVDKGASAQSFIERMTNFDKNLPNEKVLPKHSLLYEYFTVYNELTKVKYVTEGMRKPAFLSGEQKKAIVDLLFKTNRKVTVKQLKEDYFKKIECFDSVEISGVEDRFNASLGTYHDLLKIIKDKDFLDNEENEDILEDIVLTLTLFEDREMIEERLKTYAHLFDDKVMKQLKRRRYTGWGRLSRKLINGIRDKQSGKTILDFLKSDGFANRNFMQLIHDDSLTFKEDIQKAQVSGQGDSLHEHIANLAGSPAIKKGILQTVKVVDELVKVMGRHKPENIVIEMARENQTTQKGQKNSRERMKRIEEGIKELGSQILKEHPVENTQLQNEKLYLYYLQNGRDMYVDQELDINRLSDYDVDHIVPQSFLKDDSIDNKVLTRSDKARGKSDNVPSEEVVKKMKNYWRQLLNAKLITQRKFDNLTKAERGGLSELDKAGFIKRQLVETRQITKHVAQILDSRMNTKYDENDKLIREVKVITLKSKLVSDFRKDFQFYKVREINNYHHAHDAYLNAVVGTALIKKYPKLESEFVYGDYKVYDVRKMIAKSEQEIGKATAKYFFYSNIMNFFKTEITLANGEIRKRPLIETNGETGEIVWDKGRDFATVRKVLSMPQVNIVKKTEVQTGGFSKESILPKRNSDKLIARKKDWDPKKYGGFDSPTVAYSVLVVAKVEKGKSKKLKSVKELLGITIMERSSFEKNPIDFLEAKGYKEVKKDLIIKLPKYSLFELENGRKRMLASAGELQKGNELALPSKYVNFLYLASHYEKLKGSPEDNEQKQLFVEQHKHYLDEIIEQISEFSKRVILADANLDKVLSAYNKHRDKPIREQAENIIHLFTLTNLGAPAAFKYFDTTIDRKRYTSTKEVLDATLIHQSITGLYETRIDLSQLGGDGGGGGGSGGGGSGGGGSGGGGSGGGGSGGGGSGGVPWLTQQPLQLTILVPLQEYQEKILSKTALPEDQKQQLKTLFVKYDNLWQHWENQVGHRKIRPHNIATGDYPPRPQKQYPINPKAKPSIQIVIDDLLKQGVLTPQNSTMNTPVYPVPKPDGRWRMVLDYREVNKTIPLTAAQNQHSAGILATIVRQKYKTTLDLANGFWAHPITPESYWLTAFTWQGKQYCWTRLPQGFLNSPALFNADVVDLLKEIPNVQVYVDDIYLSHDDPKEHVQQLEKVFQILLQAGYVVSLKKSEIGQKTVEFLGFNITKEGRGLTDTFKTKLLNITPPKDLKQLQSILGLLNFARNFIPNFAELVQPLYNLIAPAKGKYIEWSEENTKQLNMVIEALNTASNLEERLPEQRLVIKVNTSPSAGYVRYYNETGKKPIMYLNYVFSKAELKFSMLEKLLTTMHKALIKAMDLAMGQEILVYSPIVSMTKIQKTPLPERKALPIRWITWMTYLEDPRIQFHYDKTLPELKHIPDVYTSSQSPVKHPSQYEGVFYTDGSAIKSPDPTKSNNAGMGIVHATYKPEYQVLNQWSIPLGNHTAQMAEIAAVEFACKKALKIPGPVLVITDSFYVAESANKELPYWKSNGFVNNKKKPLKHISKWKSIAECLSMKPDITIQHEKGISLQIPVFILKGNALADKLATQGSYVVNAGKRTADGSEFEKRTADGSEFESPKKKAKVE

SEQ ID NO: 6207 - protein, 2106 aa, synthetic construct
MPAAKRVKLDGGDKKYSIGLDIGTNSVGWAVITDEYKVPSKKFKVLGNTDRHSIKKNLIGALLFDSGETAEATRLKRTARRRYTRRKNRICYLQEIFSNEMAKVDDSFFHRLEESFLVEEDKKHERHPIFGNIVDEVAYHEKYPTIYHLRKKLVDSTDKADLRLIYLALAHMIKFRGHFLIEGDLNPDNSDVDKLFIQLVQTYNQLFEENPINASGVDAKAILSARLSKSRRLENLIAQLPGEKKNGLFGNLIALSLGLTPNFKSNFDLAEDAKLQLSKDTYDDDLDNLLAQIGDQYADLFLAAKNLSDAILLSDILRVNTEITKAPLSASMIKRYDEHHQDLTLLKALVRQQLPEKYKEIFFDQSKNGYAGYIDGGASQEEFYKFIKPILEKMDGTEELLVKLNREDLLRKQRTFDNGSIPHQIHLGELHAILRRQEDFYPFLKDNREKIEKILTFRIPYYVGPLARGNSRFAWMTRKSEETITPWNFEEVVDKGASAQSFIERMTNFDKNLPNEKVLPKHSLLYEYFTVYNELTKVKYVTEGMRKPAFLSGEQKKAIVDLLFKTNRKVTVKQLKEDYFKKIECFDSVEISGVEDRFNASLGTYHDLLKIIKDKDFLDNEENEDILEDIVLTLTLFEDREMIEERLKTYAHLFDDKVMKQLKRRRYTGWGRLSRKLINGIRDKQSGKTILDFLKSDGFANRNFMQLIHDDSLTFKEDIQKAQVSGQGDSLHEHIANLAGSPAIKKGILQTVKVVDELVKVMGRHKPENIVIEMARENQTTQKGQKNSRERMKRIEEGIKELGSQILKEHPVENTQLQNEKLYLYYLQNGRDMYVDQELDINRLSDYDVDHIVPQSFLKDDSIDNKVLTRSDKARGKSDNVPSEEVVKKMKNYWRQLLNAKLITQRKFDNLTKAERGGLSELDKAGFIKRQLVETRQITKHVAQILDSRMNTKYDENDKLIREVKVITLKSKLVSDFRKDFQFYKVREINNYHHAHDAYLNAVVGTALIKKYPKLESEFVYGDYKVYDVRKMIAKSEQEIGKATAKYFFYSNIMNFFKTEITLANGEIRKRPLIETNGETGEIVWDKGRDFATVRKVLSMPQVNIVKKTEVQTGGFSKESILPKRNSDKLIARKKDWDPKKYGGFDSPTVAYSVLVVAKVEKGKSKKLKSVKELLGITIMERSSFEKNPIDFLEAKGYKEVKKDLIIKLPKYSLFELENGRKRMLASAGELQKGNELALPSKYVNFLYLASHYEKLKGSPEDNEQKQLFVEQHKHYLDEIIEQISEFSKRVILADANLDKVLSAYNKHRDKPIREQAENIIHLFTLTNLGAPAAFKYFDTTIDRKRYTSTKEVLDATLIHQSITGLYETRIDLSQLGGDGGGGGGSGGGGSGGGGSGGGGSGGGGSGGGGSGGVPWLTQQPLQLTILVPLQEYQEKILSKTALPEDQKQQLKTLFVKYDNLWQHWENQVGHRKIRPHNIATGDYPPRPQKQYPINPKAKPSIQIVIDDLLKQGVLTPQNSTMNTPVYPVPKPDGRWRMVLDYREVNKTIPLTAAQNQHSAGILATIVRQKYKTTLDLANGFWAHPITPESYWLTAFTWQGKQYCWTRLPQGFLNSPALFNADVVDLLKEIPNVQVYVDDIYLSHDDPKEHVQQLEKVFQILLQAGYVVSLKKSEIGQKTVEFLGFNITKEGRGLTDTFKTKLLNITPPKDLKQLQSILGKLNFARNFIPNFAELVQPLYNLIAPAKGKYIEWSEENTKQLNMVIEALNTASNLEERLPEQRLVIKVNTSPSAGYVRYYNETGKKPIMYLNYVFSKAELKFSMLEKLLTTMHKALIKAMDLAMGQEILVYSPIVSMTKIQKTPLPERKALPIRWITWMTYLEDPRIQFHYDKTLPELKHIPDVYTSSQSPVKHPSQYEGVFYTDGSAIKSPDPTKSNNAGMGIVHATYKPEYQVLNQWSIPLGNHTAQMAEIAAVEFACKKALKIPGPVLVITDSFYVAESANKELPYWKSNGFVNNKKKPLKHISKWKSIAECLSMKPDITIQHEKGISLQIPVFILKGNALADKLATQGSYVVNAGKRTADGSEFEKRTADGSEFESPKKKAKVE

SEQ ID NO: 6208 - protein, 2195 aa, synthetic construct
MPAAKRVKLDGGDKKYSIGLDIGTNSVGWAVITDEYKVPSKKFKVLGNTDRHSIKKNLIGALLFDSGETAEATRLKRTARRRYTRRKNRICYLQEIFSNEMAKVDDSFFHRLEESFLVEEDKKHERHPIFGNIVDEVAYHEKYPTIYHLRKKLVDSTDKADLRLIYLALAHMIKFRGHFLIEGDLNPDNSDVDKLFIQLVQTYNQLFEENPINASGVDAKAILSARLSKSRRLENLIAQLPGEKKNGLFGNLIALSLGLTPNFKSNFDLAEDAKLQLSKDTYDDDLDNLLAQIGDQYADLFLAAKNLSDAILLSDILRVNTEITKAPLSASMIKRYDEHHQDLTLLKALVRQQLPEKYKEIFFDQSKNGYAGYIDGGASQEEFYKFIKPILEKMDGTEELLVKLNREDLLRKQRTFDNGSIPHQIHLGELHAILRRQEDFYPFLKDNREKIEKILTFRIPYYVGPLARGNSRFAWMTRKSEETITPWNFEEVVDKGASAQSFIERMTNFDKNLPNEKVLPKHSLLYEYFTVYNELTKVKYVTEGMRKPAFLSGEQKKAIVDLLFKTNRKVTVKQLKEDYFKKIECFDSVEISGVEDRFNASLGTYHDLLKIIKDKDFLDNEENEDILEDIVLTLTLFEDREMIEERLKTYAHLFDDKVMKQLKRRRYTGWGRLSRKLINGIRDKQSGKTILDFLKSDGFANRNFMQLIHDDSLTFKEDIQKAQVSGQGDSLHEHIANLAGSPAIKKGILQTVKVVDELVKVMGRHKPENIVIEMARENQTTQKGQKNSRERMKRIEEGIKELGSQILKEHPVENTQLQNEKLYLYYLQNGRDMYVDQELDINRLSDYDVDHIVPQSFLKDDSIDNKVLTRSDKARGKSDNVPSEEVVKKMKNYWRQLLNAKLITQRKFDNLTKAERGGLSELDKAGFIKRQLVETRQITKHVAQILDSRMNTKYDENDKLIREVKVITLKSKLVSDFRKDFQFYKVREINNYHHAHDAYLNAVVGTALIKKYPKLESEFVYGDYKVYDVRKMIAKSEQEIGKATAKYFFYSNIMNFFKTEITLANGEIRKRPLIETNGETGEIVWDKGRDFATVRKVLSMPQVNIVKKTEVQTGGFSKESILPKRNSDKLIARKKDWDPKKYGGFDSPTVAYSVLVVAKVEKGKSKKLKSVKELLGITIMERSSFEKNPIDFLEAKGYKEVKKDLIIKLPKYSLFELENGRKRMLASAGELQKGNELALPSKYVNFLYLASHYEKLKGSPEDNEQKQLFVEQHKHYLDEIIEQISEFSKRVILADANLDKVLSAYNKHRDKPIREQAENIIHLFTLTNLGAPAAFKYFDTTIDRKRYTSTKEVLDATLIHQSITGLYETRIDLSQLGGDGGGGGGSGGGGSGGGGSGGGGSGGGGSGGGGSGGMNPLQLLQPLPAEIKGTKLLAHWNSGATITCIPESFLEDEQPIKKTLIKTIHGEKQQNVYYVTFKVKGRKVEAEVIASPYEYILLSPTDVPWLTQQPLQLTILVPLQEYQEKILSKTALPEDQKQQLKTLFVKYDNLWQHWENQVGHRKIRPHNIATGDYPPRPQKQYPINPKAKPSIQIVIDDLLKQGVLTPQNSTMNTPVYPVPKPDGRWRMVLDYREVNKTIPLTAAQNQHSAGILATIVRQKYKTTLDLANGFWAHPITPESYWLTAFTWQGKQYCWTRLPQGFLNSPALFNADVVDLLKEIPNVQVYVDDIYLSHDDPKEHVQQLEKVFQILLQAGYVVSLKKSEIGQKTVEFLGFNITKEGRGLTDTFKTKLLNITPPKDLKQLQSILGLLNFARNFIPNFAELVQPLYNLIAPAKGKYIEWSEENTKQLNMVIEALNTASNLEERLPEQRLVIKVNTSPSAGYVRYYNETGKKPIMYLNYVFSKAELKFSMLEKLLTTMHKALIKAMDLAMGQEILVYSPIVSMTKIQKTPLPERKALPIRWITWMTYLEDPRIQFHYDKTLPELKHIPDVYTSSQSPVKHPSQYEGVFYTDGSAIKSPDPTKSNNAGMGIVHATYKPEYQVLNQWSIPLGNHTAQMAEIAAVEFACKKALKIPGPVLVITDSFYVAESANKELPYWKSNGFVNNKKKPLKHISKWKSIAECLSMKPDITIQHEKGISLQIPVFILKGNALADKLATQGSYVVNAGKRTADGSEFEKRTADGSEFESPKKKAKVE

SEQ ID NO: 6209 - protein, 2195 aa, synthetic construct
MPAAKRVKLDGGDKKYSIGLDIGTNSVGWAVITDEYKVPSKKFKVLGNTDRHSIKKNLIGALLFDSGETAEATRLKRTARRRYTRRKNRICYLQEIFSNEMAKVDDSFFHRLEESFLVEEDKKHERHPIFGNIVDEVAYHEKYPTIYHLRKKLVDSTDKADLRLIYLALAHMIKFRGHFLIEGDLNPDNSDVDKLFIQLVQTYNQLFEENPINASGVDAKAILSARLSKSRRLENLIAQLPGEKKNGLFGNLIALSLGLTPNFKSNFDLAEDAKLQLSKDTYDDDLDNLLAQIGDQYADLFLAAKNLSDAILLSDILRVNTEITKAPLSASMIKRYDEHHQDLTLLKALVRQQLPEKYKEIFFDQSKNGYAGYIDGGASQEEFYKFIKPILEKMDGTEELLVKLNREDLLRKQRTFDNGSIPHQIHLGELHAILRRQEDFYPFLKDNREKIEKILTFRIPYYVGPLARGNSRFAWMTRKSEETITPWNFEEVVDKGASAQSFIERMTNFDKNLPNEKVLPKHSLLYEYFTVYNELTKVKYVTEGMRKPAFLSGEQKKAIVDLLFKTNRKVTVKQLKEDYFKKIECFDSVEISGVEDRFNASLGTYHDLLKIIKDKDFLDNEENEDILEDIVLTLTLFEDREMIEERLKTYAHLFDDKVMKQLKRRRYTGWGRLSRKLINGIRDKQSGKTILDFLKSDGFANRNFMQLIHDDSLTFKEDIQKAQVSGQGDSLHEHIANLAGSPAIKKGILQTVKVVDELVKVMGRHKPENIVIEMARENQTTQKGQKNSRERMKRIEEGIKELGSQILKEHPVENTQLQNEKLYLYYLQNGRDMYVDQELDINRLSDYDVDHIVPQSFLKDDSIDNKVLTRSDKARGKSDNVPSEEVVKKMKNYWRQLLNAKLITQRKFDNLTKAERGGLSELDKAGFIKRQLVETRQITKHVAQILDSRMNTKYDENDKLIREVKVITLKSKLVSDFRKDFQFYKVREINNYHHAHDAYLNAVVGTALIKKYPKLESEFVYGDYKVYDVRKMIAKSEQEIGKATAKYFFYSNIMNFFKTEITLANGEIRKRPLIETNGETGEIVWDKGRDFATVRKVLSMPQVNIVKKTEVQTGGFSKESILPKRNSDKLIARKKDWDPKKYGGFDSPTVAYSVLVVAKVEKGKSKKLKSVKELLGITIMERSSFEKNPIDFLEAKGYKEVKKDLIIKLPKYSLFELENGRKRMLASAGELQKGNELALPSKYVNFLYLASHYEKLKGSPEDNEQKQLFVEQHKHYLDEIIEQISEFSKRVILADANLDKVLSAYNKHRDKPIREQAENIIHLFTLTNLGAPAAFKYFDTTIDRKRYTSTKEVLDATLIHQSITGLYETRIDLSQLGGDGGGGGGSGGGGSGGGGSGGGGSGGGGSGGGGSGGMNPLQLLQPLPAEIKGTKLLAHWNSGATITCIPESFLEDEQPIKKTLIKTIHGEKQQNVYYVTFKVKGRKVEAEVIASPYEYILLSPTDVPWLTQQPLQLTILVPLQEYQEKILSKTALPEDQKQQLKTLFVKYDNLWQHWENQVGHRKIRPHNIATGDYPPRPQKQYPINPKAKPSIQIVIDDLLKQGVLTPQNSTMNTPVYPVPKPDGRWRMVLDYREVNKTIPLTAAQNQHSAGILATIVRQKYKTTLDLANGFWAHPITPESYWLTAFTWQGKQYCWTRLPQGFLNSPALFNADVVDLLKEIPNVQVYVDDIYLSHDDPKEHVQQLEKVFQILLQAGYVVSLKKSEIGQKTVEFLGFNITKEGRGLTDTFKTKLLNITPPKDLKQLQSILGKLNFARNFIPNFAELVQPLYNLIAPAKGKYIEWSEENTKQLNMVIEALNTASNLEERLPEQRLVIKVNTSPSAGYVRYYNETGKKPIMYLNYVFSKAELKFSMLEKLLTTMHKALIKAMDLAMGQEILVYSPIVSMTKIQKTPLPERKALPIRWITWMTYLEDPRIQFHYDKTLPELKHIPDVYTSSQSPVKHPSQYEGVFYTDGSAIKSPDPTKSNNAGMGIVHATYKPEYQVLNQWSIPLGNHTAQMAEIAAVEFACKKALKIPGPVLVITDSFYVAESANKELPYWKSNGFVNNKKKPLKHISKWKSIAECLSMKPDITIQHEKGISLQIPVFILKGNALADKLATQGSYVVNAGKRTADGSEFEKRTADGSEFESPKKKAKVE

SEQ ID NO: 6210 - protein, 2113 aa, synthetic construct
MPAAKRVKLDGGDKKYSIGLDIGTNSVGWAVITDEYKVPSKKFKVLGNTDRHSIKKNLIGALLFDSGETAEATRLKRTARRRYTRRKNRICYLQEIFSNEMAKVDDSFFHRLEESFLVEEDKKHERHPIFGNIVDEVAYHEKYPTIYHLRKKLVDSTDKADLRLIYLALAHMIKFRGHFLIEGDLNPDNSDVDKLFIQLVQTYNQLFEENPINASGVDAKAILSARLSKSRRLENLIAQLPGEKKNGLFGNLIALSLGLTPNFKSNFDLAEDAKLQLSKDTYDDDLDNLLAQIGDQYADLFLAAKNLSDAILLSDILRVNTEITKAPLSASMIKRYDEHHQDLTLLKALVRQQLPEKYKEIFFDQSKNGYAGYIDGGASQEEFYKFIKPILEKMDGTEELLVKLNREDLLRKQRTFDNGSIPHQIHLGELHAILRRQEDFYPFLKDNREKIEKILTFRIPYYVGPLARGNSRFAWMTRKSEETITPWNFEEVVDKGASAQSFIERMTNFDKNLPNEKVLPKHSLLYEYFTVYNELTKVKYVTEGMRKPAFLSGEQKKAIVDLLFKTNRKVTVKQLKEDYFKKIECFDSVEISGVEDRFNASLGTYHDLLKIIKDKDFLDNEENEDILEDIVLTLTLFEDREMIEERLKTYAHLFDDKVMKQLKRRRYTGWGRLSRKLINGIRDKQSGKTILDFLKSDGFANRNFMQLIHDDSLTFKEDIQKAQVSGQGDSLHEHIANLAGSPAIKKGILQTVKVVDELVKVMGRHKPENIVIEMARENQTTQKGQKNSRERMKRIEEGIKELGSQILKEHPVENTQLQNEKLYLYYLQNGRDMYVDQELDINRLSDYDVDHIVPQSFLKDDSIDNKVLTRSDKARGKSDNVPSEEVVKKMKNYWRQLLNAKLITQRKFDNLTKAERGGLSELDKAGFIKRQLVETRQITKHVAQILDSRMNTKYDENDKLIREVKVITLKSKLVSDFRKDFQFYKVREINNYHHAHDAYLNAVVGTALIKKYPKLESEFVYGDYKVYDVRKMIAKSEQEIGKATAKYFFYSNIMNFFKTEITLANGEIRKRPLIETNGETGEIVWDKGRDFATVRKVLSMPQVNIVKKTEVQTGGFSKESILPKRNSDKLIARKKDWDPKKYGGFDSPTVAYSVLVVAKVEKGKSKKLKSVKELLGITIMERSSFEKNPIDFLEAKGYKEVKKDLIIKLPKYSLFELENGRKRMLASAGELQKGNELALPSKYVNFLYLASHYEKLKGSPEDNEQKQLFVEQHKHYLDEIIEQISEFSKRVILADANLDKVLSAYNKHRDKPIREQAENIIHLFTLTNLGAPAAFKYFDTTIDRKRYTSTKEVLDATLIHQSITGLYETRIDLSQLGGDGGGGGGSGGGGSGGGGSGGGGSGGGGSGGGGSGGVLNLEEEYRLHEKPVPSSIDPSWLQLFPTVWAERAGMGLANQVPPVVVELRSGASPVAVRQYPMSKEAREGIRPHIQKFLDLGVLVPCRSPWNTPLLPVKKPGTNDYRPVQDLREINKRVQDIHPTVPNPYNLLSSLPPSYTWYSVLDLKDAFFCLRLHPNSQPLFAFEWKDPEKGNTGQLTWTRLPQGFKNSPTLFDEALHRDLAPFRALNPQVVLLQYVDDLLVAAPTYEDCKKGTQKLLQELSKLGYRVSAKKAQLCQREVTYLGYLLKEGKRWLTPARKATVMKIPVPTTPRQVREFLGTAGFCRLWIPGFASLAAPLYPLTKESIPFIWTEEHQQAFDHIKKALLSAPALALPDLTKPFTLYIDERAGVARGVLTQTLGPWRRPVAYLSKKLDPVASGWPTCLKAVAAVALLLKDADKLTLGQNVTVIASHSLESIVRQPPDRWMTNARMTHYQSLLLNERVSFAPPAVLNPATLLPVESEATPVHRCSEILAEETGTRRDLEDQPLPGVPTWYTDGSSFITEGKRRAGAPIVDGKRTVWASSLPEGTSAQKAELVALTQALRLAEGKNINIYTDSRYAFATAHIHGAIYKQRGLLTSAGKDIKNKEEILALLEAIHLPRRVAIIHCPGHQRGSNPVATGNRRADEAAKQAALSTRVLAGTTKPAGKRTADGSEFEKRTADGSEFESPKKKAKVE

SEQ ID NO: 6211 - protein, 2113 aa, synthetic construct
MPAAKRVKLDGGDKKYSIGLDIGTNSVGWAVITDEYKVPSKKFKVLGNTDRHSIKKNLIGALLFDSGETAEATRLKRTARRRYTRRKNRICYLQEIFSNEMAKVDDSFFHRLEESFLVEEDKKHERHPIFGNIVDEVAYHEKYPTIYHLRKKLVDSTDKADLRLIYLALAHMIKFRGHFLIEGDLNPDNSDVDKLFIQLVQTYNQLFEENPINASGVDAKAILSARLSKSRRLENLIAQLPGEKKNGLFGNLIALSLGLTPNFKSNFDLAEDAKLQLSKDTYDDDLDNLLAQIGDQYADLFLAAKNLSDAILLSDILRVNTEITKAPLSASMIKRYDEHHQDLTLLKALVRQQLPEKYKEIFFDQSKNGYAGYIDGGASQEEFYKFIKPILEKMDGTEELLVKLNREDLLRKQRTFDNGSIPHQIHLGELHAILRRQEDFYPFLKDNREKIEKILTFRIPYYVGPLARGNSRFAWMTRKSEETITPWNFEEVVDKGASAQSFIERMTNFDKNLPNEKVLPKHSLLYEYFTVYNELTKVKYVTEGMRKPAFLSGEQKKAIVDLLFKTNRKVTVKQLKEDYFKKIECFDSVEISGVEDRFNASLGTYHDLLKIIKDKDFLDNEENEDILEDIVLTLTLFEDREMIEERLKTYAHLFDDKVMKQLKRRRYTGWGRLSRKLINGIRDKQSGKTILDFLKSDGFANRNFMQLIHDDSLTFKEDIQKAQVSGQGDSLHEHIANLAGSPAIKKGILQTVKVVDELVKVMGRHKPENIVIEMARENQTTQKGQKNSRERMKRIEEGIKELGSQILKEHPVENTQLQNEKLYLYYLQNGRDMYVDQELDINRLSDYDVDHIVPQSFLKDDSIDNKVLTRSDKARGKSDNVPSEEVVKKMKNYWRQLLNAKLITQRKFDNLTKAERGGLSELDKAGFIKRQLVETRQITKHVAQILDSRMNTKYDENDKLIREVKVITLKSKLVSDFRKDFQFYKVREINNYHHAHDAYLNAVVGTALIKKYPKLESEFVYGDYKVYDVRKMIAKSEQEIGKATAKYFFYSNIMNFFKTEITLANGEIRKRPLIETNGETGEIVWDKGRDFATVRKVLSMPQVNIVKKTEVQTGGFSKESILPKRNSDKLIARKKDWDPKKYGGFDSPTVAYSVLVVAKVEKGKSKKLKSVKELLGITIMERSSFEKNPIDFLEAKGYKEVKKDLIIKLPKYSLFELENGRKRMLASAGELQKGNELALPSKYVNFLYLASHYEKLKGSPEDNEQKQLFVEQHKHYLDEIIEQISEFSKRVILADANLDKVLSAYNKHRDKPIREQAENIIHLFTLTNLGAPAAFKYFDTTIDRKRYTSTKEVLDATLIHQSITGLYETRIDLSQLGGDGGGGGGSGGGGSGGGGSGGGGSGGGGSGGGGSGGVLNLEEEYRLHEKPVPSSIDPSWLQLFPTVWAERAGMGLANQVPPVVVELRSGASPVAVRQYPMSKEAREGIRPHIQKFLDLGVLVPCRSPWNTPLLPVKKPGTNDYRPVQDLREINKRVQDIHPTVPNPYNLLSSLPPSYTWYSVLDLKDAFFCLRLHPNSQPLFAFEWKDPEKGNTGQLTWTRLPQGFKNSPTLFNEALHRDLAPFRALNPQVVLLQYVDDLLVAAPTYEDCKKGTQKLLQELSKLGYRVSAKKAQLCQREVTYLGYLLKEGKRWLTPARKATVMKIPVPTTPRQVREFLGKAGFCRLFIPGFASLAAPLYPLTKPSIPFIWTEEHQQAFDHIKKALLSAPALALPDLTKPFTLYIDERAGVARGVLTQTLGPWRRPVAYLSKKLDPVASGWPTCLKAVAAVALLLKDADKLTLGQNVTVIASHSLESIVRQPPDRWMTNARMTHYQSLLLNERVSFAPPAVLNPATLLPVESEATPVHRCSEILAEETGTRRDLEDQPLPGVPTWYTDGSSFITEGKRRAGAPIVDGKRTVWASSLPEGTSAQKAELVALTQALRLAEGKNINIYTDSRYAFATAHIHGAIYKQRGWLTSAGKDIKNKEEILALLEAIHLPRRVAIIHCPGHQRGSNPVATGNRRADEAAKQAALSTRVLAGTTKPAGKRTADGSEFEKRTADGSEFESPKKKAKVE

SEQ ID NO: 6212 - protein, 2146 aa, synthetic construct
MPAAKRVKLDGGDKKYSIGLDIGTNSVGWAVITDEYKVPSKKFKVLGNTDRHSIKKNLIGALLFDSGETAEATRLKRTARRRYTRRKNRICYLQEIFSNEMAKVDDSFFHRLEESFLVEEDKKHERHPIFGNIVDEVAYHEKYPTIYHLRKKLVDSTDKADLRLIYLALAHMIKFRGHFLIEGDLNPDNSDVDKLFIQLVQTYNQLFEENPINASGVDAKAILSARLSKSRRLENLIAQLPGEKKNGLFGNLIALSLGLTPNFKSNFDLAEDAKLQLSKDTYDDDLDNLLAQIGDQYADLFLAAKNLSDAILLSDILRVNTEITKAPLSASMIKRYDEHHQDLTLLKALVRQQLPEKYKEIFFDQSKNGYAGYIDGGASQEEFYKFIKPILEKMDGTEELLVKLNREDLLRKQRTFDNGSIPHQIHLGELHAILRRQEDFYPFLKDNREKIEKILTFRIPYYVGPLARGNSRFAWMTRKSEETITPWNFEEVVDKGASAQSFIERMTNFDKNLPNEKVLPKHSLLYEYFTVYNELTKVKYVTEGMRKPAFLSGEQKKAIVDLLFKTNRKVTVKQLKEDYFKKIECFDSVEISGVEDRFNASLGTYHDLLKIIKDKDFLDNEENEDILEDIVLTLTLFEDREMIEERLKTYAHLFDDKVMKQLKRRRYTGWGRLSRKLINGIRDKQSGKTILDFLKSDGFANRNFMQLIHDDSLTFKEDIQKAQVSGQGDSLHEHIANLAGSPAIKKGILQTVKVVDELVKVMGRHKPENIVIEMARENQTTQKGQKNSRERMKRIEEGIKELGSQILKEHPVENTQLQNEKLYLYYLQNGRDMYVDQELDINRLSDYDVDHIVPQSFLKDDSIDNKVLTRSDKARGKSDNVPSEEVVKKMKNYWRQLLNAKLITQRKFDNLTKAERGGLSELDKAGFIKRQLVETRQITKHVAQILDSRMNTKYDENDKLIREVKVITLKSKLVSDFRKDFQFYKVREINNYHHAHDAYLNAVVGTALIKKYPKLESEFVYGDYKVYDVRKMIAKSEQEIGKATAKYFFYSNIMNFFKTEITLANGEIRKRPLIETNGETGEIVWDKGRDFATVRKVLSMPQVNIVKKTEVQTGGFSKESILPKRNSDKLIARKKDWDPKKYGGFDSPTVAYSVLVVAKVEKGKSKKLKSVKELLGITIMERSSFEKNPIDFLEAKGYKEVKKDLIIKLPKYSLFELENGRKRMLASAGELQKGNELALPSKYVNFLYLASHYEKLKGSPEDNEQKQLFVEQHKHYLDEIIEQISEFSKRVILADANLDKVLSAYNKHRDKPIREQAENIIHLFTLTNLGAPAAFKYFDTTIDRKRYTSTKEVLDATLIHQSITGLYETRIDLSQLGGDGGGGGGSGGGGSGGGGSGGGGSGGGGSGGGGSGGLLGRDLLTKLKAQIQFSTEGPQVTWEDRPAMCLVLNLEEEYRLHEKPVPPSIDPSWLQLFPMVWAEKAGMGLANQVPPVVVELKSDASPVAVRQYPMSKEAREGIRPHIQRFLDLGILVPCQSPWNTPLLPVKKPGTNDYRPVQDLREVNKRVQDIHPTVPNPYNLLSSLPPSHTWYSVLDLKDAFFCLKLHPNSQPLFAFEWRDPEKGNTGQLTWTRLPQGFKNSPTLFNEALHRDLASFRALNPQVVMLQYVDDLLVAAPTYRDCKEGTRRLLQELSKLGYRVSAKKAQLCREEVTYLGYLLKGGKRWLTPARKATVMKIPTPTTPRQVREFLGTAGFCRLWIPGFASLAAPLYPLTRPKVPFTWTEAHQEAFGRIKEALLSAPALALPDLTKPFALYVDEKEGVARGVLTQTLGPWRRPVAYLSKKLDPVASGWPTCLKAIAAVALLLKDADKLTLGQNVLVIAPHNLESIVRQPPDRWMTNARMTHYQSLLLNERVSFAPPAILNPATLLPVESDDTPIHICSEILAEETGTRPDLRDQPLPGVPAWYTDGSSFIMDGRRQAGAAIVDNKRTVWASNLPEGTSAQKAELIALTQALRLAEGKSINIYTDSRYAFATAHVHGAIYKQRGWLTSAGKDIKNKEEILALLEAIHLPKRVAIIHCPGHQRGTDPVATGNRKADEAAKQAAQSTRILTETTKNAGKRTADGSEFEKRTADGSEFESPKKKAKVE

SEQ ID NO: 6213 - protein, 2115 aa, synthetic construct
MPAAKRVKLDGGDKKYSIGLDIGTNSVGWAVITDEYKVPSKKFKVLGNTDRHSIKKNLIGALLFDSGETAEATRLKRTARRRYTRRKNRICYLQEIFSNEMAKVDDSFFHRLEESFLVEEDKKHERHPIFGNIVDEVAYHEKYPTIYHLRKKLVDSTDKADLRLIYLALAHMIKFRGHFLIEGDLNPDNSDVDKLFIQLVQTYNQLFEENPINASGVDAKAILSARLSKSRRLENLIAQLPGEKKNGLFGNLIALSLGLTPNFKSNFDLAEDAKLQLSKDTYDDDLDNLLAQIGDQYADLFLAAKNLSDAILLSDILRVNTEITKAPLSASMIKRYDEHHQDLTLLKALVRQQLPEKYKEIFFDQSKNGYAGYIDGGASQEEFYKFIKPILEKMDGTEELLVKLNREDLLRKQRTFDNGSIPHQIHLGELHAILRRQEDFYPFLKDNREKIEKILTFRIPYYVGPLARGNSRFAWMTRKSEETITPWNFEEVVDKGASAQSFIERMTNFDKNLPNEKVLPKHSLLYEYFTVYNELTKVKYVTEGMRKPAFLSGEQKKAIVDLLFKTNRKVTVKQLKEDYFKKIECFDSVEISGVEDRFNASLGTYHDLLKIIKDKDFLDNEENEDILEDIVLTLTLFEDREMIEERLKTYAHLFDDKVMKQLKRRRYTGWGRLSRKLINGIRDKQSGKTILDFLKSDGFANRNFMQLIHDDSLTFKEDIQKAQVSGQGDSLHEHIANLAGSPAIKKGILQTVKVVDELVKVMGRHKPENIVIEMARENQTTQKGQKNSRERMKRIEEGIKELGSQILKEHPVENTQLQNEKLYLYYLQNGRDMYVDQELDINRLSDYDVDHIVPQSFLKDDSIDNKVLTRSDKARGKSDNVPSEEVVKKMKNYWRQLLNAKLITQRKFDNLTKAERGGLSELDKAGFIKRQLVETRQITKHVAQILDSRMNTKYDENDKLIREVKVITLKSKLVSDFRKDFQFYKVREINNYHHAHDAYLNAVVGTALIKKYPKLESEFVYGDYKVYDVRKMIAKSEQEIGKATAKYFFYSNIMNFFKTEITLANGEIRKRPLIETNGETGEIVWDKGRDFATVRKVLSMPQVNIVKKTEVQTGGFSKESILPKRNSDKLIARKKDWDPKKYGGFDSPTVAYSVLVVAKVEKGKSKKLKSVKELLGITIMERSSFEKNPIDFLEAKGYKEVKKDLIIKLPKYSLFELENGRKRMLASAGELQKGNELALPSKYVNFLYLASHYEKLKGSPEDNEQKQLFVEQHKHYLDEIIEQISEFSKRVILADANLDKVLSAYNKHRDKPIREQAENIIHLFTLTNLGAPAAFKYFDTTIDRKRYTSTKEVLDATLIHQSITGLYETRIDLSQLGGDGGGGGGSGGGGSGGGGSGGGGSGGGGSGGGGSGGTLNLEDEYRLYETSAEPEVSPGSTWLSDFPQAWAETGGMGLAVRQAPLIIPLKATSTPVSIKQYPMSQEAKLGIKPHIQRLLDQGILVPCQSPWNTPLLPVKKPGTNDYRPVQDLREVNKRVEDIHPTVPNPYNLLSGLPPSHRWYTVLDLKDAFFCLRLHPTSQPLFAFEWRDPGMGISGQLTWTRLPQGFKNSPTLFNEALHRDLADFRIQHPDLILLQYVDDILLAATSELDCQQGTRALLLTLGNLGYRASAKKAQLCQKQVKYLGYLLKEGQRWLTEARKETVMGQPTPKTPRQLREFLGKAGFCRLFIPGFAEMAAPLYPLTKPGTLFNWGPDQQKAYQEIKQALLTAPALGLPDLTKPFELFVDEKQGYAKGVLTQKLGPWRRPVAYLSKKLDPVAAGWPPCLRMVAAIAVLRKDAGKLTMGQPLVILAPHAVEALVKQPPDRWLSNARMTHYQAMLLDTDRVQFGPVVALNPATLLPLPEEGAPHDCLEILAETHGTRPDLTDQPIPDADHTWYTDGSSFLQEGQRKAGAAVTTETEVIWARALPAGTSAQRAELIALTQALKMAEGKRLNVYTDSRYAFATAHIHGEIYRRRGWLTSEGREIKNKSEILALLKALFLPKRLSIIHCLGHQKGDSAEARGNRLADQAAREAAIKTPPDTSTLLAGKRTADGSEFEKRTADGSEFESPKKKAKVE

SEQ ID NO: 6214 - protein, 2115 aa, synthetic construct
MPAAKRVKLDGGDKKYSIGLDIGTNSVGWAVITDEYKVPSKKFKVLGNTDRHSIKKNLIGALLFDSGETAEATRLKRTARRRYTRRKNRICYLQEIFSNEMAKVDDSFFHRLEESFLVEEDKKHERHPIFGNIVDEVAYHEKYPTIYHLRKKLVDSTDKADLRLIYLALAHMIKFRGHFLIEGDLNPDNSDVDKLFIQLVQTYNQLFEENPINASGVDAKAILSARLSKSRRLENLIAQLPGEKKNGLFGNLIALSLGLTPNFKSNFDLAEDAKLQLSKDTYDDDLDNLLAQIGDQYADLFLAAKNLSDAILLSDILRVNTEITKAPLSASMIKRYDEHHQDLTLLKALVRQQLPEKYKEIFFDQSKNGYAGYIDGGASQEEFYKFIKPILEKMDGTEELLVKLNREDLLRKQRTFDNGSIPHQIHLGELHAILRRQEDFYPFLKDNREKIEKILTFRIPYYVGPLARGNSRFAWMTRKSEETITPWNFEEVVDKGASAQSFIERMTNFDKNLPNEKVLPKHSLLYEYFTVYNELTKVKYVTEGMRKPAFLSGEQKKAIVDLLFKTNRKVTVKQLKEDYFKKIECFDSVEISGVEDRFNASLGTYHDLLKIIKDKDFLDNEENEDILEDIVLTLTLFEDREMIEERLKTYAHLFDDKVMKQLKRRRYTGWGRLSRKLINGIRDKQSGKTILDFLKSDGFANRNFMQLIHDDSLTFKEDIQKAQVSGQGDSLHEHIANLAGSPAIKKGILQTVKVVDELVKVMGRHKPENIVIEMARENQTTQKGQKNSRERMKRIEEGIKELGSQILKEHPVENTQLQNEKLYLYYLQNGRDMYVDQELDINRLSDYDVDHIVPQSFLKDDSIDNKVLTRSDKARGKSDNVPSEEVVKKMKNYWRQLLNAKLITQRKFDNLTKAERGGLSELDKAGFIKRQLVETRQITKHVAQILDSRMNTKYDENDKLIREVKVITLKSKLVSDFRKDFQFYKVREINNYHHAHDAYLNAVVGTALIKKYPKLESEFVYGDYKVYDVRKMIAKSEQEIGKATAKYFFYSNIMNFFKTEITLANGEIRKRPLIETNGETGEIVWDKGRDFATVRKVLSMPQVNIVKKTEVQTGGFSKESILPKRNSDKLIARKKDWDPKKYGGFDSPTVAYSVLVVAKVEKGKSKKLKSVKELLGITIMERSSFEKNPIDFLEAKGYKEVKKDLIIKLPKYSLFELENGRKRMLASAGELQKGNELALPSKYVNFLYLASHYEKLKGSPEDNEQKQLFVEQHKHYLDEIIEQISEFSKRVILADANLDKVLSAYNKHRDKPIREQAENIIHLFTLTNLGAPAAFKYFDTTIDRKRYTSTKEVLDATLIHQSITGLYETRIDLSQLGGDGGGGGGSGGGGSGGGGSGGGGSGGGGSGGGGSGGTLNIEDEYRLHETSKGPDVPLGSTWLSDFPQAWAETGGMGLAVRQAPLIIPLKATSTPVSIKQYPMSQEARLGIKPHIQRLLDQGILVPCQSPWNTPLLPVKKPGTNDYRPVQDLREVNKRVEDIHPTVPNPYNLLSGLPPSHQWYTVLDLKDAFFCLRLHPTSQSLFAFEWRDPEMGISGQLTWTRLPQGFKNSPTLFNEALHRDLADFRIQHPDLILLQYVDDLLLAATSELDCQQGTRALLQTLGDLGYRASAKKAQICQKQVKYLGYLLKEGQRWLTEARKETVMGQPTPKTPRQLREFLGTAGFCRLWIPGFAEMAAPLYPLTKPGTLFEWGPDQQKAYQEIKQALLTAPALGLPDLTKPFELFVDEKQGYAKGVLTQKLGPWRRPVAYLSKKLDPVAAGWPPCLRMVAAIAVLTKDAGKLTMGQPLVILAPHAVEALVKQPPDRWLSNARMTHYQALLLDTDRVQFGPIVALNPATLLPLPEEGLQHDCLDILAEAHGTRPDLTDQPLPDADHTWYTDGSSFLQEGQRKAGAAVTTETEVVWAKALPAGTSAQRAELIALTQALKMAEGKKLNVYTDSRYAFATAHIHGEIYRRRGWLTSEGKEIKNKDEILALLKALFLPKRLSIIHCPGHQKGNRAEARGNRMADQAAREVATRETPETSTLLAGKRTADGSEFEKRTADGSEFESPKKKAKVE

SEQ ID NO: 6215 - protein, 2115 aa, synthetic construct
MPAAKRVKLDGGDKKYSIGLDIGTNSVGWAVITDEYKVPSKKFKVLGNTDRHSIKKNLIGALLFDSGETAEATRLKRTARRRYTRRKNRICYLQEIFSNEMAKVDDSFFHRLEESFLVEEDKKHERHPIFGNIVDEVAYHEKYPTIYHLRKKLVDSTDKADLRLIYLALAHMIKFRGHFLIEGDLNPDNSDVDKLFIQLVQTYNQLFEENPINASGVDAKAILSARLSKSRRLENLIAQLPGEKKNGLFGNLIALSLGLTPNFKSNFDLAEDAKLQLSKDTYDDDLDNLLAQIGDQYADLFLAAKNLSDAILLSDILRVNTEITKAPLSASMIKRYDEHHQDLTLLKALVRQQLPEKYKEIFFDQSKNGYAGYIDGGASQEEFYKFIKPILEKMDGTEELLVKLNREDLLRKQRTFDNGSIPHQIHLGELHAILRRQEDFYPFLKDNREKIEKILTFRIPYYVGPLARGNSRFAWMTRKSEETITPWNFEEVVDKGASAQSFIERMTNFDKNLPNEKVLPKHSLLYEYFTVYNELTKVKYVTEGMRKPAFLSGEQKKAIVDLLFKTNRKVTVKQLKEDYFKKIECFDSVEISGVEDRFNASLGTYHDLLKIIKDKDFLDNEENEDILEDIVLTLTLFEDREMIEERLKTYAHLFDDKVMKQLKRRRYTGWGRLSRKLINGIRDKQSGKTILDFLKSDGFANRNFMQLIHDDSLTFKEDIQKAQVSGQGDSLHEHIANLAGSPAIKKGILQTVKVVDELVKVMGRHKPENIVIEMARENQTTQKGQKNSRERMKRIEEGIKELGSQILKEHPVENTQLQNEKLYLYYLQNGRDMYVDQELDINRLSDYDVDHIVPQSFLKDDSIDNKVLTRSDKARGKSDNVPSEEVVKKMKNYWRQLLNAKLITQRKFDNLTKAERGGLSELDKAGFIKRQLVETRQITKHVAQILDSRMNTKYDENDKLIREVKVITLKSKLVSDFRKDFQFYKVREINNYHHAHDAYLNAVVGTALIKKYPKLESEFVYGDYKVYDVRKMIAKSEQEIGKATAKYFFYSNIMNFFKTEITLANGEIRKRPLIETNGETGEIVWDKGRDFATVRKVLSMPQVNIVKKTEVQTGGFSKESILPKRNSDKLIARKKDWDPKKYGGFDSPTVAYSVLVVAKVEKGKSKKLKSVKELLGITIMERSSFEKNPIDFLEAKGYKEVKKDLIIKLPKYSLFELENGRKRMLASAGELQKGNELALPSKYVNFLYLASHYEKLKGSPEDNEQKQLFVEQHKHYLDEIIEQISEFSKRVILADANLDKVLSAYNKHRDKPIREQAENIIHLFTLTNLGAPAAFKYFDTTIDRKRYTSTKEVLDATLIHQSITGLYETRIDLSQLGGDGGGGGGSGGGGSGGGGSGGGGSGGGGSGGGGSGGTLNIEDEHRLHETSKEPDVSLGSTWLSDFPQAWAETGGMGLAVRQAPLIIPLKATSTPVSIKQYPMSQEARLGIKPHIQRLLDQGILVPCQSPWNTPLLPVKKPGTNDYRPVQDLREVNKRVEDIHPTVPNPYNLLSGLPPSHQWYTVLDLKDAFFCLRLHPTSQPLFAFEWRDPEMGISGQLTWTRLPQGFKNSPTLFDEALHRDLADFRIQHPDLILLQYVDDLLLAATSELDCQQGTRALLQTLGNLGYRASAKKAQICQKQVKYLGYLLKEGQRWLTEARKETVMGQPTPKTPRQLREFLGTAGFCRLWIPGFAEMAAPLYPLTKTGTLFNWGPDQQKAYQEIKQALLTAPALGLPDLTKPFELFVDEKQGYAKGVLTQKLGPWRRPVAYLSKKLDPVAAGWPPCLRMVAAIAVLTKDAGKLTMGQPLVILAPHAVEALVKQPPDRWLSNARMTHYQALLLDTDRVQFGPVVALNPATLLPLPEEGLQHNCLDILAEAHGTRPDLTDQPLPDADHTWYTDGSSLLQEGQRKAGAAVTTETEVIWAKALPAGTSAQRAELIALTQALKMAEGKKLNVYTDSRYAFATAHIHGEIYRRRGLLTSEGKEIKNKDEILALLKALFLPKRLSIIHCPGHQKGHSAEARGNRMADQAARKAAITETPDTSTLLAGKRTADGSEFEKRTADGSEFESPKKKAKVE

SEQ ID NO: 6216 - protein, 2115 aa, synthetic construct; identical to SEQ ID NO: 6215

SEQ ID NO: 6217 - protein, 2115 aa, synthetic construct
MPAAKRVKLDGGDKKYSIGLDIGTNSVGWAVITDEYKVPSKKFKVLGNTDRHSIKKNLIGALLFDSGETAEATRLKRTARRRYTRRKNRICYLQEIFSNEMAKVDDSFFHRLEESFLVEEDKKHERHPIFGNIVDEVAYHEKYPTIYHLRKKLVDSTDKADLRLIYLALAHMIKFRGHFLIEGDLNPDNSDVDKLFIQLVQTYNQLFEENPINASGVDAKAILSARLSKSRRLENLIAQLPGEKKNGLFGNLIALSLGLTPNFKSNFDLAEDAKLQLSKDTYDDDLDNLLAQIGDQYADLFLAAKNLSDAILLSDILRVNTEITKAPLSASMIKRYDEHHQDLTLLKALVRQQLPEKYKEIFFDQSKNGYAGYIDGGASQEEFYKFIKPILEKMDGTEELLVKLNREDLLRKQRTFDNGSIPHQIHLGELHAILRRQEDFYPFLKDNREKIEKILTFRIPYYVGPLARGNSRFAWMTRKSEETITPWNFEEVVDKGASAQSFIERMTNFDKNLPNEKVLPKHSLLYEYFTVYNELTKVKYVTEGMRKPAFLSGEQKKAIVDLLFKTNRKVTVKQLKEDYFKKIECFDSVEISGVEDRFNASLGTYHDLLKIIKDKDFLDNEENEDILEDIVLTLTLFEDREMIEERLKTYAHLFDDKVMKQLKRRRYTGWGRLSRKLINGIRDKQSGKTILDFLKSDGFANRNFMQLIHDDSLTFKEDIQKAQVSGQGDSLHEHIANLAGSPAIKKGILQTVKVVDELVKVMGRHKPENIVIEMARENQTTQKGQKNSRERMKRIEEGIKELGSQILKEHPVENTQLQNEKLYLYYLQNGRDMYVDQELDINRLSDYDVDHIVPQSFLKDDSIDNKVLTRSDKARGKSDNVPSEEVVKKMKNYWRQLLNAKLITQRKFDNLTKAERGGLSELDKAGFIKRQLVETRQITKHVAQILDSRMNTKYDENDKLIREVKVITLKSKLVSDFRKDFQFYKVREINNYHHAHDAYLNAVVGTALIKKYPKLESEFVYGDYKVYDVRKMIAKSEQEIGKATAKYFFYSNIMNFFKTEITLANGEIRKRPLIETNGETGEIVWDKGRDFATVRKVLSMPQVNIVKKTEVQTGGFSKESILPKRNSDKLIARKKDWDPKKYGGFDSPTVAYSVLVVAKVEKGKSKKLKSVKELLGITIMERSSFEKNPIDFLEAKGYKEVKKDLIIKLPKYSLFELENGRKRMLASAGELQKGNELALPSKYVNFLYLASHYEKLKGSPEDNEQKQLFVEQHKHYLDEIIEQISEFSKRVILADANLDKVLSAYNKHRDKPIREQAENIIHLFTLTNLGAPAAFKYFDTTIDRKRYTSTKEVLDATLIHQSITGLYETRIDLSQLGGDGGGGGGSGGGGSGGGGSGGGGSGGGGSGGGGSGGTLNIEDEYRLHEISTEPDVSPGSTWLSDFPQAWAETGGMGLAVRQAPLIIPLKATSTPVSIKQYPMSQEAKLGIKPHIQRLLDQGILVPCQSPWNTPLLPVKKPGTNDYRPVQGLREVNKRVEDIHPTVPNPYNLLSGLPTSHRWYTVLDLKDAFFCLRLHPTSQPLFASEWRDPGMGISGQLTWTRLPQGFKNSPTLFNEALHRGLADFRIQHPDLILLQYVDDLLLAATSELDCQQGTRALLKTLGNLGYRASAKKAQICQKQVKYLGYLLREGQRWLTEARKETVMGQPTPKTPRQLREFLGTAGFCRLWIPRFAEMAAPLYPLTKPGTLFNWGPDQQKAYHEIKQALLTAPALGLPDLTKPFELFVDEKQGYAKGVLTQKLGPWRRPVAYLSKKLDPVAAGWPPCLRMVAAIAVLTKDAGKLTMGQPLVILAPHAVEALVKQPPDRWLSNARMTHYQAMLLDTDRVQFGPVVALNPATLLPLPEEGAPHDCLEILAETHGTEPDLTDQPIPDADHTWYTDGSSFLQEGQRKAGAAVTTETEVIWARALPAGTSAQRAELIALTQALKMAEGKRLNVYTDSRYAFATAHIHGEIYKRRGWLTSEGREIKNKSEILALLKALFLPKRLSIIHCLGHQKGDSAEARGNRLADQAAREAAIKTPPDTSTLLAGKRTADGSEFEKRTADGSEFESPKKKAKVE

SEQ ID NO: 6218 - protein, 2109 aa, synthetic construct
MPAAKRVKLDGGDKKYSIGLDIGTNSVGWAVITDEYKVPSKKFKVLGNTDRHSIKKNLIGALLFDSGETAEATRLKRTARRRYTRRKNRICYLQEIFSNEMAKVDDSFFHRLEESFLVEEDKKHERHPIFGNIVDEVAYHEKYPTIYHLRKKLVDSTDKADLRLIYLALAHMIKFRGHFLIEGDLNPDNSDVDKLFIQLVQTYNQLFEENPINASGVDAKAILSARLSKSRRLENLIAQLPGEKKNGLFGNLIALSLGLTPNFKSNFDLAEDAKLQLSKDTYDDDLDNLLAQIGDQYADLFLAAKNLSDAILLSDILRVNTEITKAPLSASMIKRYDEHHQDLTLLKALVRQQLPEKYKEIFFDQSKNGYAGYIDGGASQEEFYKFIKPILEKMDGTEELLVKLNREDLLRKQRTFDNGSIPHQIHLGELHAILRRQEDFYPFLKDNREKIEKILTFRIPYYVGPLARGNSRFAWMTRKSEETITPWNFEEVVDKGASAQSFIERMTNFDKNLPNEKVLPKHSLLYEYFTVYNELTKVKYVTEGMRKPAFLSGEQKKAIVDLLFKTNRKVTVKQLKEDYFKKIECFDSVEISGVEDRFNASLGTYHDLLKIIKDKDFLDNEENEDILEDIVLTLTLFEDREMIEERLKTYAHLFDDKVMKQLKRRRYTGWGRLSRKLINGIRDKQSGKTILDFLKSDGFANRNFMQLIHDDSLTFKEDIQKAQVSGQGDSLHEHIANLAGSPAIKKGILQTVKVVDELVKVMGRHKPENIVIEMARENQTTQKGQKNSRERMKRIEEGIKELGSQILKEHPVENTQLQNEKLYLYYLQNGRDMYVDQELDINRLSDYDVDHIVPQSFLKDDSIDNKVLTRSDKARGKSDNVPSEEVVKKMKNYWRQLLNAKLITQRKFDNLTKAERGGLSELDKAGFIKRQLVETRQITKHVAQILDSRMNTKYDENDKLIREVKVITLKSKLVSDFRKDFQFYKVREINNYHHAHDAYLNAVVGTALIKKYPKLESEFVYGDYKVYDVRKMIAKSEQEIGKATAKYFFYSNIMNFFKTEITLANGEIRKRPLIETNGETGEIVWDKGRDFATVRKVLSMPQVNIVKKTEVQTGGFSKESILPKRNSDKLIARKKDWDPKKYGGFDSPTVAYSVLVVAKVEKGKSKKLKSVKELLGITIMERSSFEKNPIDFLEAKGYKEVKKDLIIKLPKYSLFELENGRKRMLASAGELQKGNELALPSKYVNFLYLASHYEKLKGSPEDNEQKQLFVEQHKHYLDEIIEQISEFSKRVILADANLDKVLSAYNKHRDKPIREQAENIIHLFTLTNLGAPAAFKYFDTTIDRKRYTSTKEVLDATLIHQSITGLYETRIDLSQLGGDGGGGGGSGGGGSGGGGSGGGGSGGGGSGGGGSGGTLQLDDEYRLYSPLVKPDQNIQFWLEQFPQAWAETAGMGLAKQVPPQVIQLKASATPVSVRQYPLSKEAQEGIRPHVQRLIQQGILVPVQSPWNTPLLPVRKPGTNDYRPVQDLREVNKRVQDIHPTVPNPYNLLCALPPQRSWYTVLDLKDAFFCLRLHPTSQPLFAFEWRDPGTGRTGQLTWTRLPQGFKNSPTIFDEALHRDLANFRIQHPQVTLLQYVDDLLLAGATKQDCLEGTKALLLELSDLGYRASAKKAQICRREVTYLGYSLRDGQRWLTEARKKTVVQIPAPTTAKQVREFLGTAGFCRLWIPGFATLAAPLYPLTKEKGEFSWAPEHQKAFDAIKKALLSAPALALPDVTKPFTLYVDERKGVARGVLTQTLGPWRRPVAYLSKKLDPVASGWPVCLKAIAAVAILVKDADKLTLGQNITVIAPHALENIVRQPPDRWMTNARMTHYQSLLLTERVTFAPPAALNPATLLPEETDEPVTHDCHQLLIEETGVRKDLTDIPLTGEVLTWFTDGSSYVVEGKRMAGAAVVDGTRTIWASSLPEGTSAQKAELMALTQALRLAEGKSINIYTDSRYAFATAHVHGAIYKQRGLLTSAGREIKNKEEILSLLEALHLPKRLAIIHCPGHQKAKDPISRGNQMADRVAKQAAQGVNLLAGKRTADGSEFEKRTADGSEFESPKKKAKVE

SEQ ID NO: 6219 - protein, 2109 aa, synthetic construct
MPAAKRVKLDGGDKKYSIGLDIGTNSVGWAVITDEYKVPSKKFKVLGNTDRHSIKKNLIGALLFDSGETAEATRLKRTARRRYTRRKNRICYLQEIFSNEMAKVDDSFFHRLEESFLVEEDKKHERHPIFGNIVDEVAYHEKYPTIYHLRKKLVDSTDKADLRLIYLALAHMIKFRGHFLIEGDLNPDNSDVDKLFIQLVQTYNQLFEENPINASGVDAKAILSARLSKSRRLENLIAQLPGEKKNGLFGNLIALSLGLTPNFKSNFDLAEDAKLQLSKDTYDDDLDNLLAQIGDQYADLFLAAKNLSDAILLSDILRVNTEITKAPLSASMIKRYDEHHQDLTLLKALVRQQLPEKYKEIFFDQSKNGYAGYIDGGASQEEFYKFIKPILEKMDGTEELLVKLNREDLLRKQRTFDNGSIPHQIHLGELHAILRRQEDFYPFLKDNREKIEKILTFRIPYYVGPLARGNSRFAWMTRKSEETITPWNFEEVVDKGASAQSFIERMTNFDKNLPNEKVLPKHSLLYEYFTVYNELTKVKYVTEGMRKPAFLSGEQKKAIVDLLFKTNRKVTVKQLKEDYFKKIECFDSVEISGVEDRFNASLGTYHDLLKIIKDKDFLDNEENEDILEDIVLTLTLFEDREMIEERLKTYAHLFDDKVMKQLKRRRYTGWGRLSRKLINGIRDKQSGKTILDFLKSDGFANRNFMQLIHDDSLTFKEDIQKAQVSGQGDSLHEHIANLAGSPAIKKGILQTVKVVDELVKVMGRHKPENIVIEMARENQTTQKGQKNSRERMKRIEEGIKELGSQILKEHPVENTQLQNEKLYLYYLQNGRDMYVDQELDINRLSDYDVDHIVPQSFLKDDSIDNKVLTRSDKARGKSDNVPSEEVVKKMKNYWRQLLNAKLITQRKFDNLTKAERGGLSELDKAGFIKRQLVETRQITKHVAQILDSRMNTKYDENDKLIREVKVITLKSKLVSDFRKDFQFYKVREINNYHHAHDAYLNAVVGTALIKKYPKLESEFVYGDYKVYDVRKMIAKSEQEIGKATAKYFFYSNIMNFFKTEITLANGEIRKRPLIETNGETGEIVWDKGRDFATVRKVLSMPQVNIVKKTEVQTGGFSKESILPKRNSDKLIARKKDWDPKKYGGFDSPTVAYSVLVVAKVEKGKSKKLKSVKELLGITIMERSSFEKNPIDFLEAKGYKEVKKDLIIKLPKYSLFELENGRKRMLASAGELQKGNELALPSKYVNFLYLASHYEKLKGSPEDNEQKQLFVEQHKHYLDEIIEQISEFSKRVILADANLDKVLSAYNKHRDKPIREQAENIIHLFTLTNLGAPAAFKYFDTTIDRKRYTSTKEVLDATLIHQSITGLYETRIDLSQLGGDGGGGGGSGGGGSGGGGSGGGGSGGGGSGGGGSGGTLQLDDEYRLYSPLVKPDQNIQFWLEQFPQAWAETAGMGLAKQVPPQVIQLKASATPVSVRQYPLSKEAQEGIRPHVQRLIQQGILVPVQSPWNTPLLPVRKPGTNDYRPVQDLREVNKRVQDIHPTVPNPYNLLCALPPQRSWYTVLDLKDAFFCLRLHPTSQPLFAFEWRDPGTGRTGQLTWTRLPQGFKNSPTIFNEALHRDLANFRIQHPQVTLLQYVDDLLLAGATKQDCLEGTKALLLELSDLGYRASAKKAQICRREVTYLGYSLRDGQRWLTEARKKTVVQIPAPTTAKQVREFLGTAGFCRLWIPGFATLAAPLYPLTKPKGEFSWAPEHQKAFDAIKKALLSAPALALPDVTKPFTLYVDERKGVARGVLTQTLGPWRRPVAYLSKKLDPVASGWPVCLKAIAAVAILVKDADKLTLGQNITVIAPHALENIVRQPPDRWMTNARMTHYQSLLLTERVTFAPPAALNPATLLPEETDEPVTHDCHQLLIEETGVRKDLTDIPLTGEVLTWFTDGSSYVVEGKRMAGAAVVDGTRTIWASSLPEGTSAQKAELMALTQALRLAEGKSINIYTDSRYAFATAHVHGAIYKQRGWLTSAGREIKNKEEILSLLEALHLPKRLAIIHCPGHQKAKDPISRGNQMADRVAKQAAQGVNLLAGKRTADGSEFEKRTADGSEFESPKKKAKVE

SEQ ID NO: 6220 - protein, 2106 aa, synthetic construct
MPAAKRVKLDGGDKKYSIGLDIGTNSVGWAVITDEYKVPSKKFKVLGNTDRHSIKKNLIGALLFDSGETAEATRLKRTARRRYTRRKNRICYLQEIFSNEMAKVDDSFFHRLEESFLVEEDKKHERHPIFGNIVDEVAYHEKYPTIYHLRKKLVDSTDKADLRLIYLALAHMIKFRGHFLIEGDLNPDNSDVDKLFIQLVQTYNQLFEENPINASGVDAKAILSARLSKSRRLENLIAQLPGEKKNGLFGNLIALSLGLTPNFKSNFDLAEDAKLQLSKDTYDDDLDNLLAQIGDQYADLFLAAKNLSDAILLSDILRVNTEITKAPLSASMIKRYDEHHQDLTLLKALVRQQLPEKYKEIFFDQSKNGYAGYIDGGASQEEFYKFIKPILEKMDGTEELLVKLNREDLLRKQRTFDNGSIPHQIHLGELHAILRRQEDFYPFLKDNREKIEKILTFRIPYYVGPLARGNSRFAWMTRKSEETITPWNFEEVVDKGASAQSFIERMTNFDKNLPNEKVLPKHSLLYEYFTVYNELTKVKYVTEGMRKPAFLSGEQKKAIVDLLFKTNRKVTVKQLKEDYFKKIECFDSVEISGVEDRFNASLGTYHDLLKIIKDKDFLDNEENEDILEDIVLTLTLFEDREMIEERLKTYAHLFDDKVMKQLKRRRYTGWGRLSRKLINGIRDKQSGKTILDFLKSDGFANRNFMQLIHDDSLTFKEDIQKAQVSGQGDSLHEHIANLAGSPAIKKGILQTVKVVDELVKVMGRHKPENIVIEMARENQTTQKGQKNSRERMKRIEEGIKELGSQILKEHPVENTQLQNEKLYLYYLQNGRDMYVDQELDINRLSDYDVDHIVPQSFLKDDSIDNKVLTRSDKARGKSDNVPSEEVVKKMKNYWRQLLNAKLITQRKFDNLTKAERGGLSELDKAGFIKRQLVETRQITKHVAQILDSRMNTKYDENDKLIREVKVITLKSKLVSDFRKDFQFYKVREINNYHHAHDAYLNAVVGTALIKKYPKLESEFVYGDYKVYDVRKMIAKSEQEIGKATAKYFFYSNIMNFFKTEITLANGEIRKRPLIETNGETGEIVWDKGRDFATVRKVLSMPQVNIVKKTEVQTGGFSKESILPKRNSDKLIARKKDWDPKKYGGFDSPTVAYSVLVVAKVEKGKSKKLKSVKELLGITIMERSSFEKNPIDFLEAKGYKEVKKDLIIKLPKYSLFELENGRKRMLASAGELQKGNELALPSKYVNFLYLASHYEKLKGSPEDNEQKQLFVEQHKHYLDEIIEQISEFSKRVILADANLDKVLSAYNKHRDKPIREQAENIIHLFTLTNLGAPAAFKYFDTTIDRKRYTSTKEVLDATLIHQSITGLYETRIDLSQLGGDGGGGGGSGGGGSGGGGSGGGGSGGGGSGGGGSGGVPWLMKKPLQLTVLVPLHEYQERLLQQTALPKEQKELLQKLFLKYDALWQHWENQVGHRRIKPHNIATGTLAPRPQKQYPINPKAKPSIQIVIDDLLKQGVLIQQNSTMNTPVYPVPKPDGKWRMVLDYREVNKTIPLIAAQNQHSAGILSSIYRGKYKTTLDLTNGFWAHPITPESYWLTAFTWQGKQYCWTRLPQGFLNSPALFNADVVDLLKEIPNVQAYVDDIYISHDDPQEHLEQLEKIFSILLNAGYVVSLKKSEIAQREVEFLGFNITKEGRGLTDTFKQKLLNITPPKDLKQLQSILGKLNFARNFIPNYSELVKPLYTIVAPANGKFISWTEDNSNQLQHIISVLNQADNLEERNPETRLIIKVNSSPSAGYIRYYNEGSKRPIMYVNYIFSKAEAKFTQTEKLLTTMHKGLIKAMDLAMGQEILVYSPIVSMTKIQRTPLPERKALPVRWITWMTYLEDPRIQFHYDKSLPELQQIPNVTEDVIAKTKHPSEFAMVFYTDGSAIKHPDVNKSHSAGMGIAQVQFIPEYKIVHQWSIPLGDHTAQLAEIAAVEFACKKALKISGPVLIVTDSFYVAESANKELPYWKSNGFLNNKKKPLRHVSKWKSIAECLQLKPDIIIMHEKGHQQPMTTLHTEGNNLADKLATQGSYVVHAGKRTADGSEFEKRTADGSEFESPKKKAKVE

SEQ ID NO: 6221 - protein, 2195 aa, synthetic construct
MPAAKRVKLDGGDKKYSIGLDIGTNSVGWAVITDEYKVPSKKFKVLGNTDRHSIKKNLIGALLFDSGETAEATRLKRTARRRYTRRKNRICYLQEIFSNEMAKVDDSFFHRLEESFLVEEDKKHERHPIFGNIVDEVAYHEKYPTIYHLRKKLVDSTDKADLRLIYLALAHMIKFRGHFLIEGDLNPDNSDVDKLFIQLVQTYNQLFEENPINASGVDAKAILSARLSKSRRLENLIAQLPGEKKNGLFGNLIALSLGLTPNFKSNFDLAEDAKLQLSKDTYDDDLDNLLAQIGDQYADLFLAAKNLSDAILLSDILRVNTEITKAPLSASMIKRYDEHHQDLTLLKALVRQQLPEKYKEIFFDQSKNGYAGYIDGGASQEEFYKFIKPILEKMDGTEELLVKLNREDLLRKQRTFDNGSIPHQIHLGELHAILRRQEDFYPFLKDNREKIEKILTFRIPYYVGPLARGNSRFAWMTRKSEETITPWNFEEVVDKGASAQSFIERMTNFDKNLPNEKVLPKHSLLYEYFTVYNELTKVKYVTEGMRKPAFLSGEQKKAIVDLLFKTNRKVTVKQLKEDYFKKIECFDSVEISGVEDRFNASLGTYHDLLKIIKDKDFLDNEENEDILEDIVLTLTLFEDREMIEERLKTYAHLFDDKVMKQLKRRRYTGWGRLSRKLINGIRDKQSGKTILDFLKSDGFANRNFMQLIHDDSLTFKEDIQKAQVSGQGDSLHEHIANLAGSPAIKKGILQTVKVVDELVKVMGRHKPENIVIEMARENQTTQKGQKNSRERMKRIEEGIKELGSQILKEHPVENTQLQNEKLYLYYLQNGRDMYVDQELDINRLSDYDVDHIVPQSFLKDDSIDNKVLTRSDKARGKSDNVPSEEVVKKMKNYWRQLLNAKLITQRKFDNLTKAERGGLSELDKAGFIKRQLVETRQITKHVAQILDSRMNTKYDENDKLIREVKVITLKSKLVSDFRKDFQFYKVREINNYHHAHDAYLNAVVGTALIKKYPKLESEFVYGDYKVYDVRKMIAKSEQEIGKATAKYFFYSNIMNFFKTEITLANGEIRKRPLIETNGETGEIVWDKGRDFATVRKVLSMPQVNIVKKTEVQTGGFSKESILPKRNSDKLIARKKDWDPKKYGGFDSPTVAYSVLVVAKVEKGKSKKLKSVKELLGITIMERSSFEKNPIDFLEAKGYKEVKKDLIIKLPKYSLFELENGRKRMLASAGELQKGNELALPSKYVNFLYLASHYEKLKGSPEDNEQKQLFVEQHKHYLDEIIEQISEFSKRVILADANLDKVLSAYNKHRDKPIREQAENIIHLFTLTNLGAPAAFKYFDTTIDRKRYTSTKEVLDATLIHQSITGLYETRIDLSQLGGDGGGGGGSGGGGSGGGGSGGGGSGGGGSGGGGSGGMDPLQLLQPLEAEIKGTKLKAHWNSGATITCVPEAFLEDERPIQTMLIKTIHGEKQQDVYYLTFKVQGRKVEAEVLASPYDYILLNPSDVPWLMKKPLQLTVLVPLHEYQERLLQQTALPKEQKELLQKLFLKYDALWQHWENQVGHRRIKPHNIATGTLAPRPQKQYPINPKAKPSIQIVIDDLLKQGVLIQQNSTMNTPVYPVPKPDGKWRMVLDYREVNKTIPLIAAQNQHSAGILSSIYRGKYKTTLDLTNGFWAHPITPESYWLTAFTWQGKQYCWTRLPQGFLNSPALFNADVVDLLKEIPNVQAYVDDIYISHDDPQEHLEQLEKIFSILLNAGYVVSLKKSEIAQREVEFLGFNITKEGRGLTDTFKQKLLNITPPKDLKQLQSILGLLNFARNFIPNYSELVKPLYTIVAPANGKFISWTEDNSNQLQHIISVLNQADNLEERNPETRLIIKVNSSPSAGYIRYYNEGSKRPIMYVNYIFSKAEAKFTQTEKLLTTMHKGLIKAMDLAMGQEILVYSPIVSMTKIQRTPLPERKALPVRWITWMTYLEDPRIQFHYDKSLPELQQIPNVTEDVIAKTKHPSEFAMVFYTDGSAIKHPDVNKSHSAGMGIAQVQFIPEYKIVHQWSIPLGDHTAQLAEIAAVEFACKKALKISGPVLIVTDSFYVAESANKELPYWKSNGFLNNKKKPLRHVSKWKSIAECLQLKPDIIIMHEKGHQQPMTTLHTEGNNLADKLATQGSYVVHAGKRTADGSEFEKRTADGSEFESPKKKAKVE

SEQ ID NO: 6222 - protein, 2195 aa, synthetic construct
MPAAKRVKLDGGDKKYSIGLDIGTNSVGWAVITDEYKVPSKKFKVLGNTDRHSIKKNLIGALLFDSGETAEATRLKRTARRRYTRRKNRICYLQEIFSNEMAKVDDSFFHRLEESFLVEEDKKHERHPIFGNIVDEVAYHEKYPTIYHLRKKLVDSTDKADLRLIYLALAHMIKFRGHFLIEGDLNPDNSDVDKLFIQLVQTYNQLFEENPINASGVDAKAILSARLSKSRRLENLIAQLPGEKKNGLFGNLIALSLGLTPNFKSNFDLAEDAKLQLSKDTYDDDLDNLLAQIGDQYADLFLAAKNLSDAILLSDILRVNTEITKAPLSASMIKRYDEHHQDLTLLKALVRQQLPEKYKEIFFDQSKNGYAGYIDGGASQEEFYKFIKPILEKMDGTEELLVKLNREDLLRKQRTFDNGSIPHQIHLGELHAILRRQEDFYPFLKDNREKIEKILTFRIPYYVGPLARGNSRFAWMTRKSEETITPWNFEEVVDKGASAQSFIERMTNFDKNLPNEKVLPKHSLLYEYFTVYNELTKVKYVTEGMRKPAFLSGEQKKAIVDLLFKTNRKVTVKQLKEDYFKKIECFDSVEISGVEDRFNASLGTYHDLLKIIKDKDFLDNEENEDILEDIVLTLTLFEDREMIEERLKTYAHLFDDKVMKQLKRRRYTGWGRLSRKLINGIRDKQSGKTILDFLKSDGFANRNFMQLIHDDSLTFKEDIQKAQVSGQGDSLHEHIANLAGSPAIKKGILQTVKVVDELVKVMGRHKPENIVIEMARENQTTQKGQKNSRERMKRIEEGIKELGSQILKEHPVENTQLQNEKLYLYYLQNGRDMYVDQELDINRLSDYDVDHIVPQSFLKDDSIDNKVLTRSDKARGKSDNVPSEEVVKKMKNYWRQLLNAKLITQRKFDNLTKAERGGLSELDKAGFIKRQLVETRQITKHVAQILDSRMNTKYDENDKLIREVKVITLKSKLVSDFRKDFQFYKVREINNYHHAHDAYLNAVVGTALIKKYPKLESEFVYGDYKVYDVRKMIAKSEQEIGKATAKYFFYSNIMNFFKTEITLANGEIRKRPLIETNGETGEIVWDKGRDFATVRKVLSMPQVNIVKKTEVQTGGFSKESILPKRNSDKLIARKKDWDPKKYGGFDSPTVAYSVLVVAKVEKGKSKKLKSVKELLGITIMERSSFEKNPIDFLEAKGYKEVKKDLIIKLPKYSLFELENGRKRMLASAGELQKGNELALPSKYVNFLYLASHYEKLKGSPEDNEQKQLFVEQHKHYLDEIIEQISEFSKRVILADANLDKVLSAYNKHRDKPIREQAENIIHLFTLTNLGAPAAFKYFDTTIDRKRYTSTKEVLDATLIHQSITGLYETRIDLSQLGGDGGGGGGSGGGGSGGGGSGGGGSGGGGSGGGGSGGMDPLQLLQPLEAEIKGTKLKAHWNSGATITCVPQAFLEEEVPIKNIWIKTIHGEKEQPVYYLTFKIQGRKVEAEVISSPYDYILVSPSDIPWLMKKPLQLTTLVPLQEYEERLLKQTMLTGSYKEKLQSLFLKYDALWQHWENQVGHRRIKPHHIATGTVNPRPQKQYPINPKAKASIQTVINDLLKQGVLIQQNSIMNTPVYPVPKPDGKWRMVLDYREVNKTIPLIAAQNQHSAGILSSIFRGKYKTTLDLSNGFWAHSITPESYWLTAFTWLGQQYCWTRLPQGFLNSPALFTADVVDLLKEVPNVQVYVDDIYISHDDPREHLEQLEKVFSLLLNAGYVVSLKKSEIAQHEVEFLGFNITKEGRGLTETFKQKLLNITPPRDLKQLQSILGLLNFARNFIPNFSELVKPLYNIIATANGKYITWTTDNSQQLQNIISMLNSAENLEERNPEVRLIMKVNTSPSAGYIRFYNEFAKRPIMYLNYVYTKAEVKFTNTEKLLTTIHKGLIKALDLGMGQEILVYSPIVSMTKIQKTPLPERKALPIRWITWMSYLEDPRIQFHYDKTLPELQQVPTVTDDIIAKIKHPSEFSMVFYTDGSAIKHPNVNKSHNAGMGIAQVQFKPEFTVINTWSIPLGDHTAQLAEVAAVEFACKKALKIDGPVLIVTDSFYVAESVNKELPYWQSNGFFNNKKKPLKHVSKWKSIADCIQLKPDIIIIHEKGHQPTASTFHTEGNNLADKLATQGSYVVNAGKRTADGSEFEKRTADGSEFESPKKKAKVE

SEQ ID NO: 6223 - protein, 2106 aa, synthetic construct
MPAAKRVKLDGGDKKYSIGLDIGTNSVGWAVITDEYKVPSKKFKVLGNTDRHSIKKNLIGALLFDSGETAEATRLKRTARRRYTRRKNRICYLQEIFSNEMAKVDDSFFHRLEESFLVEEDKKHERHPIFGNIVDEVAYHEKYPTIYHLRKKLVDSTDKADLRLIYLALAHMIKFRGHFLIEGDLNPDNSDVDKLFIQLVQTYNQLFEENPINASGVDAKAILSARLSKSRRLENLIAQLPGEKKNGLFGNLIALSLGLTPNFKSNFDLAEDAKLQLSKDTYDDDLDNLLAQIGDQYADLFLAAKNLSDAILLSDILRVNTEITKAPLSASMIKRYDEHHQDLTLLKALVRQQLPEKYKEIFFDQSKNGYAGYIDGGASQEEFYKFIKPILEKMDGTEELLVKLNREDLLRKQRTFDNGSIPHQIHLGELHAILRRQEDFYPFLKDNREKIEKILTFRIPYYVGPLARGNSRFAWMTRKSEETITPWNFEEVVDKGASAQSFIERMTNFDKNLPNEKVLPKHSLLYEYFTVYNELTKVKYVTEGMRKPAFLSGEQKKAIVDLLFKTNRKVTVKQLKEDYFKKIECFDSVEISGVEDRFNASLGTYHDLLKIIKDKDFLDNEENEDILEDIVLTLTLFEDREMIEERLKTYAHLFDDKVMKQLKRRRYTGWGRLSRKLINGIRDKQSGKTILDFLKSDGFANRNFMQLIHDDSLTFKEDIQKAQVSGQGDSLHEHIANLAGSPAIKKGILQTVKVVDELVKVMGRHKPENIVIEMARENQTTQKGQKNSRERMKRIEEGIKELGSQILKEHPVENTQLQNEKLYLYYLQNGRDMYVDQELDINRLSDYDVDHIVPQSFLKDDSIDNKVLTRSDKARGKSDNVPSEEVVKKMKNYWRQLLNAKLITQRKFDNLTKAERGGLSELDKAGFIKRQLVETRQITKHVAQILDSRMNTKYDENDKLIREVKVITLKSKLVSDFRKDFQFYKVREINNYHHAHDAYLNAVVGTALIKKYPKLESEFVYGDYKVYDVRKMIAKSEQEIGKATAKYFFYSNIMNFFKTEITLANGEIRKRPLIETNGETGEIVWDKGRDFATVRKVLSMPQVNIVKKTEVQTGGFSKESILPKRNSDKLIARKKDWDPKKYGGFDSPTVAYSVLVVAKVEKGKSKKLKSVKELLGITIMERSSFEKNPIDFLEAKGYKEVKKDLIIKLPKYSLFELENGRKRMLASAGELQKGNELALPSKYVNFLYLASHYEKLKGSPEDNEQKQLFVEQHKHYLDEIIEQISEFSKRVILADANLDKVLSAYNKHRDKPIREQAENIIHLFTLTNLGAPAAFKYFDTTIDRKRYTSTKEVLDATLIHQSITGLYETRIDLSQLGGDGGGGGGSGGGGSGGGGSGGGGSGGGGSGGGGSGGIPWLMKKPLQLTTLVPLQEYEERLLKQTMLTGSYKEKLQSLFLKYDALWQHWENQVGHRRIKPHHIATGTVNPRPQKQYPINPKAKASIQTVINDLLKQGVLIQQNSIMNTPVYPVPKPDGKWRMVLDYREVNKTIPLIAAQNQHSAGILSSIFRGKYKTTLDLSNGFWAHSITPESYWLTAFTWLGQQYCWTRLPQGFLNSPALFNADVVDLLKEVPNVQVYVDDIYISHDDPREHLEQLEKVFSLLLNAGYVVSLKKSEIAQHEVEFLGFNITKEGRGLTETFKQKLLNITPPRDLKQLQSILGKLNFARNFIPNFSELVKPLYNIIATAPGKYITWTTDNSQQLQNIISMLNSAENLEERNPEVRLIMKVNTSPSAGYIRFYNEFAKRPIMYLNYVYTKAEVKFTNTEKLLTTIHKGLIKALDLGMGQEILVYSPIVSMTKIQKTPLPERKALPIRWITWMSYLEDPRIQFHYDKTLPELQQVPTVTDDIIAKIKHPSEFSMVFYTDGSAIKHPNVNKSHNAGMGIAQVQFKPEFTVINTWSIPLGDHTAQLAEVAAVEFACKKALKIDGPVLIVTDSFYVAESVNKELPYWQSNGFFNNKKKPLKHVSKWKSIADCIQLKPDIIIIHEKGHQPTASTFHTEGNNLADKLATQGSYVVNAGKRTADGSEFEKRTADGSEFESPKKKAKVE

SEQ ID NO: 6224 - protein, 2106 aa, synthetic construct
MPAAKRVKLDGGDKKYSIGLDIGTNSVGWAVITDEYKVPSKKFKVLGNTDRHSIKKNLIGALLFDSGETAEATRLKRTARRRYTRRKNRICYLQEIFSNEMAKVDDSFFHRLEESFLVEEDKKHERHPIFGNIVDEVAYHEKYPTIYHLRKKLVDSTDKADLRLIYLALAHMIKFRGHFLIEGDLNPDNSDVDKLFIQLVQTYNQLFEENPINASGVDAKAILSARLSKSRRLENLIAQLPGEKKNGLFGNLIALSLGLTPNFKSNFDLAEDAKLQLSKDTYDDDLDNLLAQIGDQYADLFLAAKNLSDAILLSDILRVNTEITKAPLSASMIKRYDEHHQDLTLLKALVRQQLPEKYKEIFFDQSKNGYAGYIDGGASQEEFYKFIKPILEKMDGTEELLVKLNREDLLRKQRTFDNGSIPHQIHLGELHAILRRQEDFYPFLKDNREKIEKILTFRIPYYVGPLARGNSRFAWMTRKSEETITPWNFEEVVDKGASAQSFIERMTNFDKNLPNEKVLPKHSLLYEYFTVYNELTKVKYVTEGMRKPAFLSGEQKKAIVDLLFKTNRKVTVKQLKEDYFKKIECFDSVEISGVEDRFNASLGTYHDLLKIIKDKDFLDNEENEDILEDIVLTLTLFEDREMIEERLKTYAHLFDDKVMKQLKRRRYTGWGRLSRKLINGIRDKQSGKTILDFLKSDGFANRNFMQLIHDDSLTFKEDIQKAQVSGQGDSLHEHIANLAGSPAIKKGILQTVKVVDELVKVMGRHKPENIVIEMARENQTTQKGQKNSRERMKRIEEGIKELGSQILKEHPVENTQLQNEKLYLYYLQNGRDMYVDQELDINRLSDYDVDHIVPQSFLKDDSIDNKVLTRSDKARGKSDNVPSEEVVKKMKNYWRQLLNAKLITQRKFDNLTKAERGGLSELDKAGFIKRQLVETRQITKHVAQILDSRMNTKYDENDKLIREVKVITLKSKLVSDFRKDFQFYKVREINNYHHAHDAYLNAVVGTALIKKYPKLESEFVYGDYKVYDVRKMIAKSEQEIGKATAKYFFYSNIMNFFKTEITLANGEIRKRPLIETNGETGEIVWDKGRDFATVRKVLSMPQVNIVKKTEVQTGGFSKESILPKRNSDKLIARKKDWDPKKYGGFDSPTVAYSVLVVAKVEKGKSKKLKSVKELLGITIMERSSFEKNPIDFLEAKGYKEVKKDLIIKLPKYSLFELENGRKRMLASAGELQKGNELALPSKYVNFLYLASHYEKLKGSPEDNEQKQLFVEQHKHYLDEIIEQISEFSKRVILADANLDKVLSAYNKHRDKPIREQAENIIHLFTLTNLGAPAAFKYFDTTIDRKRYTSTKEVLDATLIHQSITGLYETRIDLSQLGGDGGGGGGSGGGGSGGGGSGGGGSGGGGSGGGGSGGVPWLTQQPLQLTILVPLQEYQDRILNKTALPEEQKQQLKALFTKYDNLWQHWENQVGHRKIRPHNIATGDYPPRPQKQYPINPKAKPSIQIVIDDLLKQGVLTPQNSTMNTPVYPVPKPDGRWRMVLDYREVNKTIPLTAAQNQHSAGILATIVRQKYKTTLDLANGFWAHPITPDSYWLTAFTWQGKQYCWTRLPQGFLNSPALFNADAVDLLKEVPNVQVYVDDIYLSHDNPHEHIQQLEKVFQILLQAGYVVSLKKSEIGQRTVEFLGFNITKEGRGLTDTFKTKLLNVTPPKDLKQLQSILGKLNFARNFIPNFAELVQTLYNLIASSPGKYIEWTEDNTKQLNKVIEALNTASNLEERLPDQRLVIKVNTSPSAGYVRYYNESGKKPIMYLNYVFSKAELKFSMLEKLLTTMHKALIKAMDLAMGQEILVYSPIVSMTKIQKTPLPERKALPIRWITWMTYLEDPRIQFHYDKTLPELKHIPDVYTSSIPPLKHPSQYEGVFCTDGSAIKSPDPTKSNNAGMGIVHAIYNPEYKILNQWSIPLGHHTAQMAEIAAVEFACKKALKVPGPVLVITDSFYVAESANKELPYWKSNGFVNNKKEPLKHISKWKSIAECLSIKPDITIQHEKGHQPINTSIHTEGNALADKLATQGSYVVNAGKRTADGSEFEKRTADGSEFESPKKKAKVE

SEQ ID NO: 6225 - protein, 2113 aa, synthetic construct
MPAAKRVKLDGGDKKYSIGLDIGTNSVGWAVITDEYKVPSKKFKVLGNTDRHSIKKNLIGALLFDSGETAEATRLKRTARRRYTRRKNRICYLQEIFSNEMAKVDDSFFHRLEESFLVEEDKKHERHPIFGNIVDEVAYHEKYPTIYHLRKKLVDSTDKADLRLIYLALAHMIKFRGHFLIEGDLNPDNSDVDKLFIQLVQTYNQLFEENPINASGVDAKAILSARLSKSRRLENLIAQLPGEKKNGLFGNLIALSLGLTPNFKSNFDLAEDAKLQLSKDTYDDDLDNLLAQIGDQYADLFLAAKNLSDAILLSDILRVNTEITKAPLSASMIKRYDEHHQDLTLLKALVRQQLPEKYKEIFFDQSKNGYAGYIDGGASQEEFYKFIKPILEKMDGTEELLVKLNREDLLRKQRTFDNGSIPHQIHLGELHAILRRQEDFYPFLKDNREKIEKILTFRIPYYVGPLARGNSRFAWMTRKSEETITPWNFEEVVDKGASAQSFIERMTNFDKNLPNEKVLPKHSLLYEYFTVYNELTKVKYVTEGMRKPAFLSGEQKKAIVDLLFKTNRKVTVKQLKEDYFKKIECFDSVEISGVEDRFNASLGTYHDLLKIIKDKDFLDNEENEDILEDIVLTLTLFEDREMIEERLKTYAHLFDDKVMKQLKRRRYTGWGRLSRKLINGIRDKQSGKTILDFLKSDGFANRNFMQLIHDDSLTFKEDIQKAQVSGQGDSLHEHIANLAGSPAIKKGILQTVKVVDELVKVMGRHKPENIVIEMARENQTTQKGQKNSRERMKRIEEGIKELGSQILKEHPVENTQLQNEKLYLYYLQNGRDMYVDQELDINRLSDYDVDHIVPQSFLKDDSIDNKVLTRSDKARGKSDNVPSEEVVKKMKNYWRQLLNAKLITQRKFDNLTKAERGGLSELDKAGFIKRQLVETRQITKHVAQILDSRMNTKYDENDKLIREVKVITLKSKLVSDFRKDFQFYKVREINNYHHAHDAYLNAVVGTALIKKYPKLESEFVYGDYKVYDVRKMIAKSEQEIGKATAKYFFYSNIMNFFKTEITLANGEIRKRPLIETNGETGEIVWDKGRDFATVRKVLSMPQVNIVKKTEVQTGGFSKESILPKRNSDKLIARKKDWDPKKYGGFDSPTVAYSVLVVAKVEKGKSKKLKSVKELLGITIMERSSFEKNPIDFLEAKGYKEVKKDLIIKLPKYSLFELENGRKRMLASAGELQKGNELALPSKYVNFLYLASHYEKLKGSPEDNEQKQLFVEQHKHYLDEIIEQISEFSKRVILADANLDKVLSAYNKHRDKPIREQAENIIHLFTLTNLGAPAAFKYFDTTIDRKRYTSTKEVLDATLIHQSITGLYETRIDLSQLGGDGGGGGGSGGGGSGGGGSGGGGSGGGGSGGGGSGGVLNLEEEYRLHEKPVPSSIDPSWLQLFPTVWAERAGMGLANQVPPVVVELRSGASPVAVRQYPMSKEAREGIRPHIQRFLDLGVLVPCQSPWNTPLLPVKKPGTNDYRPVQDLREINKRVQDIHPTVPNPYNLLSSLPPSHTWYSVLDLKDAFFCLKLHPNSQPLFAFEWRDPEKGNTGQLTWTRLPQGFKNSPTLFNEALHRDLAPFRALNPQVVLLQYVDDLLVAAPTYRDCKEGTQKLLQELSKLGYRVSAKKAQLCQKEVTYLGYLLKEGKRWLTPARKATVMKIPPPTTPRQVREFLGTAGFCRLWIPGFASLAAPLYPLTKPSIPFIWTEEHQKAFDRIKEALLSAPALALPDLTKPFTLYVDERAGVARGVLTQTLGPWRRPVAYLSKKLDPVASGWPTCLKAVAAVALLLKDADKLTLGQNVTVIASHSLESIVRQPPDRWMTNARMTHYQSLLLNERVSFAPPAVLNPATLLPVESEATPVHRCSEILAEETGTRRDLKDQPLPGVPAWYTDGSSFIAEGKRRAGAAIVDGKRTVWASSLPEGTSAQKAELVALTQALRLAEGKDINIYTDSRYAFATAHIHGAIYKQRGWLTSAGKDIKNKEEILALLEAIHLPKRVAIIHCPGHQKGNDPVATGNRRADEAAKQAALSTRVLAETTKPAGKRTADGSEFEKRTADGSEFESPKKKAKVE

SEQ ID NO: 6226 - protein, 2113 aa, synthetic construct
MPAAKRVKLDGGDKKYSIGLDIGTNSVGWAVITDEYKVPSKKFKVLGNTDRHSIKKNLIGALLFDSGETAEATRLKRTARRRYTRRKNRICYLQEIFSNEMAKVDDSFFHRLEESFLVEEDKKHERHPIFGNIVDEVAYHEKYPTIYHLRKKLVDSTDKADLRLIYLALAHMIKFRGHFLIEGDLNPDNSDVDKLFIQLVQTYNQLFEENPINASGVDAKAILSARLSKSRRLENLIAQLPGEKKNGLFGNLIALSLGLTPNFKSNFDLAEDAKLQLSKDTYDDDLDNLLAQIGDQYADLFLAAKNLSDAILLSDILRVNTEITKAPLSASMIKRYDEHHQDLTLLKALVRQQLPEKYKEIFFDQSKNGYAGYIDGGASQEEFYKFIKPILEKMDGTEELLVKLNREDLLRKQRTFDNGSIPHQIHLGELHAILRRQEDFYPFLKDNREKIEKILTFRIPYYVGPLARGNSRFAWMTRKSEETITPWNFEEVVDKGASAQSFIERMTNFDKNLPNEKVLPKHSLLYEYFTVYNELTKVKYVTEGMRKPAFLSGEQKKAIVDLLFKTNRKVTVKQLKEDYFKKIECFDSVEISGVEDRFNASLGTYHDLLKIIKDKDFLDNEENEDILEDIVLTLTLFEDREMIEERLKTYAHLFDDKVMKQLKRRRYTGWGRLSRKLINGIRDKQSGKTILDFLKSDGFANRNFMQLIHDDSLTFKEDIQKAQVSGQGDSLHEHIANLAGSPAIKKGILQTVKVVDELVKVMGRHKPENIVIEMARENQTTQKGQKNSRERMKRIEEGIKELGSQILKEHPVENTQLQNEKLYLYYLQNGRDMYVDQELDINRLSDYDVDHIVPQSFLKDDSIDNKVLTRSDKARGKSDNVPSEEVVKKMKNYWRQLLNAKLITQRKFDNLTKAERGGLSELDKAGFIKRQLVETRQITKHVAQILDSRMNTKYDENDKLIREVKVITLKSKLVSDFRKDFQFYKVREINNYHHAHDAYLNAVVGTALIKKYPKLESEFVYGDYKVYDVRKMIAKSEQEIGKATAKYFFYSNIMNFFKTEITLANGEIRKRPLIETNGETGEIVWDKGRDFATVRKVLSMPQVNIVKKTEVQTGGFSKESILPKRNSDKLIARKKDWDPKKYGGFDSPTVAYSVLVVAKVEKGKSKKLKSVKELLGITIMERSSFEKNPIDFLEAKGYKEVKKDLIIKLPKYSLFELENGRKRMLASAGELQKGNELALPSKYVNFLYLASHYEKLKGSPEDNEQKQLFVEQHKHYLDEIIEQISEFSKRVILADANLDKVLSAYNKHRDKPIREQAENIIHLFTLTNLGAPAAFKYFDTTIDRKRYTSTKEVLDATLIHQSITGLYETRIDLSQLGGDGGGGGGSGGGGSGGGGSGGGGSGGGGSGGGGSGGVLNLEEEYRLHEKPVPSSIDPSWLQLFPTVWAERAGMGLANQVPPVVVELRSGASPVAVRQYPMSKEAREGIRPHIQRFLDLGVLVPCQSPWNTPLLPVKKPGTNDYRPVQDLREINKRVQDIHPTVPNPYNLLSSLPPSHTWYSVLDLKDAFFCLKLHPNSQPLFAFEWRDPEKGNTGQLTWTRLPQGFKNSPTLFNEALHRDLAPFRALNPQVVLLQYVDDLLVAAPTYRDCKEGTQKLLQELSKLGYRVSAKKAQLCQKEVTYLGYLLKEGKRWLTPARKATVMKIPPPTTPRQVREFLGKAGFCRLFIPGFASLAAPLYPLTKPSIPFIWTEEHQKAFDRIKEALLSAPALALPDLTKPFTLYVDERAGVARGVLTQTLGPWRRPVAYLSKKLDPVASGWPTCLKAVAAVALLLKDADKLTLGQNVTVIASHSLESIVRQPPDRWMTNARMTHYQSLLLNERVSFAPPAVLNPATLLPVESEATPVHRCSEILAEETGTRRDLKDQPLPGVPAWYTDGSSFIAEGKRRAGAAIVDGKRTVWASSLPEGTSAQKAELVALTQALRLAEGKDINIYTDSRYAFATAHIHGAIYKQRGWLTSAGKDIKNKEEILALLEAIHLPKRVAIIHCPGHQKGNDPVATGNRRADEAAKQAALSTRVLAETTKPAGKRTADGSEFEKRTADGSEFESPKKKAKVE

SEQ ID NO: 6227 - protein, 2090 aa, synthetic construct
MPAAKRVKLDGGDKKYSIGLDIGTNSVGWAVITDEYKVPSKKFKVLGNTDRHSIKKNLIGALLFDSGETAEATRLKRTARRRYTRRKNRICYLQEIFSNEMAKVDDSFFHRLEESFLVEEDKKHERHPIFGNIVDEVAYHEKYPTIYHLRKKLVDSTDKADLRLIYLALAHMIKFRGHFLIEGDLNPDNSDVDKLFIQLVQTYNQLFEENPINASGVDAKAILSARLSKSRRLENLIAQLPGEKKNGLFGNLIALSLGLTPNFKSNFDLAEDAKLQLSKDTYDDDLDNLLAQIGDQYADLFLAAKNLSDAILLSDILRVNTEITKAPLSASMIKRYDEHHQDLTLLKALVRQQLPEKYKEIFFDQSKNGYAGYIDGGASQEEFYKFIKPILEKMDGTEELLVKLNREDLLRKQRTFDNGSIPHQIHLGELHAILRRQEDFYPFLKDNREKIEKILTFRIPYYVGPLARGNSRFAWMTRKSEETITPWNFEEVVDKGASAQSFIERMTNFDKNLPNEKVLPKHSLLYEYFTVYNELTKVKYVTEGMRKPAFLSGEQKKAIVDLLFKTNRKVTVKQLKEDYFKKIECFDSVEISGVEDRFNASLGTYHDLLKIIKDKDFLDNEENEDILEDIVLTLTLFEDREMIEERLKTYAHLFDDKVMKQLKRRRYTGWGRLSRKLINGIRDKQSGKTILDFLKSDGFANRNFMQLIHDDSLTFKEDIQKAQVSGQGDSLHEHIANLAGSPAIKKGILQTVKVVDELVKVMGRHKPENIVIEMARENQTTQKGQKNSRERMKRIEEGIKELGSQILKEHPVENTQLQNEKLYLYYLQNGRDMYVDQELDINRLSDYDVDHIVPQSFLKDDSIDNKVLTRSDKARGKSDNVPSEEVVKKMKNYWRQLLNAKLITQRKFDNLTKAERGGLSELDKAGFIKRQLVETRQITKHVAQILDSRMNTKYDENDKLIREVKVITLKSKLVSDFRKDFQFYKVREINNYHHAHDAYLNAVVGTALIKKYPKLESEFVYGDYKVYDVRKMIAKSEQEIGKATAKYFFYSNIMNFFKTEITLANGEIRKRPLIETNGETGEIVWDKGRDFATVRKVLSMPQVNIVKKTEVQTGGFSKESILPKRNSDKLIARKKDWDPKKYGGFDSPTVAYSVLVVAKVEKGKSKKLKSVKELLGITIMERSSFEKNPIDFLEAKGYKEVKKDLIIKLPKYSLFELENGRKRMLASAGELQKGNELALPSKYVNFLYLASHYEKLKGSPEDNEQKQLFVEQHKHYLDEIIEQISEFSKRVILADANLDKVLSAYNKHRDKPIREQAENIIHLFTLTNLGAPAAFKYFDTTIDRKRYTSTKEVLDATLIHQSITGLYETRIDLSQLGGDGGGGGGGTAPLEEEYRLFLEAPIQNVTLLEQWKREIPKVWAEINPPGLASTQAPIHVQLLSTALPVRVRQYPITLEAKRSLRETIRKFRAAGILRPVHSPWNTPLLPVRKSGTSEYRMVQDLREVNKRVETIHPTVPNPYTLLSLLPPDRIWYSVLDLKDAFFCIPLAPESQLIFAFEWADAEEGESGQLTWTRLPQGFKNSPTLFNEALNRDLQGFRLDHPSVSLLQYVDDLLIAADTQAACLSATRDLLMTLAELGYRVSGKKAQLCQEEVTYLGFKIHKGSRSLSNSRTQAILQIPVPKTKRQVREFLGTIGYCRLWIPGFAELAQPLYAATRPGNDPLVWGEKEEEAFQSLKLALTQPPALALPSLDKPFQLFVEETSGAAKGVLTQALGPWKRPVAYLSKRLDPVAAGWPRCLRAIAAAALLTREASKLTFGQDIEITSSHNLESLLRSPPDKWLTNARITQYQVLLLDPPRVRFKQTAALNPATLLPETDDTLPIHHCLDTLDSLTSTRPDLTDQPLAQAEATLFTDGSSYIRDGKRYAGAAVVTLDSVIWAEPLPIGTSAQKAELIALTKALEWSKDKSVNIYTDSRYAFATLHVHGMIYRERGWLTAGGKAIKNAPEILALLTAVWLPKRVAVMHCKGHQKDDAPTSTGNRRADEVAREVAIRPLSTQATISAGKRTADGSEFEKRTADGSEFESPKKKAKVE

SEQ ID NO: 6228 - protein, 2094 aa, synthetic construct
MPAAKRVKLDGGDKKYSIGLDIGTNSVGWAVITDEYKVPSKKFKVLGNTDRHSIKKNLIGALLFDSGETAEATRLKRTARRRYTRRKNRICYLQEIFSNEMAKVDDSFFHRLEESFLVEEDKKHERHPIFGNIVDEVAYHEKYPTIYHLRKKLVDSTDKADLRLIYLALAHMIKFRGHFLIEGDLNPDNSDVDKLFIQLVQTYNQLFEENPINASGVDAKAILSARLSKSRRLENLIAQLPGEKKNGLFGNLIALSLGLTPNFKSNFDLAEDAKLQLSKDTYDDDLDNLLAQIGDQYADLFLAAKNLSDAILLSDILRVNTEITKAPLSASMIKRYDEHHQDLTLLKALVRQQLPEKYKEIFFDQSKNGYAGYIDGGASQEEFYKFIKPILEKMDGTEELLVKLNREDLLRKQRTFDNGSIPHQIHLGELHAILRRQEDFYPFLKDNREKIEKILTFRIPYYVGPLARGNSRFAWMTRKSEETITPWNFEEVVDKGASAQSFIERMTNFDKNLPNEKVLPKHSLLYEYFTVYNELTKVKYVTEGMRKPAFLSGEQKKAIVDLLFKTNRKVTVKQLKEDYFKKIECFDSVEISGVEDRFNASLGTYHDLLKIIKDKDFLDNEENEDILEDIVLTLTLFEDREMIEERLKTYAHLFDDKVMKQLKRRRYTGWGRLSRKLINGIRDKQSGKTILDFLKSDGFANRNFMQLIHDDSLTFKEDIQKAQVSGQGDSLHEHIANLAGSPAIKKGILQTVKVVDELVKVMGRHKPENIVIEMARENQTTQKGQKNSRERMKRIEEGIKELGSQILKEHPVENTQLQNEKLYLYYLQNGRDMYVDQELDINRLSDYDVDHIVPQSFLKDDSIDNKVLTRSDKARGKSDNVPSEEVVKKMKNYWRQLLNAKLITQRKFDNLTKAERGGLSELDKAGFIKRQLVETRQITKHVAQILDSRMNTKYDENDKLIREVKVITLKSKLVSDFRKDFQFYKVREINNYHHAHDAYLNAVVGTALIKKYPKLESEFVYGDYKVYDVRKMIAKSEQEIGKATAKYFFYSNIMNFFKTEITLANGEIRKRPLIETNGETGEIVWDKGRDFATVRKVLSMPQVNIVKKTEVQTGGFSKESILPKRNSDKLIARKKDWDPKKYGGFDSPTVAYSVLVVAKVEKGKSKKLKSVKELLGITIMERSSFEKNPIDFLEAKGYKEVKKDLIIKLPKYSLFELENGRKRMLASAGELQKGNELALPSKYVNFLYLASHYEKLKGSPEDNEQKQLFVEQHKHYLDEIIEQISEFSKRVILADANLDKVLSAYNKHRDKPIREQAENIIHLFTLTNLGAPAAFKYFDTTIDRKRYTSTKEVLDATLIHQSITGLYETRIDLSQLGGDGGGGGGGTVSLQDEHRLFDIPVTTSLPDVWLQDFPQAWAETGGLGRAKCQAPIIIDLKPTAVPVSIKQYPMSLEAHMGIRQHIIKFLELGVLRPCRSPWNTPLLPVKKPGTQDYRPVQDLREINKRTVDIHPTVPNPYNLLSTLKPDYSWYTVLDLKDAFFCLPLAPQSQELFAFEWKDPERGISGQLTWTRLPQGFKNSPTLFNEALHRDLTDFRTQHPEVTLLQYVDDLLLAAPTKKACTQGTRHLLQELGEKGYRASAKKAQICQTKVTYLGYILSEGKRWLTPGRIETVARIPPPRNPREVREFLGTAGFCRLWIPGFAELAAPLYALTKPSTPFTWQTEHQLAFEALKKALLSAPALGLPDTSKPFTLFLDERQGIAKGVLTQKLGPWKRPVAYLSKKLDPVAAGWPPCLRIMAATAMLVKDSAKLTLGQPLTVITPHTLEAIVRQPPDRWITNARLTHYQALLLDTDRVQFGPPVTLNPATLLPVPENQPSPHDCRQVLAETHGTREDLKDQELPDADHTWYTDGSSYLDSGTRRAGAAVVDGHNTIWAQSLPPGTSAQKAELIALTKALELSKGKKANIYTDSRYAFATAHTHGSIYERRGWLTSEGKEIKNKAEIIALLKALFLPQEVAIIHCPGHQKGQDPVAVGNRQADRVARQAAMAEVLTLATEPDNTSHITAGKRTADGSEFEKRTADGSEFESPKKKAKVE

SEQ ID NO: 6229 - protein, 2094 aa, synthetic construct
MPAAKRVKLDGGDKKYSIGLDIGTNSVGWAVITDEYKVPSKKFKVLGNTDRHSIKKNLIGALLFDSGETAEATRLKRTARRRYTRRKNRICYLQEIFSNEMAKVDDSFFHRLEESFLVEEDKKHERHPIFGNIVDEVAYHEKYPTIYHLRKKLVDSTDKADLRLIYLALAHMIKFRGHFLIEGDLNPDNSDVDKLFIQLVQTYNQLFEENPINASGVDAKAILSARLSKSRRLENLIAQLPGEKKNGLFGNLIALSLGLTPNFKSNFDLAEDAKLQLSKDTYDDDLDNLLAQIGDQYADLFLAAKNLSDAILLSDILRVNTEITKAPLSASMIKRYDEHHQDLTLLKALVRQQLPEKYKEIFFDQSKNGYAGYIDGGASQEEFYKFIKPILEKMDGTEELLVKLNREDLLRKQRTFDNGSIPHQIHLGELHAILRRQEDFYPFLKDNREKIEKILTFRIPYYVGPLARGNSRFAWMTRKSEETITPWNFEEVVDKGASAQSFIERMTNFDKNLPNEKVLPKHSLLYEYFTVYNELTKVKYVTEGMRKPAFLSGEQKKAIVDLLFKTNRKVTVKQLKEDYFKKIECFDSVEISGVEDRFNASLGTYHDLLKIIKDKDFLDNEENEDILEDIVLTLTLFEDREMIEERLKTYAHLFDDKVMKQLKRRRYTGWGRLSRKLINGIRDKQSGKTILDFLKSDGFANRNFMQLIHDDSLTFKEDIQKAQVSGQGDSLHEHIANLAGSPAIKKGILQTVKVVDELVKVMGRHKPENIVIEMARENQTTQKGQKNSRERMKRIEEGIKELGSQILKEHPVENTQLQNEKLYLYYLQNGRDMYVDQELDINRLSDYDVDHIVPQSFLKDDSIDNKVLTRSDKARGKSDNVPSEEVVKKMKNYWRQLLNAKLITQRKFDNLTKAERGGLSELDKAGFIKRQLVETRQITKHVAQILDSRMNTKYDENDKLIREVKVITLKSKLVSDFRKDFQFYKVREINNYHHAHDAYLNAVVGTALIKKYPKLESEFVYGDYKVYDVRKMIAKSEQEIGKATAKYFFYSNIMNFFKTEITLANGEIRKRPLIETNGETGEIVWDKGRDFATVRKVLSMPQVNIVKKTEVQTGGFSKESILPKRNSDKLIARKKDWDPKKYGGFDSPTVAYSVLVVAKVEKGKSKKLKSVKELLGITIMERSSFEKNPIDFLEAKGYKEVKKDLIIKLPKYSLFELENGRKRMLASAGELQKGNELALPSKYVNFLYLASHYEKLKGSPEDNEQKQLFVEQHKHYLDEIIEQISEFSKRVILADANLDKVLSAYNKHRDKPIREQAENIIHLFTLTNLGAPAAFKYFDTTIDRKRYTSTKEVLDATLIHQSITGLYETRIDLSQLGGDGGGGGGGTVSLQDEHRLFDIPVTTSLPDVWLQDFPQAWAETGGLGRAKCQAPIIIDLKPTAVPVSIKQYPMSLEAHMGIRQHIIKFLELGVLRPCRSPWNTPLLPVKKPGTQDYRPVQDLREINKRTVDIHPTVPNPYNLLSTLKPDYSWYTVLDLKDAFFCLPLAPQSQELFAFEWKDPERGISGQLTWTRLPQGFKNSPTLFNEALHRDLTDFRTQHPEVTLLQYVDDLLLAAPTKKACTQGTRHLLQELGEKGYRASAKKAQICQTKVTYLGYILSEGKRWLTPGRIETVARIPPPRNPREVREFLGKAGFCRLFIPGFAELAAPLYALTKPSTPFTWQTEHQLAFEALKKALLSAPALGLPDTSKPFTLFLDERQGIAKGVLTQKLGPWKRPVAYLSKKLDPVAAGWPPCLRIMAATAMLVKDSAKLTLGQPLTVITPHTLEAIVRQPPDRWITNARLTHYQALLLDTDRVQFGPPVTLNPATLLPVPENQPSPHDCRQVLAETHGTREDLKDQELPDADHTWYTDGSSYLDSGTRRAGAAVVDGHNTIWAQSLPPGTSAQKAELIALTKALELSKGKKANIYTDSRYAFATAHTHGSIYERRGWLTSEGKEIKNKAEIIALLKALFLPQEVAIIHCPGHQKGQDPVAVGNRQADRVARQAAMAEVLTLATEPDNTSHITAGKRTADGSEFEKRTADGSEFESPKKKAKVE

SEQ ID NO: 6230 - protein, 2165 aa, synthetic construct
MPAAKRVKLDGGDKKYSIGLDIGTNSVGWAVITDEYKVPSKKFKVLGNTDRHSIKKNLIGALLFDSGETAEATRLKRTARRRYTRRKNRICYLQEIFSNEMAKVDDSFFHRLEESFLVEEDKKHERHPIFGNIVDEVAYHEKYPTIYHLRKKLVDSTDKADLRLIYLALAHMIKFRGHFLIEGDLNPDNSDVDKLFIQLVQTYNQLFEENPINASGVDAKAILSARLSKSRRLENLIAQLPGEKKNGLFGNLIALSLGLTPNFKSNFDLAEDAKLQLSKDTYDDDLDNLLAQIGDQYADLFLAAKNLSDAILLSDILRVNTEITKAPLSASMIKRYDEHHQDLTLLKALVRQQLPEKYKEIFFDQSKNGYAGYIDGGASQEEFYKFIKPILEKMDGTEELLVKLNREDLLRKQRTFDNGSIPHQIHLGELHAILRRQEDFYPFLKDNREKIEKILTFRIPYYVGPLARGNSRFAWMTRKSEETITPWNFEEVVDKGASAQSFIERMTNFDKNLPNEKVLPKHSLLYEYFTVYNELTKVKYVTEGMRKPAFLSGEQKKAIVDLLFKTNRKVTVKQLKEDYFKKIECFDSVEISGVEDRFNASLGTYHDLLKIIKDKDFLDNEENEDILEDIVLTLTLFEDREMIEERLKTYAHLFDDKVMKQLKRRRYTGWGRLSRKLINGIRDKQSGKTILDFLKSDGFANRNFMQLIHDDSLTFKEDIQKAQVSGQGDSLHEHIANLAGSPAIKKGILQTVKVVDELVKVMGRHKPENIVIEMARENQTTQKGQKNSRERMKRIEEGIKELGSQILKEHPVENTQLQNEKLYLYYLQNGRDMYVDQELDINRLSDYDVDHIVPQSFLKDDSIDNKVLTRSDKARGKSDNVPSEEVVKKMKNYWRQLLNAKLITQRKFDNLTKAERGGLSELDKAGFIKRQLVETRQITKHVAQILDSRMNTKYDENDKLIREVKVITLKSKLVSDFRKDFQFYKVREINNYHHAHDAYLNAVVGTALIKKYPKLESEFVYGDYKVYDVRKMIAKSEQEIGKATAKYFFYSNIMNFFKTEITLANGEIRKRPLIETNGETGEIVWDKGRDFATVRKVLSMPQVNIVKKTEVQTGGFSKESILPKRNSDKLIARKKDWDPKKYGGFDSPTVAYSVLVVAKVEKGKSKKLKSVKELLGITIMERSSFEKNPIDFLEAKGYKEVKKDLIIKLPKYSLFELENGRKRMLASAGELQKGNELALPSKYVNFLYLASHYEKLKGSPEDNEQKQLFVEQHKHYLDEIIEQISEFSKRVILADANLDKVLSAYNKHRDKPIREQAENIIHLFTLTNLGAPAAFKYFDTTIDRKRYTSTKEVLDATLIHQSITGLYETRIDLSQLGGDGGGGGGGMDLLKPLTVERKGVKIKGYWNSQADITCVPKDLLQGEEPVRQQNVTTIHGTQEGDVYYVNLKIDGRRINTEVIGTTLDYAIITPGDVPWILKKPLELTIKLDLEEQQGTLLNNSILSKKGKEELKQLFEKYSALWQSWENQVGHRRIRPHKIATGTVKPTPQKQYHINPKAKPDIQIVINDLLKQGVLIQKESTMNTPVYPVPKPNGRWRMVLDYRAVNKVTPLIAVQNQHSYGILGSLFKGRYKTTIDLSNGFWAHPIVPEDYWITAFTWQGKQYCWTVLPQGFLNSPGLFNGDVVDLLQGIPNVEVYVDDVYISHDSEKEHLEYLDILFNRLKEAGYIISLKKSNIANSIVDFLGFQITNEGRGLTDTFKEKLENITAPTTLKQLQSILGLLNFARNFIPDFTELIAPLYALIPKSPKNYVPWQIEHSTTLETLITKLNGAEYLQGRKGDKTLIMKVNASYTTGYIRYYNEGEKKPISYVSIVFSKTELKFTELEKLLTTVHKGLLKALDLSMGQNIHVYSPIVSMQNIQKTPQTAKKALASRWLSWLSYLEDPRIRFFYDPQMPALKDLPAVDTGKDNKKHPSNFQHIFYTDGSAITSPTKEGHLNAGMGIVYFINKDGNLQKQQEWSISLGNHTAQFAEIAAFEFALKKCLPLGGNILVVTDSNYVAKAYNEELDVWASNGFVNNRKKPLKHISKWKSVADLKRLRPDVVVTHEPGHQKLDSSPHAYGNNLADQLATQASFKVHAGKRTADGSEFEKRTADGSEFESPKKKAKVE

SEQ ID NO: 6231 - protein, 2086 aa, synthetic construct
MPAAKRVKLDGGDKKYSIGLDIGTNSVGWAVITDEYKVPSKKFKVLGNTDRHSIKKNLIGALLFDSGETAEATRLKRTARRRYTRRKNRICYLQEIFSNEMAKVDDSFFHRLEESFLVEEDKKHERHPIFGNIVDEVAYHEKYPTIYHLRKKLVDSTDKADLRLIYLALAHMIKFRGHFLIEGDLNPDNSDVDKLFIQLVQTYNQLFEENPINASGVDAKAILSARLSKSRRLENLIAQLPGEKKNGLFGNLIALSLGLTPNFKSNFDLAEDAKLQLSKDTYDDDLDNLLAQIGDQYADLFLAAKNLSDAILLSDILRVNTEITKAPLSASMIKRYDEHHQDLTLLKALVRQQLPEKYKEIFFDQSKNGYAGYIDGGASQEEFYKFIKPILEKMDGTEELLVKLNREDLLRKQRTFDNGSIPHQIHLGELHAILRRQEDFYPFLKDNREKIEKILTFRIPYYVGPLARGNSRFAWMTRKSEETITPWNFEEVVDKGASAQSFIERMTNFDKNLPNEKVLPKHSLLYEYFTVYNELTKVKYVTEGMRKPAFLSGEQKKAIVDLLFKTNRKVTVKQLKEDYFKKIECFDSVEISGVEDRFNASLGTYHDLLKIIKDKDFLDNEENEDILEDIVLTLTLFEDREMIEERLKTYAHLFDDKVMKQLKRRRYTGWGRLSRKLINGIRDKQSGKTILDFLKSDGFANRNFMQLIHDDSLTFKEDIQKAQVSGQGDSLHEHIANLAGSPAIKKGILQTVKVVDELVKVMGRHKPENIVIEMARENQTTQKGQKNSRERMKRIEEGIKELGSQILKEHPVENTQLQNEKLYLYYLQNGRDMYVDQELDINRLSDYDVDHIVPQSFLKDDSIDNKVLTRSDKARGKSDNVPSEEVVKKMKNYWRQLLNAKLITQRKFDNLTKAERGGLSELDKAGFIKRQLVETRQITKHVAQILDSRMNTKYDENDKLIREVKVITLKSKLVSDFRKDFQFYKVREINNYHHAHDAYLNAVVGTALIKKYPKLESEFVYGDYKVYDVRKMIAKSEQEIGKATAKYFFYSNIMNFFKTEITLANGEIRKRPLIETNGETGEIVWDKGRDFATVRKVLSMPQVNIVKKTEVQTGGFSKESILPKRNSDKLIARKKDWDPKKYGGFDSPTVAYSVLVVAKVEKGKSKKLKSVKELLGITIMERSSFEKNPIDFLEAKGYKEVKKDLIIKLPKYSLFELENGRKRMLASAGELQKGNELALPSKYVNFLYLASHYEKLKGSPEDNEQKQLFVEQHKHYLDEIIEQISEFSKRVILADANLDKVLSAYNKHRDKPIREQAENIIHLFTLTNLGAPAAFKYFDTTIDRKRYTSTKEVLDATLIHQSITGLYETRIDLSQLGGDGGGGGGGVLNLEEEYRLHEKPVPSSIDPSWLQLFPTVWAERAGMGLANQVPPVVVELRSGASPVAVRQYPMSKEAREGIRPHIQKFLDLGVLVPCRSPWNTPLLPVKKPGTNDYRPVQDLREINKRVQDIHPTVPNPYNLLSSLPPSYTWYSVLDLKDAFFCLRLHPNSQPLFAFEWKDPEKGNTGQLTWTRLPQGFKNSPTLFNEALHRDLAPFRALNPQVVLLQYVDDLLVAAPTYEDCKKGTQKLLQELSKLGYRVSAKKAQLCQREVTYLGYLLKEGKRWLTPARKATVMKIPVPTTPRQVREFLGTAGFCRLWIPGFASLAAPLYPLTKPSIPFIWTEEHQQAFDHIKKALLSAPALALPDLTKPFTLYIDERAGVARGVLTQTLGPWRRPVAYLSKKLDPVASGWPTCLKAVAAVALLLKDADKLTLGQNVTVIASHSLESIVRQPPDRWMTNARMTHYQSLLLNERVSFAPPAVLNPATLLPVESEATPVHRCSEILAEETGTRRDLEDQPLPGVPTWYTDGSSFITEGKRRAGAPIVDGKRTVWASSLPEGTSAQKAELVALTQALRLAEGKNINIYTDSRYAFATAHIHGAIYKQRGWLTSAGKDIKNKEEILALLEAIHLPRRVAIIHCPGHQRGSNPVATGNRRADEAAKQAALSTRVLAGTTKPAGKRTADGSEFEKRTADGSEFESPKKKAKVE

SEQ ID NO: 6232 - protein, 2086 aa, synthetic construct
MPAAKRVKLDGGDKKYSIGLDIGTNSVGWAVITDEYKVPSKKFKVLGNTDRHSIKKNLIGALLFDSGETAEATRLKRTARRRYTRRKNRICYLQEIFSNEMAKVDDSFFHRLEESFLVEEDKKHERHPIFGNIVDEVAYHEKYPTIYHLRKKLVDSTDKADLRLIYLALAHMIKFRGHFLIEGDLNPDNSDVDKLFIQLVQTYNQLFEENPINASGVDAKAILSARLSKSRRLENLIAQLPGEKKNGLFGNLIALSLGLTPNFKSNFDLAEDAKLQLSKDTYDDDLDNLLAQIGDQYADLFLAAKNLSDAILLSDILRVNTEITKAPLSASMIKRYDEHHQDLTLLKALVRQQLPEKYKEIFFDQSKNGYAGYIDGGASQEEFYKFIKPILEKMDGTEELLVKLNREDLLRKQRTFDNGSIPHQIHLGELHAILRRQEDFYPFLKDNREKIEKILTFRIPYYVGPLARGNSRFAWMTRKSEETITPWNFEEVVDKGASAQSFIERMTNFDKNLPNEKVLPKHSLLYEYFTVYNELTKVKYVTEGMRKPAFLSGEQKKAIVDLLFKTNRKVTVKQLKEDYFKKIECFDSVEISGVEDRFNASLGTYHDLLKIIKDKDFLDNEENEDILEDIVLTLTLFEDREMIEERLKTYAHLFDDKVMKQLKRRRYTGWGRLSRKLINGIRDKQSGKTILDFLKSDGFANRNFMQLIHDDSLTFKEDIQKAQVSGQGDSLHEHIANLAGSPAIKKGILQTVKVVDELVKVMGRHKPENIVIEMARENQTTQKGQKNSRERMKRIEEGIKELGSQILKEHPVENTQLQNEKLYLYYLQNGRDMYVDQELDINRLSDYDVDHIVPQSFLKDDSIDNKVLTRSDKARGKSDNVPSEEVVKKMKNYWRQLLNAKLITQRKFDNLTKAERGGLSELDKAGFIKRQLVETRQITKHVAQILDSRMNTKYDENDKLIREVKVITLKSKLVSDFRKDFQFYKVREINNYHHAHDAYLNAVVGTALIKKYPKLESEFVYGDYKVYDVRKMIAKSEQEIGKATAKYFFYSNIMNFFKTEITLANGEIRKRPLIETNGETGEIVWDKGRDFATVRKVLSMPQVNIVKKTEVQTGGFSKESILPKRNSDKLIARKKDWDPKKYGGFDSPTVAYSVLVVAKVEKGKSKKLKSVKELLGITIMERSSFEKNPIDFLEAKGYKEVKKDLIIKLPKYSLFELENGRKRMLASAGELQKGNELALPSKYVNFLYLASHYEKLKGSPEDNEQKQLFVEQHKHYLDEIIEQISEFSKRVILADANLDKVLSAYNKHRDKPIREQAENIIHLFTLTNLGAPAAFKYFDTTIDRKRYTSTKEVLDATLIHQSITGLYETRIDLSQLGGDGGGGGGGVLNLEEEYRLHEKPVPSSIDPSWLQLFPTVWAERAGMGLANQVPPVVVELRSGASPVAVRQYPMSKEAREGIRPHIQKFLDLGVLVPCRSPWNTPLLPVKKPGTNDYRPVQDLREINKRVQDIHPTVPNPYNLLSSLPPSYTWYSVLDLKDAFFCLRLHPNSQPLFAFEWKDPEKGNTGQLTWTRLPQGFKNSPTLFNEALHRDLAPFRALNPQVVLLQYVDDLLVAAPTYEDCKKGTQKLLQELSKLGYRVSAKKAQLCQREVTYLGYLLKEGKRWLTPARKATVMKIPVPTTPRQVREFLGKAGFCRLFIPGFASLAAPLYPLTKPSIPFIWTEEHQQAFDHIKKALLSAPALALPDLTKPFTLYIDERAGVARGVLTQTLGPWRRPVAYLSKKLDPVASGWPTCLKAVAAVALLLKDADKLTLGQNVTVIASHSLESIVRQPPDRWMTNARMTHYQSLLLNERVSFAPPAVLNPATLLPVESEATPVHRCSEILAEETGTRRDLEDQPLPGVPTWYTDGSSFITEGKRRAGAPIVDGKRTVWASSLPEGTSAQKAELVALTQALRLAEGKNINIYTDSRYAFATAHIHGAIYKQRGWLTSAGKDIKNKEEILALLEAIHLPRRVAIIHCPGHQRGSNPVATGNRRADEAAKQAALSTRVLAGTTKPAGKRTADGSEFEKRTADGSEFESPKKKAKVE

SEQ ID NO: 6233 - protein, 2119 aa, synthetic construct
MPAAKRVKLDGGDKKYSIGLDIGTNSVGWAVITDEYKVPSKKFKVLGNTDRHSIKKNLIGALLFDSGETAEATRLKRTARRRYTRRKNRICYLQEIFSNEMAKVDDSFFHRLEESFLVEEDKKHERHPIFGNIVDEVAYHEKYPTIYHLRKKLVDSTDKADLRLIYLALAHMIKFRGHFLIEGDLNPDNSDVDKLFIQLVQTYNQLFEENPINASGVDAKAILSARLSKSRRLENLIAQLPGEKKNGLFGNLIALSLGLTPNFKSNFDLAEDAKLQLSKDTYDDDLDNLLAQIGDQYADLFLAAKNLSDAILLSDILRVNTEITKAPLSASMIKRYDEHHQDLTLLKALVRQQLPEKYKEIFFDQSKNGYAGYIDGGASQEEFYKFIKPILEKMDGTEELLVKLNREDLLRKQRTFDNGSIPHQIHLGELHAILRRQEDFYPFLKDNREKIEKILTFRIPYYVGPLARGNSRFAWMTRKSEETITPWNFEEVVDKGASAQSFIERMTNFDKNLPNEKVLPKHSLLYEYFTVYNELTKVKYVTEGMRKPAFLSGEQKKAIVDLLFKTNRKVTVKQLKEDYFKKIECFDSVEISGVEDRFNASLGTYHDLLKIIKDKDFLDNEENEDILEDIVLTLTLFEDREMIEERLKTYAHLFDDKVMKQLKRRRYTGWGRLSRKLINGIRDKQSGKTILDFLKSDGFANRNFMQLIHDDSLTFKEDIQKAQVSGQGDSLHEHIANLAGSPAIKKGILQTVKVVDELVKVMGRHKPENIVIEMARENQTTQKGQKNSRERMKRIEEGIKELGSQILKEHPVENTQLQNEKLYLYYLQNGRDMYVDQELDINRLSDYDVDHIVPQSFLKDDSIDNKVLTRSDKARGKSDNVPSEEVVKKMKNYWRQLLNAKLITQRKFDNLTKAERGGLSELDKAGFIKRQLVETRQITKHVAQILDSRMNTKYDENDKLIREVKVITLKSKLVSDFRKDFQFYKVREINNYHHAHDAYLNAVVGTALIKKYPKLESEFVYGDYKVYDVRKMIAKSEQEIGKATAKYFFYSNIMNFFKTEITLANGEIRKRPLIETNGETGEIVWDKGRDFATVRKVLSMPQVNIVKKTEVQTGGFSKESILPKRNSDKLIARKKDWDPKKYGGFDSPTVAYSVLVVAKVEKGKSKKLKSVKELLGITIMERSSFEKNPIDFLEAKGYKEVKKDLIIKLPKYSLFELENGRKRMLASAGELQKGNELALPSKYVNFLYLASHYEKLKGSPEDNEQKQLFVEQHKHYLDEIIEQISEFSKRVILADANLDKVLSAYNKHRDKPIREQAENIIHLFTLTNLGAPAAFKYFDTTIDRKRYTSTKEVLDATLIHQSITGLYETRIDLSQLGGDGGGGGGGLLGRDLLTKLKAQIQFSTEGPQVTWEDRPAMCLVLNLEEEYRLHEKPVPPSIDPSWLQLFPMVWAEKAGMGLANQVPPVVVELKSDASPVAVRQYPMSKEAREGIRPHIQRFLDLGILVPCQSPWNTPLLPVKKPGTNDYRPVQDLREVNKRVQDIHPTVPNPYNLLSSLPPSHTWYSVLDLKDAFFCLKLHPNSQPLFAFEWRDPEKGNTGQLTWTRLPQGFKNSPTLFNEALHRDLASFRALNPQVVMLQYVDDLLVAAPTYRDCKEGTRRLLQELSKLGYRVSAKKAQLCREEVTYLGYLLKGGKRWLTPARKATVMKIPTPTTPRQVREFLGKAGFCRLFIPGFASLAAPLYPLTRPKVPFTWTEAHQEAFGRIKEALLSAPALALPDLTKPFALYVDEKEGVARGVLTQTLGPWRRPVAYLSKKLDPVASGWPTCLKAIAAVALLLKDADKLTLGQNVLVIAPHNLESIVRQPPDRWMTNARMTHYQSLLLNERVSFAPPAILNPATLLPVESDDTPIHICSEILAEETGTRPDLRDQPLPGVPAWYTDGSSFIMDGRRQAGAAIVDNKRTVWASNLPEGTSAQKAELIALTQALRLAEGKSINIYTDSRYAFATAHVHGAIYKQRGWLTSAGKDIKNKEEILALLEAIHLPKRVAIIHCPGHQRGTDPVATGNRKADEAAKQAAQSTRILTETTKNAGKRTADGSEFEKRTADGSEFESPKKKAKVE

SEQ ID NO: 6234 - protein, 2210 aa, synthetic construct
MPAAKRVKLDGGDKKYSIGLDIGTNSVGWAVITDEYKVPSKKFKVLGNTDRHSIKKNLIGALLFDSGETAEATRLKRTARRRYTRRKNRICYLQEIFSNEMAKVDDSFFHRLEESFLVEEDKKHERHPIFGNIVDEVAYHEKYPTIYHLRKKLVDSTDKADLRLIYLALAHMIKFRGHFLIEGDLNPDNSDVDKLFIQLVQTYNQLFEENPINASGVDAKAILSARLSKSRRLENLIAQLPGEKKNGLFGNLIALSLGLTPNFKSNFDLAEDAKLQLSKDTYDDDLDNLLAQIGDQYADLFLAAKNLSDAILLSDILRVNTEITKAPLSASMIKRYDEHHQDLTLLKALVRQQLPEKYKEIFFDQSKNGYAGYIDGGASQEEFYKFIKPILEKMDGTEELLVKLNREDLLRKQRTFDNGSIPHQIHLGELHAILRRQEDFYPFLKDNREKIEKILTFRIPYYVGPLARGNSRFAWMTRKSEETITPWNFEEVVDKGASAQSFIERMTNFDKNLPNEKVLPKHSLLYEYFTVYNELTKVKYVTEGMRKPAFLSGEQKKAIVDLLFKTNRKVTVKQLKEDYFKKIECFDSVEISGVEDRFNASLGTYHDLLKIIKDKDFLDNEENEDILEDIVLTLTLFEDREMIEERLKTYAHLFDDKVMKQLKRRRYTGWGRLSRKLINGIRDKQSGKTILDFLKSDGFANRNFMQLIHDDSLTFKEDIQKAQVSGQGDSLHEHIANLAGSPAIKKGILQTVKVVDELVKVMGRHKPENIVIEMARENQTTQKGQKNSRERMKRIEEGIKELGSQILKEHPVENTQLQNEKLYLYYLQNGRDMYVDQELDINRLSDYDVDHIVPQSFLKDDSIDNKVLTRSDKARGKSDNVPSEEVVKKMKNYWRQLLNAKLITQRKFDNLTKAERGGLSELDKAGFIKRQLVETRQITKHVAQILDSRMNTKYDENDKLIREVKVITLKSKLVSDFRKDFQFYKVREINNYHHAHDAYLNAVVGTALIKKYPKLESEFVYGDYKVYDVRKMIAKSEQEIGKATAKYFFYSNIMNFFKTEITLANGEIRKRPLIETNGETGEIVWDKGRDFATVRKVLSMPQVNIVKKTEVQTGGFSKESILPKRNSDKLIARKKDWDPKKYGGFDSPTVAYSVLVVAKVEKGKSKKLKSVKELLGITIMERSSFEKNPIDFLEAKGYKEVKKDLIIKLPKYSLFELENGRKRMLASAGELQKGNELALPSKYVNFLYLASHYEKLKGSPEDNEQKQLFVEQHKHYLDEIIEQISEFSKRVILADANLDKVLSAYNKHRDKPIREQAENIIHLFTLTNLGAPAAFKYFDTTIDRKRYTSTKEVLDATLIHQSITGLYETRIDLSQLGGDGGGGGGGTLGDQGSRGSDPLPEPRVTLTVEGIPTEFLVNTGAEHSVLTKPMGKMGSKRTVVAGATGSKVYPWTTKRLLKIGQKQVTHSFLVIPECPAPLLGRDLLTKLKAQIQFSTEGPQVTWEDRPAMCLVLNLEEEYRLHEKPVPPSIDPSWLQLFPMVWAEKAGMGLANQVPPVVVELKSDASPVAVRQYPMSKEAREGIRPHIQRFLDLGILVPCQSPWNTPLLPVKKPGTNDYRPVQDLREVNKRVQDIHPTVPNPYNLLSSLPPSHTWYSVLDLKDAFFCLKLHPNSQPLFAFEWRDPEKGNTGQLTWTRLPQGFKNSPTLFNEALHRDLASFRALNPQVVMLQYVDDLLVAAPTYRDCKEGTRRLLQELSKLGYRVSAKKAQLCREEVTYLGYLLKGGKRWLTPARKATVMKIPTPTTPRQVREFLGTAGFCRLWIPGFASLAAPLYPLTRPKVPFTWTEAHQEAFGRIKEALLSAPALALPDLTKPFALYVDEKEGVARGVLTQTLGPWRRPVAYLSKKLDPVASGWPTCLKAIAAVALLLKDADKLTLGQNVLVIAPHNLESIVRQPPDRWMTNARMTHYQSLLLNERVSFAPPAILNPATLLPVESDDTPIHICSEILAEETGTRPDLRDQPLPGVPAWYTDGSSFIMDGRRQAGAAIVDNKRTVWASNLPEGTSAQKAELIALTQALRLAEGKSINIYTDSRYAFATAHVHGAIYKQRGWLTSAGKDIKNKEEILALLEAIHLPKRVAIIHCPGHQRGTDPVATGNRKADEAAKQAAQSTRILTETTKNAGKRTADGSEFEKRTADGSEFESPKKKAKVE

SEQ ID NO: 6235 - protein, 2088 aa, synthetic construct
MPAAKRVKLDGGDKKYSIGLDIGTNSVGWAVITDEYKVPSKKFKVLGNTDRHSIKKNLIGALLFDSGETAEATRLKRTARRRYTRRKNRICYLQEIFSNEMAKVDDSFFHRLEESFLVEEDKKHERHPIFGNIVDEVAYHEKYPTIYHLRKKLVDSTDKADLRLIYLALAHMIKFRGHFLIEGDLNPDNSDVDKLFIQLVQTYNQLFEENPINASGVDAKAILSARLSKSRRLENLIAQLPGEKKNGLFGNLIALSLGLTPNFKSNFDLAEDAKLQLSKDTYDDDLDNLLAQIGDQYADLFLAAKNLSDAILLSDILRVNTEITKAPLSASMIKRYDEHHQDLTLLKALVRQQLPEKYKEIFFDQSKNGYAGYIDGGASQEEFYKFIKPILEKMDGTEELLVKLNREDLLRKQRTFDNGSIPHQIHLGELHAILRRQEDFYPFLKDNREKIEKILTFRIPYYVGPLARGNSRFAWMTRKSEETITPWNFEEVVDKGASAQSFIERMTNFDKNLPNEKVLPKHSLLYEYFTVYNELTKVKYVTEGMRKPAFLSGEQKKAIVDLLFKTNRKVTVKQLKEDYFKKIECFDSVEISGVEDRFNASLGTYHDLLKIIKDKDFLDNEENEDILEDIVLTLTLFEDREMIEERLKTYAHLFDDKVMKQLKRRRYTGWGRLSRKLINGIRDKQSGKTILDFLKSDGFANRNFMQLIHDDSLTFKEDIQKAQVSGQGDSLHEHIANLAGSPAIKKGILQTVKVVDELVKVMGRHKPENIVIEMARENQTTQKGQKNSRERMKRIEEGIKELGSQILKEHPVENTQLQNEKLYLYYLQNGRDMYVDQELDINRLSDYDVDHIVPQSFLKDDSIDNKVLTRSDKARGKSDNVPSEEVVKKMKNYWRQLLNAKLITQRKFDNLTKAERGGLSELDKAGFIKRQLVETRQITKHVAQILDSRMNTKYDENDKLIREVKVITLKSKLVSDFRKDFQFYKVREINNYHHAHDAYLNAVVGTALIKKYPKLESEFVYGDYKVYDVRKMIAKSEQEIGKATAKYFFYSNIMNFFKTEITLANGEIRKRPLIETNGETGEIVWDKGRDFATVRKVLSMPQVNIVKKTEVQTGGFSKESILPKRNSDKLIARKKDWDPKKYGGFDSPTVAYSVLVVAKVEKGKSKKLKSVKELLGITIMERSSFEKNPIDFLEAKGYKEVKKDLIIKLPKYSLFELENGRKRMLASAGELQKGNELALPSKYVNFLYLASHYEKLKGSPEDNEQKQLFVEQHKHYLDEIIEQISEFSKRVILADANLDKVLSAYNKHRDKPIREQAENIIHLFTLTNLGAPAAFKYFDTTIDRKRYTSTKEVLDATLIHQSITGLYETRIDLSQLGGDGGGGGGGTLNLEDEYRLYETSAEPEVSPGSTWLSDFPQAWAETGGMGLAVRQAPLIIPLKATSTPVSIKQYPMSQEAKLGIKPHIQRLLDQGILVPCQSPWNTPLLPVKKPGTNDYRPVQDLREVNKRVEDIHPTVPNPYNLLSGLPPSHRWYTVLDLKDAFFCLRLHPTSQPLFAFEWRDPGMGISGQLTWTRLPQGFKNSPTLFNEALHRDLADFRIQHPDLILLQYVDDILLAATSELDCQQGTRALLLTLGNLGYRASAKKAQLCQKQVKYLGYLLKEGQRWLTEARKETVMGQPTPKTPRQLREFLGKAGFCRLFIPGFAEMAAPLYPLTKPGTLFNWGPDQQKAYQEIKQALLTAPALGLPDLTKPFELFVDEKQGYAKGVLTQKLGPWRRPVAYLSKKLDPVAAGWPPCLRMVAAIAVLRKDAGKLTMGQPLVILAPHAVEALVKQPPDRWLSNARMTHYQAMLLDTDRVQFGPVVALNPATLLPLPEEGAPHDCLEILAETHGTRPDLTDQPIPDADHTWYTDGSSFLQEGQRKAGAAVTTETEVIWARALPAGTSAQRAELIALTQALKMAEGKRLNVYTDSRYAFATAHIHGEIYRRRGWLTSEGREIKNKSEILALLKALFLPKRLSIIHCLGHQKGDSAEARGNRLADQAAREAAIKTPPDTSTLLAGKRTADGSEFEKRTADGSEFESPKKKAKVE

SEQ ID NO: 6236 - protein, 2088 aa, synthetic construct
MPAAKRVKLDGGDKKYSIGLDIGTNSVGWAVITDEYKVPSKKFKVLGNTDRHSIKKNLIGALLFDSGETAEATRLKRTARRRYTRRKNRICYLQEIFSNEMAKVDDSFFHRLEESFLVEEDKKHERHPIFGNIVDEVAYHEKYPTIYHLRKKLVDSTDKADLRLIYLALAHMIKFRGHFLIEGDLNPDNSDVDKLFIQLVQTYNQLFEENPINASGVDAKAILSARLSKSRRLENLIAQLPGEKKNGLFGNLIALSLGLTPNFKSNFDLAEDAKLQLSKDTYDDDLDNLLAQIGDQYADLFLAAKNLSDAILLSDILRVNTEITKAPLSASMIKRYDEHHQDLTLLKALVRQQLPEKYKEIFFDQSKNGYAGYIDGGASQEEFYKFIKPILEKMDGTEELLVKLNREDLLRKQRTFDNGSIPHQIHLGELHAILRRQEDFYPFLKDNREKIEKILTFRIPYYVGPLARGNSRFAWMTRKSEETITPWNFEEVVDKGASAQSFIERMTNFDKNLPNEKVLPKHSLLYEYFTVYNELTKVKYVTEGMRKPAFLSGEQKKAIVDLLFKTNRKVTVKQLKEDYFKKIECFDSVEISGVEDRFNASLGTYHDLLKIIKDKDFLDNEENEDILEDIVLTLTLFEDREMIEERLKTYAHLFDDKVMKQLKRRRYTGWGRLSRKLINGIRDKQSGKTILDFLKSDGFANRNFMQLIHDDSLTFKEDIQKAQVSGQGDSLHEHIANLAGSPAIKKGILQTVKVVDELVKVMGRHKPENIVIEMARENQTTQKGQKNSRERMKRIEEGIKELGSQILKEHPVENTQLQNEKLYLYYLQNGRDMYVDQELDINRLSDYDVDHIVPQSFLKDDSIDNKVLTRSDKARGKSDNVPSEEVVKKMKNYWRQLLNAKLITQRKFDNLTKAERGGLSELDKAGFIKRQLVETRQITKHVAQILDSRMNTKYDENDKLIREVKVITLKSKLVSDFRKDFQFYKVREINNYHHAHDAYLNAVVGTALIKKYPKLESEFVYGDYKVYDVRKMIAKSEQEIGKATAKYFFYSNIMNFFKTEITLANGEIRKRPLIETNGETGEIVWDKGRDFATVRKVLSMPQVNIVKKTEVQTGGFSKESILPKRNSDKLIARKKDWDPKKYGGFDSPTVAYSVLVVAKVEKGKSKKLKSVKELLGITIMERSSFEKNPIDFLEAKGYKEVKKDLIIKLPKYSLFELENGRKRMLASAGELQKGNELALPSKYVNFLYLASHYEKLKGSPEDNEQKQLFVEQHKHYLDEIIEQISEFSKRVILADANLDKVLSAYNKHRDKPIREQAENIIHLFTLTNLGAPAAFKYFDTTIDRKRYTSTKEVLDATLIHQSITGLYETRIDLSQLGGDGGGGGGGTLNIEDEYRLHETSKGPDVPLGSTWLSDFPQAWAETGGMGLAVRQAPLIIPLKATSTPVSIKQYPMSQEARLGIKPHIQRLLDQGILVPCQSPWNTPLLPVKKPGTNDYRPVQDLREVNKRVEDIHPTVPNPYNLLSGLPPSHQWYTVLDLKDAFFCLRLHPTSQSLFAFEWRDPEMGISGQLTWTRLPQGFKNSPTLFNEALHRDLADFRIQHPDLILLQYVDDLLLAATSELDCQQGTRALLQTLGDLGYRASAKKAQICQKQVKYLGYLLKEGQRWLTEARKETVMGQPTPKTPRQLREFLGTAGFCRLWIPGFAEMAAPLYPLTKPGTLFEWGPDQQKAYQEIKQALLTAPALGLPDLTKPFELFVDEKQGYAKGVLTQKLGPWRRPVAYLSKKLDPVAAGWPPCLRMVAAIAVLTKDAGKLTMGQPLVILAPHAVEALVKQPPDRWLSNARMTHYQALLLDTDRVQFGPIVALNPATLLPLPEEGLQHDCLDILAEAHGTRPDLTDQPLPDADHTWYTDGSSFLQEGQRKAGAAVTTETEVVWAKALPAGTSAQRAELIALTQALKMAEGKKLNVYTDSRYAFATAHIHGEIYRRRGWLTSEGKEIKNKDEILALLKALFLPKRLSIIHCPGHQKGNRAEARGNRMADQAAREVATRETPETSTLLAGKRTADGSEFEKRTADGSEFESPKKKAKVE

SEQ ID NO: 6237 - protein, 2088 aa, synthetic construct
MPAAKRVKLDGGDKKYSIGLDIGTNSVGWAVITDEYKVPSKKFKVLGNTDRHSIKKNLIGALLFDSGETAEATRLKRTARRRYTRRKNRICYLQEIFSNEMAKVDDSFFHRLEESFLVEEDKKHERHPIFGNIVDEVAYHEKYPTIYHLRKKLVDSTDKADLRLIYLALAHMIKFRGHFLIEGDLNPDNSDVDKLFIQLVQTYNQLFEENPINASGVDAKAILSARLSKSRRLENLIAQLPGEKKNGLFGNLIALSLGLTPNFKSNFDLAEDAKLQLSKDTYDDDLDNLLAQIGDQYADLFLAAKNLSDAILLSDILRVNTEITKAPLSASMIKRYDEHHQDLTLLKALVRQQLPEKYKEIFFDQSKNGYAGYIDGGASQEEFYKFIKPILEKMDGTEELLVKLNREDLLRKQRTFDNGSIPHQIHLGELHAILRRQEDFYPFLKDNREKIEKILTFRIPYYVGPLARGNSRFAWMTRKSEETITPWNFEEVVDKGASAQSFIERMTNFDKNLPNEKVLPKHSLLYEYFTVYNELTKVKYVTEGMRKPAFLSGEQKKAIVDLLFKTNRKVTVKQLKEDYFKKIECFDSVEISGVEDRFNASLGTYHDLLKIIKDKDFLDNEENEDILEDIVLTLTLFEDREMIEERLKTYAHLFDDKVMKQLKRRRYTGWGRLSRKLINGIRDKQSGKTILDFLKSDGFANRNFMQLIHDDSLTFKEDIQKAQVSGQGDSLHEHIANLAGSPAIKKGILQTVKVVDELVKVMGRHKPENIVIEMARENQTTQKGQKNSRERMKRIEEGIKELGSQILKEHPVENTQLQNEKLYLYYLQNGRDMYVDQELDINRLSDYDVDHIVPQSFLKDDSIDNKVLTRSDKARGKSDNVPSEEVVKKMKNYWRQLLNAKLITQRKFDNLTKAERGGLSELDKAGFIKRQLVETRQITKHVAQILDSRMNTKYDENDKLIREVKVITLKSKLVSDFRKDFQFYKVREINNYHHAHDAYLNAVVGTALIKKYPKLESEFVYGDYKVYDVRKMIAKSEQEIGKATAKYFFYSNIMNFFKTEITLANGEIRKRPLIETNGETGEIVWDKGRDFATVRKVLSMPQVNIVKKTEVQTGGFSKESILPKRNSDKLIARKKDWDPKKYGGFDSPTVAYSVLVVAKVEKGKSKKLKSVKELLGITIMERSSFEKNPIDFLEAKGYKEVKKDLIIKLPKYSLFELENGRKRMLASAGELQKGNELALPSKYVNFLYLASHYEKLKGSPEDNEQKQLFVEQHKHYLDEIIEQISEFSKRVILADANLDKVLSAYNKHRDKPIREQAENIIHLFTLTNLGAPAAFKYFDTTIDRKRYTSTKEVLDATLIHQSITGLYETRIDLSQLGGDGGGGGGGTLNIEDEHRLHETSKEPDVSLGSTWLSDFPQAWAETGGMGLAVRQAPLIIPLKATSTPVSIKQYPMSQEARLGIKPHIQRLLDQGILVPCQSPWNTPLLPVKKPGTNDYRPVQDLREVNKRVEDIHPTVPNPYNLLSGLPPSHQWYTVLDLKDAFFCLRLHPTSQPLFAFEWRDPEMGISGQLTWTRLPQGFKNSPTLFNEALHRDLADFRIQHPDLILLQYVDDLLLAATSELDCQQGTRALLQTLGNLGYRASAKKAQICQKQVKYLGYLLKEGQRWLTEARKETVMGQPTPKTPRQLREFLGTAGFCRLWIPGFAEMAAPLYPLTKPGTLFNWGPDQQKAYQEIKQALLTAPALGLPDLTKPFELFVDEKQGYAKGVLTQKLGPWRRPVAYLSKKLDPVAAGWPPCLRMVAAIAVLTKDAGKLTMGQPLVILAPHAVEALVKQPPDRWLSNARMTHYQALLLDTDRVQFGPVVALNPATLLPLPEEGLQHNCLDILAEAHGTRPDLTDQPLPDADHTWYTDGSSLLQEGQRKAGAAVTTETEVIWAKALPAGTSAQRAELIALTQALKMAEGKKLNVYTDSRYAFATAHIHGEIYRRRGWLTSEGKEIKNKDEILALLKALFLPKRLSIIHCPGHQKGHSAEARGNRMADQAARKAAITETPDTSTLLAGKRTADGSEFEKRTADGSEFESPKKKAKVE

SEQ ID NO: 6238 - protein, 2088 aa, synthetic construct; identical to SEQ ID NO: 6237

SEQ ID NO: 6239 - protein, 2088 aa, synthetic construct
MPAAKRVKLDGGDKKYSIGLDIGTNSVGWAVITDEYKVPSKKFKVLGNTDRHSIKKNLIGALLFDSGETAEATRLKRTARRRYTRRKNRICYLQEIFSNEMAKVDDSFFHRLEESFLVEEDKKHERHPIFGNIVDEVAYHEKYPTIYHLRKKLVDSTDKADLRLIYLALAHMIKFRGHFLIEGDLNPDNSDVDKLFIQLVQTYNQLFEENPINASGVDAKAILSARLSKSRRLENLIAQLPGEKKNGLFGNLIALSLGLTPNFKSNFDLAEDAKLQLSKDTYDDDLDNLLAQIGDQYADLFLAAKNLSDAILLSDILRVNTEITKAPLSASMIKRYDEHHQDLTLLKALVRQQLPEKYKEIFFDQSKNGYAGYIDGGASQEEFYKFIKPILEKMDGTEELLVKLNREDLLRKQRTFDNGSIPHQIHLGELHAILRRQEDFYPFLKDNREKIEKILTFRIPYYVGPLARGNSRFAWMTRKSEETITPWNFEEVVDKGASAQSFIERMTNFDKNLPNEKVLPKHSLLYEYFTVYNELTKVKYVTEGMRKPAFLSGEQKKAIVDLLFKTNRKVTVKQLKEDYFKKIECFDSVEISGVEDRFNASLGTYHDLLKIIKDKDFLDNEENEDILEDIVLTLTLFEDREMIEERLKTYAHLFDDKVMKQLKRRRYTGWGRLSRKLINGIRDKQSGKTILDFLKSDGFANRNFMQLIHDDSLTFKEDIQKAQVSGQGDSLHEHIANLAGSPAIKKGILQTVKVVDELVKVMGRHKPENIVIEMARENQTTQKGQKNSRERMKRIEEGIKELGSQILKEHPVENTQLQNEKLYLYYLQNGRDMYVDQELDINRLSDYDVDHIVPQSFLKDDSIDNKVLTRSDKARGKSDNVPSEEVVKKMKNYWRQLLNAKLITQRKFDNLTKAERGGLSELDKAGFIKRQLVETRQITKHVAQILDSRMNTKYDENDKLIREVKVITLKSKLVSDFRKDFQFYKVREINNYHHAHDAYLNAVVGTALIKKYPKLESEFVYGDYKVYDVRKMIAKSEQEIGKATAKYFFYSNIMNFFKTEITLANGEIRKRPLIETNGETGEIVWDKGRDFATVRKVLSMPQVNIVKKTEVQTGGFSKESILPKRNSDKLIARKKDWDPKKYGGFDSPTVAYSVLVVAKVEKGKSKKLKSVKELLGITIMERSSFEKNPIDFLEAKGYKEVKKDLIIKLPKYSLFELENGRKRMLASAGELQKGNELALPSKYVNFLYLASHYEKLKGSPEDNEQKQLFVEQHKHYLDEIIEQISEFSKRVILADANLDKVLSAYNKHRDKPIREQAENIIHLFTLTNLGAPAAFKYFDTTIDRKRYTSTKEVLDATLIHQSITGLYETRIDLSQLGGDGGGGGGGTLNIEDEYRLHEISTEPDVSPGSTWLSDFPQAWAETGGMGLAVRQAPLIIPLKATSTPVSIKQYPMSQEAKLGIKPHIQRLLDQGILVPCQSPWNTPLLPVKKPGTNDYRPVQGLREVNKRVEDIHPTVPNPYNLLSGLPTSHRWYTVLDLKDAFFCLRLHPTSQPLFASEWRDPGMGISGQLTWTRLPQGFKNSPTLFNEALHRGLADFRIQHPDLILLQYVDDLLLAATSELDCQQGTRALLKTLGNLGYRASAKKAQICQKQVKYLGYLLREGQRWLTEARKETVMGQPTPKTPRQLREFLGTAGFCRLWIPRFAEMAAPLYPLTKPGTLFNWGPDQQKAYHEIKQALLTAPALGLPDLTKPFELFVDEKQGYAKGVLTQKLGPWRRPVAYLSKKLDPVAAGWPPCLRMVAAIAVLTKDAGKLTMGQPLVILAPHAVEALVKQPPDRWLSNARMTHYQAMLLDTDRVQFGPVVALNPATLLPLPEEGAPHDCLEILAETHGTEPDLTDQPIPDADHTWYTDGSSFLQEGQRKAGAAVTTETEVIWARALPAGTSAQRAELIALTQALKMAEGKRLNVYTDSRYAFATAHIHGEIYKRRGWLTSEGREIKNKSEILALLKALFLPKRLSIIHCLGHQKGDSAEARGNRLADQAAREAAIKTPPDTSTLLAGKRTADGSEFEKRTADGSEFESPKKKAKVE

SEQ ID NO: 6240 - protein, 2082 aa, synthetic construct
MPAAKRVKLDGGDKKYSIGLDIGTNSVGWAVITDEYKVPSKKFKVLGNTDRHSIKKNLIGALLFDSGETAEATRLKRTARRRYTRRKNRICYLQEIFSNEMAKVDDSFFHRLEESFLVEEDKKHERHPIFGNIVDEVAYHEKYPTIYHLRKKLVDSTDKADLRLIYLALAHMIKFRGHFLIEGDLNPDNSDVDKLFIQLVQTYNQLFEENPINASGVDAKAILSARLSKSRRLENLIAQLPGEKKNGLFGNLIALSLGLTPNFKSNFDLAEDAKLQLSKDTYDDDLDNLLAQIGDQYADLFLAAKNLSDAILLSDILRVNTEITKAPLSASMIKRYDEHHQDLTLLKALVRQQLPEKYKEIFFDQSKNGYAGYIDGGASQEEFYKFIKPILEKMDGTEELLVKLNREDLLRKQRTFDNGSIPHQIHLGELHAILRRQEDFYPFLKDNREKIEKILTFRIPYYVGPLARGNSRFAWMTRKSEETITPWNFEEVVDKGASAQSFIERMTNFDKNLPNEKVLPKHSLLYEYFTVYNELTKVKYVTEGMRKPAFLSGEQKKAIVDLLFKTNRKVTVKQLKEDYFKKIECFDSVEISGVEDRFNASLGTYHDLLKIIKDKDFLDNEENEDILEDIVLTLTLFEDREMIEERLKTYAHLFDDKVMKQLKRRRYTGWGRLSRKLINGIRDKQSGKTILDFLKSDGFANRNFMQLIHDDSLTFKEDIQKAQVSGQGDSLHEHIANLAGSPAIKKGILQTVKVVDELVKVMGRHKPENIVIEMARENQTTQKGQKNSRERMKRIEEGIKELGSQILKEHPVENTQLQNEKLYLYYLQNGRDMYVDQELDINRLSDYDVDHIVPQSFLKDDSIDNKVLTRSDKARGKSDNVPSEEVVKKMKNYWRQLLNAKLITQRKFDNLTKAERGGLSELDKAGFIKRQLVETRQITKHVAQILDSRMNTKYDENDKLIREVKVITLKSKLVSDFRKDFQFYKVREINNYHHAHDAYLNAVVGTALIKKYPKLESEFVYGDYKVYDVRKMIAKSEQEIGKATAKYFFYSNIMNFFKTEITLANGEIRKRPLIETNGETGEIVWDKGRDFATVRKVLSMPQVNIVKKTEVQTGGFSKESILPKRNSDKLIARKKDWDPKKYGGFDSPTVAYSVLVVAKVEKGKSKKLKSVKELLGITIMERSSFEKNPIDFLEAKGYKEVKKDLIIKLPKYSLFELENGRKRMLASAGELQKGNELALPSKYVNFLYLASHYEKLKGSPEDNEQKQLFVEQHKHYLDEIIEQISEFSKRVILADANLDKVLSAYNKHRDKPIREQAENIIHLFTLTNLGAPAAFKYFDTTIDRKRYTSTKEVLDATLIHQSITGLYETRIDLSQLGGDGGGGGGGTLQLDDEYRLYSPLVKPDQNIQFWLEQFPQAWAETAGMGLAKQVPPQVIQLKASATPVSVRQYPLSKEAQEGIRPHVQRLIQQGILVPVQSPWNTPLLPVRKPGTNDYRPVQDLREVNKRVQDIHPTVPNPYNLLCALPPQRSWYTVLDLKDAFFCLRLHPTSQPLFAFEWRDPGTGRTGQLTWTRLPQGFKNSPTIFNEALHRDLANFRIQHPQVTLLQYVDDLLLAGATKQDCLEGTKALLLELSDLGYRASAKKAQICRREVTYLGYSLRDGQRWLTEARKKTVVQIPAPTTAKQVREFLGTAGFCRLWIPGFATLAAPLYPLTKPKGEFSWAPEHQKAFDAIKKALLSAPALALPDVTKPFTLYVDERKGVARGVLTQTLGPWRRPVAYLSKKLDPVASGWPVCLKAIAAVAILVKDADKLTLGQNITVIAPHALENIVRQPPDRWMTNARMTHYQSLLLTERVTFAPPAALNPATLLPEETDEPVTHDCHQLLIEETGVRKDLTDIPLTGEVLTWFTDGSSYVVEGKRMAGAAVVDGTRTIWASSLPEGTSAQKAELMALTQALRLAEGKSINIYTDSRYAFATAHVHGAIYKQRGWLTSAGREIKNKEEILSLLEALHLPKRLAIIHCPGHQKAKDPISRGNQMADRVAKQAAQGVNLLAGKRTADGSEFEKRTADGSEFESPKKKAKVE

SEQ ID NO: 6241 - protein, 2079 aa, synthetic construct
MPAAKRVKLDGGDKKYSIGLDIGTNSVGWAVITDEYKVPSKKFKVLGNTDRHSIKKNLIGALLFDSGETAEATRLKRTARRRYTRRKNRICYLQEIFSNEMAKVDDSFFHRLEESFLVEEDKKHERHPIFGNIVDEVAYHEKYPTIYHLRKKLVDSTDKADLRLIYLALAHMIKFRGHFLIEGDLNPDNSDVDKLFIQLVQTYNQLFEENPINASGVDAKAILSARLSKSRRLENLIAQLPGEKKNGLFGNLIALSLGLTPNFKSNFDLAEDAKLQLSKDTYDDDLDNLLAQIGDQYADLFLAAKNLSDAILLSDILRVNTEITKAPLSASMIKRYDEHHQDLTLLKALVRQQLPEKYKEIFFDQSKNGYAGYIDGGASQEEFYKFIKPILEKMDGTEELLVKLNREDLLRKQRTFDNGSIPHQIHLGELHAILRRQEDFYPFLKDNREKIEKILTFRIPYYVGPLARGNSRFAWMTRKSEETITPWNFEEVVDKGASAQSFIERMTNFDKNLPNEKVLPKHSLLYEYFTVYNELTKVKYVTEGMRKPAFLSGEQKKAIVDLLFKTNRKVTVKQLKEDYFKKIECFDSVEISGVEDRFNASLGTYHDLLKIIKDKDFLDNEENEDILEDIVLTLTLFEDREMIEERLKTYAHLFDDKVMKQLKRRRYTGWGRLSRKLINGIRDKQSGKTILDFLKSDGFANRNFMQLIHDDSLTFKEDIQKAQVSGQGDSLHEHIANLAGSPAIKKGILQTVKVVDELVKVMGRHKPENIVIEMARENQTTQKGQKNSRERMKRIEEGIKELGSQILKEHPVENTQLQNEKLYLYYLQNGRDMYVDQELDINRLSDYDVDHIVPQSFLKDDSIDNKVLTRSDKARGKSDNVPSEEVVKKMKNYWRQLLNAKLITQRKFDNLTKAERGGLSELDKAGFIKRQLVETRQITKHVAQILDSRMNTKYDENDKLIREVKVITLKSKLVSDFRKDFQFYKVREINNYHHAHDAYLNAVVGTALIKKYPKLESEFVYGDYKVYDVRKMIAKSEQEIGKATAKYFFYSNIMNFFKTEITLANGEIRKRPLIETNGETGEIVWDKGRDFATVRKVLSMPQVNIVKKTEVQTGGFSKESILPKRNSDKLIARKKDWDPKKYGGFDSPTVAYSVLVVAKVEKGKSKKLKSVKELLGITIMERSSFEKNPIDFLEAKGYKEVKKDLIIKLPKYSLFELENGRKRMLASAGELQKGNELALPSKYVNFLYLASHYEKLKGSPEDNEQKQLFVEQHKHYLDEIIEQISEFSKRVILADANLDKVLSAYNKHRDKPIREQAENIIHLFTLTNLGAPAAFKYFDTTIDRKRYTSTKEVLDATLIHQSITGLYETRIDLSQLGGDGGGGGGGIPWLMKKPLQLTTLVPLQEYEERLLKQTMLTGSYKEKLQSLFLKYDALWQHWENQVGHRRIKPHHIATGTVNPRPQKQYPINPKAKASIQTVINDLLKQGVLIQQNSIMNTPVYPVPKPDGKWRMVLDYREVNKTIPLIAAQNQHSAGILSSIFRGKYKTTLDLSNGFWAHSITPESYWLTAFTWLGQQYCWTRLPQGFLNSPALFNADVVDLLKEVPNVQVYVDDIYISHDDPREHLEQLEKVFSLLLNAGYVVSLKKSEIAQHEVEFLGFNITKEGRGLTETFKQKLLNITPPRDLKQLQSILGKLNFARNFIPNFSELVKPLYNIIATAPGKYITWTTDNSQQLQNIISMLNSAENLEERNPEVRLIMKVNTSPSAGYIRFYNEFAKRPIMYLNYVYTKAEVKFTNTEKLLTTIHKGLIKALDLGMGQEILVYSPIVSMTKIQKTPLPERKALPIRWITWMSYLEDPRIQFHYDKTLPELQQVPTVTDDIIAKIKHPSEFSMVFYTDGSAIKHPNVNKSHNAGMGIAQVQFKPEFTVINTWSIPLGDHTAQLAEVAAVEFACKKALKIDGPVLIVTDSFYVAESVNKELPYWQSNGFFNNKKKPLKHVSKWKSIADCIQLKPDIIIIHEKGHQPTASTFHTEGNNLADKLATQGSYVVNAGKRTADGSEFEKRTADGSEFESPKKKAKVE

SEQ ID NO: 6242 - protein, 2086 aa, synthetic construct
MPAAKRVKLDGGDKKYSIGLDIGTNSVGWAVITDEYKVPSKKFKVLGNTDRHSIKKNLIGALLFDSGETAEATRLKRTARRRYTRRKNRICYLQEIFSNEMAKVDDSFFHRLEESFLVEEDKKHERHPIFGNIVDEVAYHEKYPTIYHLRKKLVDSTDKADLRLIYLALAHMIKFRGHFLIEGDLNPDNSDVDKLFIQLVQTYNQLFEENPINASGVDAKAILSARLSKSRRLENLIAQLPGEKKNGLFGNLIALSLGLTPNFKSNFDLAEDAKLQLSKDTYDDDLDNLLAQIGDQYADLFLAAKNLSDAILLSDILRVNTEITKAPLSASMIKRYDEHHQDLTLLKALVRQQLPEKYKEIFFDQSKNGYAGYIDGGASQEEFYKFIKPILEKMDGTEELLVKLNREDLLRKQRTFDNGSIPHQIHLGELHAILRRQEDFYPFLKDNREKIEKILTFRIPYYVGPLARGNSRFAWMTRKSEETITPWNFEEVVDKGASAQSFIERMTNFDKNLPNEKVLPKHSLLYEYFTVYNELTKVKYVTEGMRKPAFLSGEQKKAIVDLLFKTNRKVTVKQLKEDYFKKIECFDSVEISGVEDRFNASLGTYHDLLKIIKDKDFLDNEENEDILEDIVLTLTLFEDREMIEERLKTYAHLFDDKVMKQLKRRRYTGWGRLSRKLINGIRDKQSGKTILDFLKSDGFANRNFMQLIHDDSLTFKEDIQKAQVSGQGDSLHEHIANLAGSPAIKKGILQTVKVVDELVKVMGRHKPENIVIEMARENQTTQKGQKNSRERMKRIEEGIKELGSQILKEHPVENTQLQNEKLYLYYLQNGRDMYVDQELDINRLSDYDVDHIVPQSFLKDDSIDNKVLTRSDKARGKSDNVPSEEVVKKMKNYWRQLLNAKLITQRKFDNLTKAERGGLSELDKAGFIKRQLVETRQITKHVAQILDSRMNTKYDENDKLIREVKVITLKSKLVSDFRKDFQFYKVREINNYHHAHDAYLNAVVGTALIKKYPKLESEFVYGDYKVYDVRKMIAKSEQEIGKATAKYFFYSNIMNFFKTEITLANGEIRKRPLIETNGETGEIVWDKGRDFATVRKVLSMPQVNIVKKTEVQTGGFSKESILPKRNSDKLIARKKDWDPKKYGGFDSPTVAYSVLVVAKVEKGKSKKLKSVKELLGITIMERSSFEKNPIDFLEAKGYKEVKKDLIIKLPKYSLFELENGRKRMLASAGELQKGNELALPSKYVNFLYLASHYEKLKGSPEDNEQKQLFVEQHKHYLDEIIEQISEFSKRVILADANLDKVLSAYNKHRDKPIREQAENIIHLFTLTNLGAPAAFKYFDTTIDRKRYTSTKEVLDATLIHQSITGLYETRIDLSQLGGDGGGGGGGVLNLEEEYRLHEKPVPSSIDPSWLQLFPTVWAERAGMGLANQVPPVVVELRSGASPVAVRQYPMSKEAREGIRPHIQRFLDLGVLVPCQSPWNTPLLPVKKPGTNDYRPVQDLREINKRVQDIHPTVPNPYNLLSSLPPSHTWYSVLDLKDAFFCLKLHPNSQPLFAFEWRDPEKGNTGQLTWTRLPQGFKNSPTLFDEALHRDLAPFRALNPQVVLLQYVDDLLVAAPTYRDCKEGTQKLLQELSKLGYRVSAKKAQLCQKEVTYLGYLLKEGKRWLTPARKATVMKIPPPTTPRQVREFLGTAGFCRLWIPGFASLAAPLYPLTKESIPFIWTEEHQKAFDRIKEALLSAPALALPDLTKPFTLYVDERAGVARGVLTQTLGPWRRPVAYLSKKLDPVASGWPTCLKAVAAVALLLKDADKLTLGQNVTVIASHSLESIVRQPPDRWMTNARMTHYQSLLLNERVSFAPPAVLNPATLLPVESEATPVHRCSEILAEETGTRRDLKDQPLPGVPAWYTDGSSFIAEGKRRAGAAIVDGKRTVWASSLPEGTSAQKAELVALTQALRLAEGKDINIYTDSRYAFATAHIHGAIYKQRGLLTSAGKDIKNKEEILALLEAIHLPKRVAIIHCPGHQKGNDPVATGNRRADEAAKQAALSTRVLAETTKPAGKRTADGSEFEKRTADGSEFESPKKKAKVE

SEQ ID NO: 6243 - protein, 2086 aa, synthetic construct
MPAAKRVKLDGGDKKYSIGLDIGTNSVGWAVITDEYKVPSKKFKVLGNTDRHSIKKNLIGALLFDSGETAEATRLKRTARRRYTRRKNRICYLQEIFSNEMAKVDDSFFHRLEESFLVEEDKKHERHPIFGNIVDEVAYHEKYPTIYHLRKKLVDSTDKADLRLIYLALAHMIKFRGHFLIEGDLNPDNSDVDKLFIQLVQTYNQLFEENPINASGVDAKAILSARLSKSRRLENLIAQLPGEKKNGLFGNLIALSLGLTPNFKSNFDLAEDAKLQLSKDTYDDDLDNLLAQIGDQYADLFLAAKNLSDAILLSDILRVNTEITKAPLSASMIKRYDEHHQDLTLLKALVRQQLPEKYKEIFFDQSKNGYAGYIDGGASQEEFYKFIKPILEKMDGTEELLVKLNREDLLRKQRTFDNGSIPHQIHLGELHAILRRQEDFYPFLKDNREKIEKILTFRIPYYVGPLARGNSRFAWMTRKSEETITPWNFEEVVDKGASAQSFIERMTNFDKNLPNEKVLPKHSLLYEYFTVYNELTKVKYVTEGMRKPAFLSGEQKKAIVDLLFKTNRKVTVKQLKEDYFKKIECFDSVEISGVEDRFNASLGTYHDLLKIIKDKDFLDNEENEDILEDIVLTLTLFEDREMIEERLKTYAHLFDDKVMKQLKRRRYTGWGRLSRKLINGIRDKQSGKTILDFLKSDGFANRNFMQLIHDDSLTFKEDIQKAQVSGQGDSLHEHIANLAGSPAIKKGILQTVKVVDELVKVMGRHKPENIVIEMARENQTTQKGQKNSRERMKRIEEGIKELGSQILKEHPVENTQLQNEKLYLYYLQNGRDMYVDQELDINRLSDYDVDHIVPQSFLKDDSIDNKVLTRSDKARGKSDNVPSEEVVKKMKNYWRQLLNAKLITQRKFDNLTKAERGGLSELDKAGFIKRQLVETRQITKHVAQILDSRMNTKYDENDKLIREVKVITLKSKLVSDFRKDFQFYKVREINNYHHAHDAYLNAVVGTALIKKYPKLESEFVYGDYKVYDVRKMIAKSEQEIGKATAKYFFYSNIMNFFKTEITLANGEIRKRPLIETNGETGEIVWDKGRDFATVRKVLSMPQVNIVKKTEVQTGGFSKESILPKRNSDKLIARKKDWDPKKYGGFDSPTVAYSVLVVAKVEKGKSKKLKSVKELLGITIMERSSFEKNPIDFLEAKGYKEVKKDLIIKLPKYSLFELENGRKRMLASAGELQKGNELALPSKYVNFLYLASHYEKLKGSPEDNEQKQLFVEQHKHYLDEIIEQISEFSKRVILADANLDKVLSAYNKHRDKPIREQAENIIHLFTLTNLGAPAAFKYFDTTIDRKRYTSTKEVLDATLIHQSITGLYETRIDLSQLGGDGGGGGGGVLNLEEEYRLHEKPVPSSIDPSWLQLFPTVWAERAGMGLANQVPPVVVELRSGASPVAVRQYPMSKEAREGIRPHIQRFLDLGVLVPCQSPWNTPLLPVKKPGTNDYRPVQDLREINKRVQDIHPTVPNPYNLLSSLPPSHTWYSVLDLKDAFFCLKLHPNSQPLFAFEWRDPEKGNTGQLTWTRLPQGFKNSPTLFNEALHRDLAPFRALNPQVVLLQYVDDLLVAAPTYRDCKEGTQKLLQELSKLGYRVSAKKAQLCQKEVTYLGYLLKEGKRWLTPARKATVMKIPPPTTPRQVREFLGKAGFCRLFIPGFASLAAPLYPLTKPSIPFIWTEEHQKAFDRIKEALLSAPALALPDLTKPFTLYVDERAGVARGVLTQTLGPWRRPVAYLSKKLDPVASGWPTCLKAVAAVALLLKDADKLTLGQNVTVIASHSLESIVRQPPDRWMTNARMTHYQSLLLNERVSFAPPAVLNPATLLPVESEATPVHRCSEILAEETGTRRDLKDQPLPGVPAWYTDGSSFIAEGKRRAGAAIVDGKRTVWASSLPEGTSAQKAELVALTQALRLAEGKDINIYTDSRYAFATAHIHGAIYKQRGWLTSAGKDIKNKEEILALLEAIHLPKRVAIIHCPGHQKGNDPVATGNRRADEAAKQAALSTRVLAETTKPAGKRTADGSEFEKRTADGSEFESPKKKAKVE

SEQ ID NO: 6244 - protein, 2091 aa, synthetic construct
MPAAKRVKLDGGDKKYSIGLDIGTNSVGWAVITDEYKVPSKKFKVLGNTDRHSIKKNLIGALLFDSGETAEATRLKRTARRRYTRRKNRICYLQEIFSNEMAKVDDSFFHRLEESFLVEEDKKHERHPIFGNIVDEVAYHEKYPTIYHLRKKLVDSTDKADLRLIYLALAHMIKFRGHFLIEGDLNPDNSDVDKLFIQLVQTYNQLFEENPINASGVDAKAILSARLSKSRRLENLIAQLPGEKKNGLFGNLIALSLGLTPNFKSNFDLAEDAKLQLSKDTYDDDLDNLLAQIGDQYADLFLAAKNLSDAILLSDILRVNTEITKAPLSASMIKRYDEHHQDLTLLKALVRQQLPEKYKEIFFDQSKNGYAGYIDGGASQEEFYKFIKPILEKMDGTEELLVKLNREDLLRKQRTFDNGSIPHQIHLGELHAILRRQEDFYPFLKDNREKIEKILTFRIPYYVGPLARGNSRFAWMTRKSEETITPWNFEEVVDKGASAQSFIERMTNFDKNLPNEKVLPKHSLLYEYFTVYNELTKVKYVTEGMRKPAFLSGEQKKAIVDLLFKTNRKVTVKQLKEDYFKKIECFDSVEISGVEDRFNASLGTYHDLLKIIKDKDFLDNEENEDILEDIVLTLTLFEDREMIEERLKTYAHLFDDKVMKQLKRRRYTGWGRLSRKLINGIRDKQSGKTILDFLKSDGFANRNFMQLIHDDSLTFKEDIQKAQVSGQGDSLHEHIANLAGSPAIKKGILQTVKVVDELVKVMGRHKPENIVIEMARENQTTQKGQKNSRERMKRIEEGIKELGSQILKEHPVENTQLQNEKLYLYYLQNGRDMYVDQELDINRLSDYDVDHIVPQSFLKDDSIDNKVLTRSDKARGKSDNVPSEEVVKKMKNYWRQLLNAKLITQRKFDNLTKAERGGLSELDKAGFIKRQLVETRQITKHVAQILDSRMNTKYDENDKLIREVKVITLKSKLVSDFRKDFQFYKVREINNYHHAHDAYLNAVVGTALIKKYPKLESEFVYGDYKVYDVRKMIAKSEQEIGKATAKYFFYSNIMNFFKTEITLANGEIRKRPLIETNGETGEIVWDKGRDFATVRKVLSMPQVNIVKKTEVQTGGFSKESILPKRNSDKLIARKKDWDPKKYGGFDSPTVAYSVLVVAKVEKGKSKKLKSVKELLGITIMERSSFEKNPIDFLEAKGYKEVKKDLIIKLPKYSLFELENGRKRMLASAGELQKGNELALPSKYVNFLYLASHYEKLKGSPEDNEQKQLFVEQHKHYLDEIIEQISEFSKRVILADANLDKVLSAYNKHRDKPIREQAENIIHLFTLTNLGAPAAFKYFDTTIDRKRYTSTKEVLDATLIHQSITGLYETRIDLSQLGGDGGGGGGGGTAPLEEEYRLFLEAPIQNVTLLEQWKREIPKVWAEINPPGLASTQAPIHVQLLSTALPVRVRQYPITLEAKRSLRETIRKFRAAGILRPVHSPWNTPLLPVRKSGTSEYRMVQDLREVNKRVETIHPTVPNPYTLLSLLPPDRIWYSVLDLKDAFFCIPLAPESQLIFAFEWADAEEGESGQLTWTRLPQGFKNSPTLFNEALNRDLQGFRLDHPSVSLLQYVDDLLIAADTQAACLSATRDLLMTLAELGYRVSGKKAQLCQEEVTYLGFKIHKGSRSLSNSRTQAILQIPVPKTKRQVREFLGTIGYCRLWIPGFAELAQPLYAATRPGNDPLVWGEKEEEAFQSLKLALTQPPALALPSLDKPFQLFVEETSGAAKGVLTQALGPWKRPVAYLSKRLDPVAAGWPRCLRAIAAAALLTREASKLTFGQDIEITSSHNLESLLRSPPDKWLTNARITQYQVLLLDPPRVRFKQTAALNPATLLPETDDTLPIHHCLDTLDSLTSTRPDLTDQPLAQAEATLFTDGSSYIRDGKRYAGAAVVTLDSVIWAEPLPIGTSAQKAELIALTKALEWSKDKSVNIYTDSRYAFATLHVHGMIYRERGWLTAGGKAIKNAPEILALLTAVWLPKRVAVMHCKGHQKDDAPTSTGNRRADEVAREVAIRPLSTQATISAGKRTADGSEFEKRTADGSEFESPKKKAKVE

SEQ ID NO: 6245 - protein, 2095 aa, synthetic construct
MPAAKRVKLDGGDKKYSIGLDIGTNSVGWAVITDEYKVPSKKFKVLGNTDRHSIKKNLIGALLFDSGETAEATRLKRTARRRYTRRKNRICYLQEIFSNEMAKVDDSFFHRLEESFLVEEDKKHERHPIFGNIVDEVAYHEKYPTIYHLRKKLVDSTDKADLRLIYLALAHMIKFRGHFLIEGDLNPDNSDVDKLFIQLVQTYNQLFEENPINASGVDAKAILSARLSKSRRLENLIAQLPGEKKNGLFGNLIALSLGLTPNFKSNFDLAEDAKLQLSKDTYDDDLDNLLAQIGDQYADLFLAAKNLSDAILLSDILRVNTEITKAPLSASMIKRYDEHHQDLTLLKALVRQQLPEKYKEIFFDQSKNGYAGYIDGGASQEEFYKFIKPILEKMDGTEELLVKLNREDLLRKQRTFDNGSIPHQIHLGELHAILRRQEDFYPFLKDNREKIEKILTFRIPYYVGPLARGNSRFAWMTRKSEETITPWNFEEVVDKGASAQSFIERMTNFDKNLPNEKVLPKHSLLYEYFTVYNELTKVKYVTEGMRKPAFLSGEQKKAIVDLLFKTNRKVTVKQLKEDYFKKIECFDSVEISGVEDRFNASLGTYHDLLKIIKDKDFLDNEENEDILEDIVLTLTLFEDREMIEERLKTYAHLFDDKVMKQLKRRRYTGWGRLSRKLINGIRDKQSGKTILDFLKSDGFANRNFMQLIHDDSLTFKEDIQKAQVSGQGDSLHEHIANLAGSPAIKKGILQTVKVVDELVKVMGRHKPENIVIEMARENQTTQKGQKNSRERMKRIEEGIKELGSQILKEHPVENTQLQNEKLYLYYLQNGRDMYVDQELDINRLSDYDVDHIVPQSFLKDDSIDNKVLTRSDKARGKSDNVPSEEVVKKMKNYWRQLLNAKLITQRKFDNLTKAERGGLSELDKAGFIKRQLVETRQITKHVAQILDSRMNTKYDENDKLIREVKVITLKSKLVSDFRKDFQFYKVREINNYHHAHDAYLNAVVGTALIKKYPKLESEFVYGDYKVYDVRKMIAKSEQEIGKATAKYFFYSNIMNFFKTEITLANGEIRKRPLIETNGETGEIVWDKGRDFATVRKVLSMPQVNIVKKTEVQTGGFSKESILPKRNSDKLIARKKDWDPKKYGGFDSPTVAYSVLVVAKVEKGKSKKLKSVKELLGITIMERSSFEKNPIDFLEAKGYKEVKKDLIIKLPKYSLFELENGRKRMLASAGELQKGNELALPSKYVNFLYLASHYEKLKGSPEDNEQKQLFVEQHKHYLDEIIEQISEFSKRVILADANLDKVLSAYNKHRDKPIREQAENIIHLFTLTNLGAPAAFKYFDTTIDRKRYTSTKEVLDATLIHQSITGLYETRIDLSQLGGDGGGGGGGGTVSLQDEHRLFDIPVTTSLPDVWLQDFPQAWAETGGLGRAKCQAPIIIDLKPTAVPVSIKQYPMSLEAHMGIRQHIIKFLELGVLRPCRSPWNTPLLPVKKPGTQDYRPVQDLREINKRTVDIHPTVPNPYNLLSTLKPDYSWYTVLDLKDAFFCLPLAPQSQELFAFEWKDPERGISGQLTWTRLPQGFKNSPTLFNEALHRDLTDFRTQHPEVTLLQYVDDLLLAAPTKKACTQGTRHLLQELGEKGYRASAKKAQICQTKVTYLGYILSEGKRWLTPGRIETVARIPPPRNPREVREFLGTAGFCRLWIPGFAELAAPLYALTKPSTPFTWQTEHQLAFEALKKALLSAPALGLPDTSKPFTLFLDERQGIAKGVLTQKLGPWKRPVAYLSKKLDPVAAGWPPCLRIMAATAMLVKDSAKLTLGQPLTVITPHTLEAIVRQPPDRWITNARLTHYQALLLDTDRVQFGPPVTLNPATLLPVPENQPSPHDCRQVLAETHGTREDLKDQELPDADHTWYTDGSSYLDSGTRRAGAAVVDGHNTIWAQSLPPGTSAQKAELIALTKALELSKGKKANIYTDSRYAFATAHTHGSIYERRGWLTSEGKEIKNKAEIIALLKALFLPQEVAIIHCPGHQKGQDPVAVGNRQADRVARQAAMAEVLTLATEPDNTSHITAGKRTADGSEFEKRTADGSEFESPKKKAKVE

SEQ ID NO: 6246 - protein, 2087 aa, synthetic construct
MPAAKRVKLDGGDKKYSIGLDIGTNSVGWAVITDEYKVPSKKFKVLGNTDRHSIKKNLIGALLFDSGETAEATRLKRTARRRYTRRKNRICYLQEIFSNEMAKVDDSFFHRLEESFLVEEDKKHERHPIFGNIVDEVAYHEKYPTIYHLRKKLVDSTDKADLRLIYLALAHMIKFRGHFLIEGDLNPDNSDVDKLFIQLVQTYNQLFEENPINASGVDAKAILSARLSKSRRLENLIAQLPGEKKNGLFGNLIALSLGLTPNFKSNFDLAEDAKLQLSKDTYDDDLDNLLAQIGDQYADLFLAAKNLSDAILLSDILRVNTEITKAPLSASMIKRYDEHHQDLTLLKALVRQQLPEKYKEIFFDQSKNGYAGYIDGGASQEEFYKFIKPILEKMDGTEELLVKLNREDLLRKQRTFDNGSIPHQIHLGELHAILRRQEDFYPFLKDNREKIEKILTFRIPYYVGPLARGNSRFAWMTRKSEETITPWNFEEVVDKGASAQSFIERMTNFDKNLPNEKVLPKHSLLYEYFTVYNELTKVKYVTEGMRKPAFLSGEQKKAIVDLLFKTNRKVTVKQLKEDYFKKIECFDSVEISGVEDRFNASLGTYHDLLKIIKDKDFLDNEENEDILEDIVLTLTLFEDREMIEERLKTYAHLFDDKVMKQLKRRRYTGWGRLSRKLINGIRDKQSGKTILDFLKSDGFANRNFMQLIHDDSLTFKEDIQKAQVSGQGDSLHEHIANLAGSPAIKKGILQTVKVVDELVKVMGRHKPENIVIEMARENQTTQKGQKNSRERMKRIEEGIKELGSQILKEHPVENTQLQNEKLYLYYLQNGRDMYVDQELDINRLSDYDVDHIVPQSFLKDDSIDNKVLTRSDKARGKSDNVPSEEVVKKMKNYWRQLLNAKLITQRKFDNLTKAERGGLSELDKAGFIKRQLVETRQITKHVAQILDSRMNTKYDENDKLIREVKVITLKSKLVSDFRKDFQFYKVREINNYHHAHDAYLNAVVGTALIKKYPKLESEFVYGDYKVYDVRKMIAKSEQEIGKATAKYFFYSNIMNFFKTEITLANGEIRKRPLIETNGETGEIVWDKGRDFATVRKVLSMPQVNIVKKTEVQTGGFSKESILPKRNSDKLIARKKDWDPKKYGGFDSPTVAYSVLVVAKVEKGKSKKLKSVKELLGITIMERSSFEKNPIDFLEAKGYKEVKKDLIIKLPKYSLFELENGRKRMLASAGELQKGNELALPSKYVNFLYLASHYEKLKGSPEDNEQKQLFVEQHKHYLDEIIEQISEFSKRVILADANLDKVLSAYNKHRDKPIREQAENIIHLFTLTNLGAPAAFKYFDTTIDRKRYTSTKEVLDATLIHQSITGLYETRIDLSQLGGDGGGGGGGGVLNLEEEYRLHEKPVPSSIDPSWLQLFPTVWAERAGMGLANQVPPVVVELRSGASPVAVRQYPMSKEAREGIRPHIQKFLDLGVLVPCRSPWNTPLLPVKKPGTNDYRPVQDLREINKRVQDIHPTVPNPYNLLSSLPPSYTWYSVLDLKDAFFCLRLHPNSQPLFAFEWKDPEKGNTGQLTWTRLPQGFKNSPTLFNEALHRDLAPFRALNPQVVLLQYVDDLLVAAPTYEDCKKGTQKLLQELSKLGYRVSAKKAQLCQREVTYLGYLLKEGKRWLTPARKATVMKIPVPTTPRQVREFLGKAGFCRLFIPGFASLAAPLYPLTKPSIPFIWTEEHQQAFDHIKKALLSAPALALPDLTKPFTLYIDERAGVARGVLTQTLGPWRRPVAYLSKKLDPVASGWPTCLKAVAAVALLLKDADKLTLGQNVTVIASHSLESIVRQPPDRWMTNARMTHYQSLLLNERVSFAPPAVLNPATLLPVESEATPVHRCSEILAEETGTRRDLEDQPLPGVPTWYTDGSSFITEGKRRAGAPIVDGKRTVWASSLPEGTSAQKAELVALTQALRLAEGKNINIYTDSRYAFATAHIHGAIYKQRGWLTSAGKDIKNKEEILALLEAIHLPRRVAIIHCPGHQRGSNPVATGNRRADEAAKQAALSTRVLAGTTKPAGKRTADGSEFEKRTADGSEFESPKKKAKVE

SEQ ID NO: 6247 - protein, 2211 aa, synthetic construct
MPAAKRVKLDGGDKKYSIGLDIGTNSVGWAVITDEYKVPSKKFKVLGNTDRHSIKKNLIGALLFDSGETAEATRLKRTARRRYTRRKNRICYLQEIFSNEMAKVDDSFFHRLEESFLVEEDKKHERHPIFGNIVDEVAYHEKYPTIYHLRKKLVDSTDKADLRLIYLALAHMIKFRGHFLIEGDLNPDNSDVDKLFIQLVQTYNQLFEENPINASGVDAKAILSARLSKSRRLENLIAQLPGEKKNGLFGNLIALSLGLTPNFKSNFDLAEDAKLQLSKDTYDDDLDNLLAQIGDQYADLFLAAKNLSDAILLSDILRVNTEITKAPLSASMIKRYDEHHQDLTLLKALVRQQLPEKYKEIFFDQSKNGYAGYIDGGASQEEFYKFIKPILEKMDGTEELLVKLNREDLLRKQRTFDNGSIPHQIHLGELHAILRRQEDFYPFLKDNREKIEKILTFRIPYYVGPLARGNSRFAWMTRKSEETITPWNFEEVVDKGASAQSFIERMTNFDKNLPNEKVLPKHSLLYEYFTVYNELTKVKYVTEGMRKPAFLSGEQKKAIVDLLFKTNRKVTVKQLKEDYFKKIECFDSVEISGVEDRFNASLGTYHDLLKIIKDKDFLDNEENEDILEDIVLTLTLFEDREMIEERLKTYAHLFDDKVMKQLKRRRYTGWGRLSRKLINGIRDKQSGKTILDFLKSDGFANRNFMQLIHDDSLTFKEDIQKAQVSGQGDSLHEHIANLAGSPAIKKGILQTVKVVDELVKVMGRHKPENIVIEMARENQTTQKGQKNSRERMKRIEEGIKELGSQILKEHPVENTQLQNEKLYLYYLQNGRDMYVDQELDINRLSDYDVDHIVPQSFLKDDSIDNKVLTRSDKARGKSDNVPSEEVVKKMKNYWRQLLNAKLITQRKFDNLTKAERGGLSELDKAGFIKRQLVETRQITKHVAQILDSRMNTKYDENDKLIREVKVITLKSKLVSDFRKDFQFYKVREINNYHHAHDAYLNAVVGTALIKKYPKLESEFVYGDYKVYDVRKMIAKSEQEIGKATAKYFFYSNIMNFFKTEITLANGEIRKRPLIETNGETGEIVWDKGRDFATVRKVLSMPQVNIVKKTEVQTGGFSKESILPKRNSDKLIARKKDWDPKKYGGFDSPTVAYSVLVVAKVEKGKSKKLKSVKELLGITIMERSSFEKNPIDFLEAKGYKEVKKDLIIKLPKYSLFELENGRKRMLASAGELQKGNELALPSKYVNFLYLASHYEKLKGSPEDNEQKQLFVEQHKHYLDEIIEQISEFSKRVILADANLDKVLSAYNKHRDKPIREQAENIIHLFTLTNLGAPAAFKYFDTTIDRKRYTSTKEVLDATLIHQSITGLYETRIDLSQLGGDGGGGGGGGTLGDQGSRGSDPLPEPRVTLTVEGIPTEFLVNTGAEHSVLTKPMGKMGSKRTVVAGATGSKVYPWTTKRLLKIGQKQVTHSFLVIPECPAPLLGRDLLTKLKAQIQFSTEGPQVTWEDRPAMCLVLNLEEEYRLHEKPVPPSIDPSWLQLFPMVWAEKAGMGLANQVPPVVVELKSDASPVAVRQYPMSKEAREGIRPHIQRFLDLGILVPCQSPWNTPLLPVKKPGTNDYRPVQDLREVNKRVQDIHPTVPNPYNLLSSLPPSHTWYSVLDLKDAFFCLKLHPNSQPLFAFEWRDPEKGNTGQLTWTRLPQGFKNSPTLFNEALHRDLASFRALNPQVVMLQYVDDLLVAAPTYRDCKEGTRRLLQELSKLGYRVSAKKAQLCREEVTYLGYLLKGGKRWLTPARKATVMKIPTPTTPRQVREFLGTAGFCRLWIPGFASLAAPLYPLTRPKVPFTWTEAHQEAFGRIKEALLSAPALALPDLTKPFALYVDEKEGVARGVLTQTLGPWRRPVAYLSKKLDPVASGWPTCLKAIAAVALLLKDADKLTLGQNVLVIAPHNLESIVRQPPDRWMTNARMTHYQSLLLNERVSFAPPAILNPATLLPVESDDTPIHICSEILAEETGTRPDLRDQPLPGVPAWYTDGSSFIMDGRRQAGAAIVDNKRTVWASNLPEGTSAQKAELIALTQALRLAEGKSINIYTDSRYAFATAHVHGAIYKQRGWLTSAGKDIKNKEEILALLEAIHLPKRVAIIHCPGHQRGTDPVATGNRKADEAAKQAAQSTRILTETTKNAGKRTADGSEFEKRTADGSEFESPKKKAKVE

SEQ ID NO: 6248 - protein, 2089 aa, synthetic construct
MPAAKRVKLDGGDKKYSIGLDIGTNSVGWAVITDEYKVPSKKFKVLGNTDRHSIKKNLIGALLFDSGETAEATRLKRTARRRYTRRKNRICYLQEIFSNEMAKVDDSFFHRLEESFLVEEDKKHERHPIFGNIVDEVAYHEKYPTIYHLRKKLVDSTDKADLRLIYLALAHMIKFRGHFLIEGDLNPDNSDVDKLFIQLVQTYNQLFEENPINASGVDAKAILSARLSKSRRLENLIAQLPGEKKNGLFGNLIALSLGLTPNFKSNFDLAEDAKLQLSKDTYDDDLDNLLAQIGDQYADLFLAAKNLSDAILLSDILRVNTEITKAPLSASMIKRYDEHHQDLTLLKALVRQQLPEKYKEIFFDQSKNGYAGYIDGGASQEEFYKFIKPILEKMDGTEELLVKLNREDLLRKQRTFDNGSIPHQIHLGELHAILRRQEDFYPFLKDNREKIEKILTFRIPYYVGPLARGNSRFAWMTRKSEETITPWNFEEVVDKGASAQSFIERMTNFDKNLPNEKVLPKHSLLYEYFTVYNELTKVKYVTEGMRKPAFLSGEQKKAIVDLLFKTNRKVTVKQLKEDYFKKIECFDSVEISGVEDRFNASLGTYHDLLKIIKDKDFLDNEENEDILEDIVLTLTLFEDREMIEERLKTYAHLFDDKVMKQLKRRRYTGWGRLSRKLINGIRDKQSGKTILDFLKSDGFANRNFMQLIHDDSLTFKEDIQKAQVSGQGDSLHEHIANLAGSPAIKKGILQTVKVVDELVKVMGRHKPENIVIEMARENQTTQKGQKNSRERMKRIEEGIKELGSQILKEHPVENTQLQNEKLYLYYLQNGRDMYVDQELDINRLSDYDVDHIVPQSFLKDDSIDNKVLTRSDKARGKSDNVPSEEVVKKMKNYWRQLLNAKLITQRKFDNLTKAERGGLSELDKAGFIKRQLVETRQITKHVAQILDSRMNTKYDENDKLIREVKVITLKSKLVSDFRKDFQFYKVREINNYHHAHDAYLNAVVGTALIKKYPKLESEFVYGDYKVYDVRKMIAKSEQEIGKATAKYFFYSNIMNFFKTEITLANGEIRKRPLIETNGETGEIVWDKGRDFATVRKVLSMPQVNIVKKTEVQTGGFSKESILPKRNSDKLIARKKDWDPKKYGGFDSPTVAYSVLVVAKVEKGKSKKLKSVKELLGITIMERSSFEKNPIDFLEAKGYKEVKKDLIIKLPKYSLFELENGRKRMLASAGELQKGNELALPSKYVNFLYLASHYEKLKGSPEDNEQKQLFVEQHKHYLDEIIEQISEFSKRVILADANLDKVLSAYNKHRDKPIREQAENIIHLFTLTNLGAPAAFKYFDTTIDRKRYTSTKEVLDATLIHQSITGLYETRIDLSQLGGDGGGGGGGGTLNLEDEYRLYETSAEPEVSPGSTWLSDFPQAWAETGGMGLAVRQAPLIIPLKATSTPVSIKQYPMSQEAKLGIKPHIQRLLDQGILVPCQSPWNTPLLPVKKPGTNDYRPVQDLREVNKRVEDIHPTVPNPYNLLSGLPPSHRWYTVLDLKDAFFCLRLHPTSQPLFAFEWRDPGMGISGQLTWTRLPQGFKNSPTLFNEALHRDLADFRIQHPDLILLQYVDDILLAATSELDCQQGTRALLLTLGNLGYRASAKKAQLCQKQVKYLGYLLKEGQRWLTEARKETVMGQPTPKTPRQLREFLGKAGFCRLFIPGFAEMAAPLYPLTKPGTLFNWGPDQQKAYQEIKQALLTAPALGLPDLTKPFELFVDEKQGYAKGVLTQKLGPWRRPVAYLSKKLDPVAAGWPPCLRMVAAIAVLRKDAGKLTMGQPLVILAPHAVEALVKQPPDRWLSNARMTHYQAMLLDTDRVQFGPVVALNPATLLPLPEEGAPHDCLEILAETHGTRPDLTDQPIPDADHTWYTDGSSFLQEGQRKAGAAVTTETEVIWARALPAGTSAQRAELIALTQALKMAEGKRLNVYTDSRYAFATAHIHGEIYRRRGWLTSEGREIKNKSEILALLKALFLPKRLSIIHCLGHQKGDSAEARGNRLADQAAREAAIKTPPDTSTLLAGKRTADGSEFEKRTADGSEFESPKKKAKVE

SEQ ID NO: 6249 - protein, 2089 aa, synthetic construct
MPAAKRVKLDGGDKKYSIGLDIGTNSVGWAVITDEYKVPSKKFKVLGNTDRHSIKKNLIGALLFDSGETAEATRLKRTARRRYTRRKNRICYLQEIFSNEMAKVDDSFFHRLEESFLVEEDKKHERHPIFGNIVDEVAYHEKYPTIYHLRKKLVDSTDKADLRLIYLALAHMIKFRGHFLIEGDLNPDNSDVDKLFIQLVQTYNQLFEENPINASGVDAKAILSARLSKSRRLENLIAQLPGEKKNGLFGNLIALSLGLTPNFKSNFDLAEDAKLQLSKDTYDDDLDNLLAQIGDQYADLFLAAKNLSDAILLSDILRVNTEITKAPLSASMIKRYDEHHQDLTLLKALVRQQLPEKYKEIFFDQSKNGYAGYIDGGASQEEFYKFIKPILEKMDGTEELLVKLNREDLLRKQRTFDNGSIPHQIHLGELHAILRRQEDFYPFLKDNREKIEKILTFRIPYYVGPLARGNSRFAWMTRKSEETITPWNFEEVVDKGASAQSFIERMTNFDKNLPNEKVLPKHSLLYEYFTVYNELTKVKYVTEGMRKPAFLSGEQKKAIVDLLFKTNRKVTVKQLKEDYFKKIECFDSVEISGVEDRFNASLGTYHDLLKIIKDKDFLDNEENEDILEDIVLTLTLFEDREMIEERLKTYAHLFDDKVMKQLKRRRYTGWGRLSRKLINGIRDKQSGKTILDFLKSDGFANRNFMQLIHDDSLTFKEDIQKAQVSGQGDSLHEHIANLAGSPAIKKGILQTVKVVDELVKVMGRHKPENIVIEMARENQTTQKGQKNSRERMKRIEEGIKELGSQILKEHPVENTQLQNEKLYLYYLQNGRDMYVDQELDINRLSDYDVDHIVPQSFLKDDSIDNKVLTRSDKARGKSDNVPSEEVVKKMKNYWRQLLNAKLITQRKFDNLTKAERGGLSELDKAGFIKRQLVETRQITKHVAQILDSRMNTKYDENDKLIREVKVITLKSKLVSDFRKDFQFYKVREINNYHHAHDAYLNAVVGTALIKKYPKLESEFVYGDYKVYDVRKMIAKSEQEIGKATAKYFFYSNIMNFFKTEITLANGEIRKRPLIETNGETGEIVWDKGRDFATVRKVLSMPQVNIVKKTEVQTGGFSKESILPKRNSDKLIARKKDWDPKKYGGFDSPTVAYSVLVVAKVEKGKSKKLKSVKELLGITIMERSSFEKNPIDFLEAKGYKEVKKDLIIKLPKYSLFELENGRKRMLASAGELQKGNELALPSKYVNFLYLASHYEKLKGSPEDNEQKQLFVEQHKHYLDEIIEQISEFSKRVILADANLDKVLSAYNKHRDKPIREQAENIIHLFTLTNLGAPAAFKYFDTTIDRKRYTSTKEVLDATLIHQSITGLYETRIDLSQLGGDGGGGGGGGLGIEDEYRLHETSTEPDVSLGSTWLSDFPQAWAETGGMGLAVRQAPLIIPLKATSTPVSIQQYPMSHEARLGIKPHIQRLLDQGILVPCQSPWNTPLLPVKKPGTNDYRPVQDLREVNKRVEDIHPTVPNPYNLLSGLPPSHQWYTVLDLKDAFFCLRLHPTSQPLFAFEWRDPGMGISGQLTWTRLPQGFKNSPTLFNEALHRDLADFRIQHPDLILLQYVDDILLAATSELDCQQGTRALLQTLGDLGYRASAKKAQICQKQVKYLGYLLREGQRWLTEARKETVMGQPVPKTPRQLREFLGKAGFCRLFIPGFAEMAAPLYPLTKPGTLFSWGPDQQKAYQEIKQALLTAPALGLPDLTKPFELFVDEKQGYAKGVLTQKLGPWRRPVAYLSKKLDPVAAGWPPCLRMVAAIAVLTKDAGKLTMGQPLVILAPHAVEALVKQPPDRWLSNARMTHYQAMLLDTDRVQFGPVVALNPATLLPLPEEGAPHDCLEILAETHGTRPDLTDQPIPDADHTWYTDGSSFLQEGQRKAGAAVTTETEVIWAGALPAGTSAQRAELIALTQALKMAEGKRLNVYTDSRYAFATAHIHGEIYRRRGWLTSEGREIKNKSEILALLKALFLPKRLSIIHCLGHQKGDSAEARGNRLADQAAREAAIKTPPDTSTLLIAGKRTADGSEFEKRTADGSEFESPKKKAKVE

SEQ ID NO: 6250 - protein, 2092 aa, synthetic construct
MPAAKRVKLDGGDKKYSIGLDIGTNSVGWAVITDEYKVPSKKFKVLGNTDRHSIKKNLIGALLFDSGETAEATRLKRTARRRYTRRKNRICYLQEIFSNEMAKVDDSFFHRLEESFLVEEDKKHERHPIFGNIVDEVAYHEKYPTIYHLRKKLVDSTDKADLRLIYLALAHMIKFRGHFLIEGDLNPDNSDVDKLFIQLVQTYNQLFEENPINASGVDAKAILSARLSKSRRLENLIAQLPGEKKNGLFGNLIALSLGLTPNFKSNFDLAEDAKLQLSKDTYDDDLDNLLAQIGDQYADLFLAAKNLSDAILLSDILRVNTEITKAPLSASMIKRYDEHHQDLTLLKALVRQQLPEKYKEIFFDQSKNGYAGYIDGGASQEEFYKFIKPILEKMDGTEELLVKLNREDLLRKQRTFDNGSIPHQIHLGELHAILRRQEDFYPFLKDNREKIEKILTFRIPYYVGPLARGNSRFAWMTRKSEETITPWNFEEVVDKGASAQSFIERMTNFDKNLPNEKVLPKHSLLYEYFTVYNELTKVKYVTEGMRKPAFLSGEQKKAIVDLLFKTNRKVTVKQLKEDYFKKIECFDSVEISGVEDRFNASLGTYHDLLKIIKDKDFLDNEENEDILEDIVLTLTLFEDREMIEERLKTYAHLFDDKVMKQLKRRRYTGWGRLSRKLINGIRDKQSGKTILDFLKSDGFANRNFMQLIHDDSLTFKEDIQKAQVSGQGDSLHEHIANLAGSPAIKKGILQTVKVVDELVKVMGRHKPENIVIEMARENQTTQKGQKNSRERMKRIEEGIKELGSQILKEHPVENTQLQNEKLYLYYLQNGRDMYVDQELDINRLSDYDVDHIVPQSFLKDDSIDNKVLTRSDKARGKSDNVPSEEVVKKMKNYWRQLLNAKLITQRKFDNLTKAERGGLSELDKAGFIKRQLVETRQITKHVAQILDSRMNTKYDENDKLIREVKVITLKSKLVSDFRKDFQFYKVREINNYHHAHDAYLNAVVGTALIKKYPKLESEFVYGDYKVYDVRKMIAKSEQEIGKATAKYFFYSNIMNFFKTEITLANGEIRKRPLIETNGETGEIVWDKGRDFATVRKVLSMPQVNIVKKTEVQTGGFSKESILPKRNSDKLIARKKDWDPKKYGGFDSPTVAYSVLVVAKVEKGKSKKLKSVKELLGITIMERSSFEKNPIDFLEAKGYKEVKKDLIIKLPKYSLFELENGRKRMLASAGELQKGNELALPSKYVNFLYLASHYEKLKGSPEDNEQKQLFVEQHKHYLDEIIEQISEFSKRVILADANLDKVLSAYNKHRDKPIREQAENIIHLFTLTNLGAPAAFKYFDTTIDRKRYTSTKEVLDATLIHQSITGLYETRIDLSQLGGDGGGGGGGGGTAPLEEEYRLFLEAPIQNVTLLEQWKREIPKVWAEINPPGLASTQAPIHVQLLSTALPVRVRQYPITLEAKRSLRETIRKFRAAGILRPVHSPWNTPLLPVRKSGTSEYRMVQDLREVNKRVETIHPTVPNPYTLLSLLPPDRIWYSVLDLKDAFFCIPLAPESQLIFAFEWADAEEGESGQLTWTRLPQGFKNSPTLFNEALNRDLQGFRLDHPSVSLLQYVDDLLIAADTQAACLSATRDLLMTLAELGYRVSGKKAQLCQEEVTYLGFKIHKGSRSLSNSRTQAILQIPVPKTKRQVREFLGTIGYCRLWIPGFAELAQPLYAATRPGNDPLVWGEKEEEAFQSLKLALTQPPALALPSLDKPFQLFVEETSGAAKGVLTQALGPWKRPVAYLSKRLDPVAAGWPRCLRAIAAAALLTREASKLTFGQDIEITSSHNLESLLRSPPDKWLTNARITQYQVLLLDPPRVRFKQTAALNPATLLPETDDTLPIHHCLDTLDSLTSTRPDLTDQPLAQAEATLFTDGSSYIRDGKRYAGAAVVTLDSVIWAEPLPIGTSAQKAELIALTKALEWSKDKSVNIYTDSRYAFATLHVHGMIYRERGWLTAGGKAIKNAPEILALLTAVWLPKRVAVMHCKGHQKDDAPTSTGNRRADEVAREVAIRPLSTQATISAGKRTADGSEFEKRTADGSEFESPKKKAKVE

SEQ ID NO: 6251 - protein, 2212 aa, synthetic construct
MPAAKRVKLDGGDKKYSIGLDIGTNSVGWAVITDEYKVPSKKFKVLGNTDRHSIKKNLIGALLFDSGETAEATRLKRTARRRYTRRKNRICYLQEIFSNEMAKVDDSFFHRLEESFLVEEDKKHERHPIFGNIVDEVAYHEKYPTIYHLRKKLVDSTDKADLRLIYLALAHMIKFRGHFLIEGDLNPDNSDVDKLFIQLVQTYNQLFEENPINASGVDAKAILSARLSKSRRLENLIAQLPGEKKNGLFGNLIALSLGLTPNFKSNFDLAEDAKLQLSKDTYDDDLDNLLAQIGDQYADLFLAAKNLSDAILLSDILRVNTEITKAPLSASMIKRYDEHHQDLTLLKALVRQQLPEKYKEIFFDQSKNGYAGYIDGGASQEEFYKFIKPILEKMDGTEELLVKLNREDLLRKQRTFDNGSIPHQIHLGELHAILRRQEDFYPFLKDNREKIEKILTFRIPYYVGPLARGNSRFAWMTRKSEETITPWNFEEVVDKGASAQSFIERMTNFDKNLPNEKVLPKHSLLYEYFTVYNELTKVKYVTEGMRKPAFLSGEQKKAIVDLLFKTNRKVTVKQLKEDYFKKIECFDSVEISGVEDRFNASLGTYHDLLKIIKDKDFLDNEENEDILEDIVLTLTLFEDREMIEERLKTYAHLFDDKVMKQLKRRRYTGWGRLSRKLINGIRDKQSGKTILDFLKSDGFANRNFMQLIHDDSLTFKEDIQKAQVSGQGDSLHEHIANLAGSPAIKKGILQTVKVVDELVKVMGRHKPENIVIEMARENQTTQKGQKNSRERMKRIEEGIKELGSQILKEHPVENTQLQNEKLYLYYLQNGRDMYVDQELDINRLSDYDVDHIVPQSFLKDDSIDNKVLTRSDKARGKSDNVPSEEVVKKMKNYWRQLLNAKLITQRKFDNLTKAERGGLSELDKAGFIKRQLVETRQITKHVAQILDSRMNTKYDENDKLIREVKVITLKSKLVSDFRKDFQFYKVREINNYHHAHDAYLNAVVGTALIKKYPKLESEFVYGDYKVYDVRKMIAKSEQEIGKATAKYFFYSNIMNFFKTEITLANGEIRKRPLIETNGETGEIVWDKGRDFATVRKVLSMPQVNIVKKTEVQTGGFSKESILPKRNSDKLIARKKDWDPKKYGGFDSPTVAYSVLVVAKVEKGKSKKLKSVKELLGITIMERSSFEKNPIDFLEAKGYKEVKKDLIIKLPKYSLFELENGRKRMLASAGELQKGNELALPSKYVNFLYLASHYEKLKGSPEDNEQKQLFVEQHKHYLDEIIEQISEFSKRVILADANLDKVLSAYNKHRDKPIREQAENIIHLFTLTNLGAPAAFKYFDTTIDRKRYTSTKEVLDATLIHQSITGLYETRIDLSQLGGDGGGGGGGGGTLGDQGSRGSDPLPEPRVTLTVEGIPTEFLVNTGAEHSVLTKPMGKMGSKRTVVAGATGSKVYPWTTKRLLKIGQKQVTHSFLVIPECPAPLLGRDLLTKLKAQIQFSTEGPQVTWEDRPAMCLVLNLEEEYRLHEKPVPPSIDPSWLQLFPMVWAEKAGMGLANQVPPVVVELKSDASPVAVRQYPMSKEAREGIRPHIQRFLDLGILVPCQSPWNTPLLPVKKPGTNDYRPVQDLREVNKRVQDIHPTVPNPYNLLSSLPPSHTWYSVLDLKDAFFCLKLHPNSQPLFAFEWRDPEKGNTGQLTWTRLPQGFKNSPTLFNEALHRDLASFRALNPQVVMLQYVDDLLVAAPTYRDCKEGTRRLLQELSKLGYRVSAKKAQLCREEVTYLGYLLKGGKRWLTPARKATVMKIPTPTTPRQVREFLGTAGFCRLWIPGFASLAAPLYPLTRPKVPFTWTEAHQEAFGRIKEALLSAPALALPDLTKPFALYVDEKEGVARGVLTQTLGPWRRPVAYLSKKLDPVASGWPTCLKAIAAVALLLKDADKLTLGQNVLVIAPHNLESIVRQPPDRWMTNARMTHYQSLLLNERVSFAPPAILNPATLLPVESDDTPIHICSEILAEETGTRPDLRDQPLPGVPAWYTDGSSFIMDGRRQAGAAIVDNKRTVWASNLPEGTSAQKAELIALTQALRLAEGKSINIYTDSRYAFATAHVHGAIYKQRGWLTSAGKDIKNKEEILALLEAIHLPKRVAIIHCPGHQRGTDPVATGNRKADEAAKQAAQSTRILTETTKNAGKRTADGSEFEKRTADGSEFESPKKKAKVE

SEQ ID NO: 6252 - protein, 2088 aa, synthetic construct
MPAAKRVKLDGGDKKYSIGLDIGTNSVGWAVITDEYKVPSKKFKVLGNTDRHSIKKNLIGALLFDSGETAEATRLKRTARRRYTRRKNRICYLQEIFSNEMAKVDDSFFHRLEESFLVEEDKKHERHPIFGNIVDEVAYHEKYPTIYHLRKKLVDSTDKADLRLIYLALAHMIKFRGHFLIEGDLNPDNSDVDKLFIQLVQTYNQLFEENPINASGVDAKAILSARLSKSRRLENLIAQLPGEKKNGLFGNLIALSLGLTPNFKSNFDLAEDAKLQLSKDTYDDDLDNLLAQIGDQYADLFLAAKNLSDAILLSDILRVNTEITKAPLSASMIKRYDEHHQDLTLLKALVRQQLPEKYKEIFFDQSKNGYAGYIDGGASQEEFYKFIKPILEKMDGTEELLVKLNREDLLRKQRTFDNGSIPHQIHLGELHAILRRQEDFYPFLKDNREKIEKILTFRIPYYVGPLARGNSRFAWMTRKSEETITPWNFEEVVDKGASAQSFIERMTNFDKNLPNEKVLPKHSLLYEYFTVYNELTKVKYVTEGMRKPAFLSGEQKKAIVDLLFKTNRKVTVKQLKEDYFKKIECFDSVEISGVEDRFNASLGTYHDLLKIIKDKDFLDNEENEDILEDIVLTLTLFEDREMIEERLKTYAHLFDDKVMKQLKRRRYTGWGRLSRKLINGIRDKQSGKTILDFLKSDGFANRNFMQLIHDDSLTFKEDIQKAQVSGQGDSLHEHIANLAGSPAIKKGILQTVKVVDELVKVMGRHKPENIVIEMARENQTTQKGQKNSRERMKRIEEGIKELGSQILKEHPVENTQLQNEKLYLYYLQNGRDMYVDQELDINRLSDYDVDHIVPQSFLKDDSIDNKVLTRSDKARGKSDNVPSEEVVKKMKNYWRQLLNAKLITQRKFDNLTKAERGGLSELDKAGFIKRQLVETRQITKHVAQILDSRMNTKYDENDKLIREVKVITLKSKLVSDFRKDFQFYKVREINNYHHAHDAYLNAVVGTALIKKYPKLESEFVYGDYKVYDVRKMIAKSEQEIGKATAKYFFYSNIMNFFKTEITLANGEIRKRPLIETNGETGEIVWDKGRDFATVRKVLSMPQVNIVKKTEVQTGGFSKESILPKRNSDKLIARKKDWDPKKYGGFDSPTVAYSVLVVAKVEKGKSKKLKSVKELLGITIMERSSFEKNPIDFLEAKGYKEVKKDLIIKLPKYSLFELENGRKRMLASAGELQKGNELALPSKYVNFLYLASHYEKLKGSPEDNEQKQLFVEQHKHYLDEIIEQISEFSKRVILADANLDKVLSAYNKHRDKPIREQAENIIHLFTLTNLGAPAAFKYFDTTIDRKRYTSTKEVLDATLIHQSITGLYETRIDLSQLGGDGGGGGGGGGVLNLEEEYRLHEKPVPSSIDPSWLQLFPTVWAERAGMGLANQVPPVVVELRSGASPVAVRQYPMSKEAREGIRPHIQRFLDLGVLVPCQSPWNTPLLPVKKPGTNDYRPVQDLREINKRVQDIHPTVPNPYNLLSSLPPSHTWYSVLDLKDAFFCLKLHPNSQPLFAFEWRDPEKGNTGQLTWTRLPQGFKNSPTLFDEALHRDLAPFRALNPQVVLLQYVDDLLVAAPTYRDCKEGTQKLLQELSKLGYRVSAKKAQLCQKEVTYLGYLLKEGKRWLTPARKATVMKIPPPTTPRQVREFLGTAGFCRLWIPGFASLAAPLYPLTKESIPFIWTEEHQKAFDRIKEALLSAPALALPDLTKPFTLYVDERAGVARGVLTQTLGPWRRPVAYLSKKLDPVASGWPTCLKAVAAVALLLKDADKLTLGQNVTVIASHSLESIVRQPPDRWMTNARMTHYQSLLLNERVSFAPPAVLNPATLLPVESEATPVHRCSEILAEETGTRRDLKDQPLPGVPAWYTDGSSFIAEGKRRAGAAIVDGKRTVWASSLPEGTSAQKAELVALTQALRLAEGKDINIYTDSRYAFATAHIHGAIYKQRGLLTSAGKDIKNKEEILALLEAIHLPKRVAIIHCPGHQKGNDPVATGNRRADEAAKQAALSTRVLAETTKPAGKRTADGSEFEKRTADGSEFESPKKKAKVE

SEQ ID NO: 6253 - protein, 2090 aa, synthetic construct
MPAAKRVKLDGGDKKYSIGLDIGTNSVGWAVITDEYKVPSKKFKVLGNTDRHSIKKNLIGALLFDSGETAEATRLKRTARRRYTRRKNRICYLQEIFSNEMAKVDDSFFHRLEESFLVEEDKKHERHPIFGNIVDEVAYHEKYPTIYHLRKKLVDSTDKADLRLIYLALAHMIKFRGHFLIEGDLNPDNSDVDKLFIQLVQTYNQLFEENPINASGVDAKAILSARLSKSRRLENLIAQLPGEKKNGLFGNLIALSLGLTPNFKSNFDLAEDAKLQLSKDTYDDDLDNLLAQIGDQYADLFLAAKNLSDAILLSDILRVNTEITKAPLSASMIKRYDEHHQDLTLLKALVRQQLPEKYKEIFFDQSKNGYAGYIDGGASQEEFYKFIKPILEKMDGTEELLVKLNREDLLRKQRTFDNGSIPHQIHLGELHAILRRQEDFYPFLKDNREKIEKILTFRIPYYVGPLARGNSRFAWMTRKSEETITPWNFEEVVDKGASAQSFIERMTNFDKNLPNEKVLPKHSLLYEYFTVYNELTKVKYVTEGMRKPAFLSGEQKKAIVDLLFKTNRKVTVKQLKEDYFKKIECFDSVEISGVEDRFNASLGTYHDLLKIIKDKDFLDNEENEDILEDIVLTLTLFEDREMIEERLKTYAHLFDDKVMKQLKRRRYTGWGRLSRKLINGIRDKQSGKTILDFLKSDGFANRNFMQLIHDDSLTFKEDIQKAQVSGQGDSLHEHIANLAGSPAIKKGILQTVKVVDELVKVMGRHKPENIVIEMARENQTTQKGQKNSRERMKRIEEGIKELGSQILKEHPVENTQLQNEKLYLYYLQNGRDMYVDQELDINRLSDYDVDHIVPQSFLKDDSIDNKVLTRSDKARGKSDNVPSEEVVKKMKNYWRQLLNAKLITQRKFDNLTKAERGGLSELDKAGFIKRQLVETRQITKHVAQILDSRMNTKYDENDKLIREVKVITLKSKLVSDFRKDFQFYKVREINNYHHAHDAYLNAVVGTALIKKYPKLESEFVYGDYKVYDVRKMIAKSEQEIGKATAKYFFYSNIMNFFKTEITLANGEIRKRPLIETNGETGEIVWDKGRDFATVRKVLSMPQVNIVKKTEVQTGGFSKESILPKRNSDKLIARKKDWDPKKYGGFDSPTVAYSVLVVAKVEKGKSKKLKSVKELLGITIMERSSFEKNPIDFLEAKGYKEVKKDLIIKLPKYSLFELENGRKRMLASAGELQKGNELALPSKYVNFLYLASHYEKLKGSPEDNEQKQLFVEQHKHYLDEIIEQISEFSKRVILADANLDKVLSAYNKHRDKPIREQAENIIHLFTLTNLGAPAAFKYFDTTIDRKRYTSTKEVLDATLIHQSITGLYETRIDLSQLGGDGGGGGGGGGTLNIEDEYRLHETSKEPDVPLGSTWLSDFPQAWAETGGMGLAVRQAPLIIPLKATSTPVSIKQYPMSQEARLGIKPHIQRLLDQGILVPCQSPWNTPLLPVKKPGTNDYRPVQDLREVNKRVEDIHPTVPNPYNLLSGLPPSHQWYTVLDLKDAFFCLRLHPTSQPLFAFEWRDPEMGISGQLTWTRLPQGFKNSPTLFNEALHRDLADFRIQHPDLILLQYVDDLLLAATSEQDCQRGTRALLQTLGNLGYRASAKKAQICQKQVKYLGYLLKEGQRWLTEARKETVMGQPTPKTPRQLREFLGKAGFCRLFIPGFAEMAAPLYPLTKPGTLFNWGPDQQKAYQEIKQALLTAPALGLPDLTKPFELFVDEKQGYAKGVLTQKLGPWRRPVAYLSKKLDPVAAGWPPCLRMVAAIAVLTKDAGKLTMGQPLVILAPHAVEALVKQPPDRWLSNARMTHYQAMLLDTDRVQFGPVVALNPATLLPLPEKEAPHDCLEILAETHGTRPDLTDQPIPDADYTWYTDGSSFLQEGQRRAGAAVTTETEVIWARALPAGTSAQRAELIALTQALKMAEGKKLNVYTDSRYAFATAHVHGEIYRRRGWLTSEGREIKNKNEILALLKALFLPKRLSIIHCPGHQKGNSAEARGNRMADQAAREAAMKAVLETSTLLAGKRTADGSEFEKRTADGSEFESPKKKAKVE

SEQ ID NO: 6254 - protein, 2093 aa, synthetic construct
MPAAKRVKLDGGDKKYSIGLDIGTNSVGWAVITDEYKVPSKKFKVLGNTDRHSIKKNLIGALLFDSGETAEATRLKRTARRRYTRRKNRICYLQEIFSNEMAKVDDSFFHRLEESFLVEEDKKHERHPIFGNIVDEVAYHEKYPTIYHLRKKLVDSTDKADLRLIYLALAHMIKFRGHFLIEGDLNPDNSDVDKLFIQLVQTYNQLFEENPINASGVDAKAILSARLSKSRRLENLIAQLPGEKKNGLFGNLIALSLGLTPNFKSNFDLAEDAKLQLSKDTYDDDLDNLLAQIGDQYADLFLAAKNLSDAILLSDILRVNTEITKAPLSASMIKRYDEHHQDLTLLKALVRQQLPEKYKEIFFDQSKNGYAGYIDGGASQEEFYKFIKPILEKMDGTEELLVKLNREDLLRKQRTFDNGSIPHQIHLGELHAILRRQEDFYPFLKDNREKIEKILTFRIPYYVGPLARGNSRFAWMTRKSEETITPWNFEEVVDKGASAQSFIERMTNFDKNLPNEKVLPKHSLLYEYFTVYNELTKVKYVTEGMRKPAFLSGEQKKAIVDLLFKTNRKVTVKQLKEDYFKKIECFDSVEISGVEDRFNASLGTYHDLLKIIKDKDFLDNEENEDILEDIVLTLTLFEDREMIEERLKTYAHLFDDKVMKQLKRRRYTGWGRLSRKLINGIRDKQSGKTILDFLKSDGFANRNFMQLIHDDSLTFKEDIQKAQVSGQGDSLHEHIANLAGSPAIKKGILQTVKVVDELVKVMGRHKPENIVIEMARENQTTQKGQKNSRERMKRIEEGIKELGSQILKEHPVENTQLQNEKLYLYYLQNGRDMYVDQELDINRLSDYDVDHIVPQSFLKDDSIDNKVLTRSDKARGKSDNVPSEEVVKKMKNYWRQLLNAKLITQRKFDNLTKAERGGLSELDKAGFIKRQLVETRQITKHVAQILDSRMNTKYDENDKLIREVKVITLKSKLVSDFRKDFQFYKVREINNYHHAHDAYLNAVVGTALIKKYPKLESEFVYGDYKVYDVRKMIAKSEQEIGKATAKYFFYSNIMNFFKTEITLANGEIRKRPLIETNGETGEIVWDKGRDFATVRKVLSMPQVNIVKKTEVQTGGFSKESILPKRNSDKLIARKKDWDPKKYGGFDSPTVAYSVLVVAKVEKGKSKKLKSVKELLGITIMERSSFEKNPIDFLEAKGYKEVKKDLIIKLPKYSLFELENGRKRMLASAGELQKGNELALPSKYVNFLYLASHYEKLKGSPEDNEQKQLFVEQHKHYLDEIIEQISEFSKRVILADANLDKVLSAYNKHRDKPIREQAENIIHLFTLTNLGAPAAFKYFDTTIDRKRYTSTKEVLDATLIHQSITGLYETRIDLSQLGGDGGGGGGGGGGTAPLEEEYRLFLEAPIQNVTLLEQWKREIPKVWAEINPPGLASTQAPIHVQLLSTALPVRVRQYPITLEAKRSLRETIRKFRAAGILRPVHSPWNTPLLPVRKSGTSEYRMVQDLREVNKRVETIHPTVPNPYTLLSLLPPDRIWYSVLDLKDAFFCIPLAPESQLIFAFEWADAEEGESGQLTWTRLPQGFKNSPTLFDEALNRDLQGFRLDHPSVSLLQYVDDLLIAADTQAACLSATRDLLMTLAELGYRVSGKKAQLCQEEVTYLGFKIHKGSRSLSNSRTQAILQIPVPKTKRQVREFLGTIGYCRLWIPGFAELAQPLYAATRGGNDPLVWGEKEEEAFQSLKLALTQPPALALPSLDKPFQLFVEETSGAAKGVLTQALGPWKRPVAYLSKRLDPVAAGWPRCLRAIAAAALLTREASKLTFGQDIEITSSHNLESLLRSPPDKWLTNARITQYQVLLLDPPRVRFKQTAALNPATLLPETDDTLPIHHCLDTLDSLTSTRPDLTDQPLAQAEATLFTDGSSYIRDGKRYAGAAVVTLDSVIWAEPLPIGTSAQKAELIALTKALEWSKDKSVNIYTDSRYAFATLHVHGMIYRERGLLTAGGKAIKNAPEILALLTAVWLPKRVAVMHCKGHQKDDAPTSTGNRRADEVAREVAIRPLSTQATISAGKRTADGSEFEKRTADGSEFESPKKKAKVE

SEQ ID NO: 6255 - protein, 1996 aa, synthetic construct
MPAAKRVKLDGGDKKYSIGLDIGTNSVGWAVITDEYKVPSKKFKVLGNTDRHSIKKNLIGALLFDSGETAEATRLKRTARRRYTRRKNRICYLQEIFSNEMAKVDDSFFHRLEESFLVEEDKKHERHPIFGNIVDEVAYHEKYPTIYHLRKKLVDSTDKADLRLIYLALAHMIKFRGHFLIEGDLNPDNSDVDKLFIQLVQTYNQLFEENPINASGVDAKAILSARLSKSRRLENLIAQLPGEKKNGLFGNLIALSLGLTPNFKSNFDLAEDAKLQLSKDTYDDDLDNLLAQIGDQYADLFLAAKNLSDAILLSDILRVNTEITKAPLSASMIKRYDEHHQDLTLLKALVRQQLPEKYKEIFFDQSKNGYAGYIDGGASQEEFYKFIKPILEKMDGTEELLVKLNREDLLRKQRTFDNGSIPHQIHLGELHAILRRQEDFYPFLKDNREKIEKILTFRIPYYVGPLARGNSRFAWMTRKSEETITPWNFEEVVDKGASAQSFIERMTNFDKNLPNEKVLPKHSLLYEYFTVYNELTKVKYVTEGMRKPAFLSGEQKKAIVDLLFKTNRKVTVKQLKEDYFKKIECFDSVEISGVEDRFNASLGTYHDLLKIIKDKDFLDNEENEDILEDIVLTLTLFEDREMIEERLKTYAHLFDDKVMKQLKRRRYTGWGRLSRKLINGIRDKQSGKTILDFLKSDGFANRNFMQLIHDDSLTFKEDIQKAQVSGQGDSLHEHIANLAGSPAIKKGILQTVKVVDELVKVMGRHKPENIVIEMARENQTTQKGQKNSRERMKRIEEGIKELGSQILKEHPVENTQLQNEKLYLYYLQNGRDMYVDQELDINRLSDYDVDHIVPQSFLKDDSIDNKVLTRSDKARGKSDNVPSEEVVKKMKNYWRQLLNAKLITQRKFDNLTKAERGGLSELDKAGFIKRQLVETRQITKHVAQILDSRMNTKYDENDKLIREVKVITLKSKLVSDFRKDFQFYKVREINNYHHAHDAYLNAVVGTALIKKYPKLESEFVYGDYKVYDVRKMIAKSEQEIGKATAKYFFYSNIMNFFKTEITLANGEIRKRPLIETNGETGEIVWDKGRDFATVRKVLSMPQVNIVKKTEVQTGGFSKESILPKRNSDKLIARKKDWDPKKYGGFDSPTVAYSVLVVAKVEKGKSKKLKSVKELLGITIMERSSFEKNPIDFLEAKGYKEVKKDLIIKLPKYSLFELENGRKRMLASAGELQKGNELALPSKYVNFLYLASHYEKLKGSPEDNEQKQLFVEQHKHYLDEIIEQISEFSKRVILADANLDKVLSAYNKHRDKPIREQAENIIHLFTLTNLGAPAAFKYFDTTIDRKRYTSTKEVLDATLIHQSITGLYETRIDLSQLGGDGGGGGGGGGGGVLDTPPSHIGLEHLPPPPEVPQFPLNLERLQALQDLVHRSLEAGYISPWDGPGNNPVFPVRKPNGAWRFVHDLRATNALTKPIPALSPGPPDLTAPPTHPPHIICLDLKDAFFQIPVEDRFRFYLSFTLPSPGGLQPHRRFAWRVLPQGFINSPALFQRALQEPLRQVSAAFSQSLLVSYMDDILYASPTEEQRSQCYQALAARLRDLGFQVASEKTSQTPSPVPFLGQMVHEQIVTYQSLPTLQISSPISLHQLQAVLGDLQWVSRGTPTTRRPLQLLYSSLKRHHDPRAIIQLSPEQLQGIAELRQALSHNARSRYNEQEPLLAYVHLTRAGSTLVLFQKGAQFPLAYFQTPLTDNQASPWGLLLLLGCQYLQTQALSSYAKPILKYYHNLPKTSLDNWIQSSEDPRVQELLQLWPQISSQGIQPPGPWKTLITRAEVFLTPQFSPDPIPAALCLFSDGATGRGAYCLWKDHLLDFQAVPAPESAQKGELAGLLAGLAAAPPEPVNIWVDSKYLYSLLRTWVLGAWLQPDPVPSYALLYKSLLRHPAIVVGHVRSHSSASHPIASLNNYVDQLAGKRTADGSEFEKRTADGSEFESPKKKAKVE

SEQ ID NO: 6256 - protein, 2089 aa, synthetic construct
MPAAKRVKLDGGDKKYSIGLDIGTNSVGWAVITDEYKVPSKKFKVLGNTDRHSIKKNLIGALLFDSGETAEATRLKRTARRRYTRRKNRICYLQEIFSNEMAKVDDSFFHRLEESFLVEEDKKHERHPIFGNIVDEVAYHEKYPTIYHLRKKLVDSTDKADLRLIYLALAHMIKFRGHFLIEGDLNPDNSDVDKLFIQLVQTYNQLFEENPINASGVDAKAILSARLSKSRRLENLIAQLPGEKKNGLFGNLIALSLGLTPNFKSNFDLAEDAKLQLSKDTYDDDLDNLLAQIGDQYADLFLAAKNLSDAILLSDILRVNTEITKAPLSASMIKRYDEHHQDLTLLKALVRQQLPEKYKEIFFDQSKNGYAGYIDGGASQEEFYKFIKPILEKMDGTEELLVKLNREDLLRKQRTFDNGSIPHQIHLGELHAILRRQEDFYPFLKDNREKIEKILTFRIPYYVGPLARGNSRFAWMTRKSEETITPWNFEEVVDKGASAQSFIERMTNFDKNLPNEKVLPKHSLLYEYFTVYNELTKVKYVTEGMRKPAFLSGEQKKAIVDLLFKTNRKVTVKQLKEDYFKKIECFDSVEISGVEDRFNASLGTYHDLLKIIKDKDFLDNEENEDILEDIVLTLTLFEDREMIEERLKTYAHLFDDKVMKQLKRRRYTGWGRLSRKLINGIRDKQSGKTILDFLKSDGFANRNFMQLIHDDSLTFKEDIQKAQVSGQGDSLHEHIANLAGSPAIKKGILQTVKVVDELVKVMGRHKPENIVIEMARENQTTQKGQKNSRERMKRIEEGIKELGSQILKEHPVENTQLQNEKLYLYYLQNGRDMYVDQELDINRLSDYDVDHIVPQSFLKDDSIDNKVLTRSDKARGKSDNVPSEEVVKKMKNYWRQLLNAKLITQRKFDNLTKAERGGLSELDKAGFIKRQLVETRQITKHVAQILDSRMNTKYDENDKLIREVKVITLKSKLVSDFRKDFQFYKVREINNYHHAHDAYLNAVVGTALIKKYPKLESEFVYGDYKVYDVRKMIAKSEQEIGKATAKYFFYSNIMNFFKTEITLANGEIRKRPLIETNGETGEIVWDKGRDFATVRKVLSMPQVNIVKKTEVQTGGFSKESILPKRNSDKLIARKKDWDPKKYGGFDSPTVAYSVLVVAKVEKGKSKKLKSVKELLGITIMERSSFEKNPIDFLEAKGYKEVKKDLIIKLPKYSLFELENGRKRMLASAGELQKGNELALPSKYVNFLYLASHYEKLKGSPEDNEQKQLFVEQHKHYLDEIIEQISEFSKRVILADANLDKVLSAYNKHRDKPIREQAENIIHLFTLTNLGAPAAFKYFDTTIDRKRYTSTKEVLDATLIHQSITGLYETRIDLSQLGGDGGGGGGGGGGVLNLEEEYRLHEKPVPSSIDPSWLQLFPTVWAERAGMGLANQVPPVVVELRSGASPVAVRQYPMSKEAREGIRPHIQKFLDLGVLVPCRSPWNTPLLPVKKPGTNDYRPVQDLREINKRVQDIHPTVPNPYNLLSSLPPSYTWYSVLDLKDAFFCLRLHPNSQPLFAFEWKDPEKGNTGQLTWTRLPQGFKNSPTLFNEALHRDLAPFRALNPQVVLLQYVDDLLVAAPTYEDCKKGTQKLLQELSKLGYRVSAKKAQLCQREVTYLGYLLKEGKRWLTPARKATVMKIPVPTTPRQVREFLGKAGFCRLFIPGFASLAAPLYPLTKPSIPFIWTEEHQQAFDHIKKALLSAPALALPDLTKPFTLYIDERAGVARGVLTQTLGPWRRPVAYLSKKLDPVASGWPTCLKAVAAVALLLKDADKLTLGQNVTVIASHSLESIVRQPPDRWMTNARMTHYQSLLLNERVSFAPPAVLNPATLLPVESEATPVHRCSEILAEETGTRRDLEDQPLPGVPTWYTDGSSFITEGKRRAGAPIVDGKRTVWASSLPEGTSAQKAELVALTQALRLAEGKNINIYTDSRYAFATAHIHGAIYKQRGWLTSAGKDIKNKEEILALLEAIHLPRRVAIIHCPGHQRGSNPVATGNRRADEAAKQAALSTRVLAGTTKPAGKRTADGSEFEKRTADGSEFESPKKKAKVE

SEQ ID NO: 6257 - protein, 2213 aa, synthetic construct
MPAAKRVKLDGGDKKYSIGLDIGTNSVGWAVITDEYKVPSKKFKVLGNTDRHSIKKNLIGALLFDSGETAEATRLKRTARRRYTRRKNRICYLQEIFSNEMAKVDDSFFHRLEESFLVEEDKKHERHPIFGNIVDEVAYHEKYPTIYHLRKKLVDSTDKADLRLIYLALAHMIKFRGHFLIEGDLNPDNSDVDKLFIQLVQTYNQLFEENPINASGVDAKAILSARLSKSRRLENLIAQLPGEKKNGLFGNLIALSLGLTPNFKSNFDLAEDAKLQLSKDTYDDDLDNLLAQIGDQYADLFLAAKNLSDAILLSDILRVNTEITKAPLSASMIKRYDEHHQDLTLLKALVRQQLPEKYKEIFFDQSKNGYAGYIDGGASQEEFYKFIKPILEKMDGTEELLVKLNREDLLRKQRTFDNGSIPHQIHLGELHAILRRQEDFYPFLKDNREKIEKILTFRIPYYVGPLARGNSRFAWMTRKSEETITPWNFEEVVDKGASAQSFIERMTNFDKNLPNEKVLPKHSLLYEYFTVYNELTKVKYVTEGMRKPAFLSGEQKKAIVDLLFKTNRKVTVKQLKEDYFKKIECFDSVEISGVEDRFNASLGTYHDLLKIIKDKDFLDNEENEDILEDIVLTLTLFEDREMIEERLKTYAHLFDDKVMKQLKRRRYTGWGRLSRKLINGIRDKQSGKTILDFLKSDGFANRNFMQLIHDDSLTFKEDIQKAQVSGQGDSLHEHIANLAGSPAIKKGILQTVKVVDELVKVMGRHKPENIVIEMARENQTTQKGQKNSRERMKRIEEGIKELGSQILKEHPVENTQLQNEKLYLYYLQNGRDMYVDQELDINRLSDYDVDHIVPQSFLKDDSIDNKVLTRSDKARGKSDNVPSEEVVKKMKNYWRQLLNAKLITQRKFDNLTKAERGGLSELDKAGFIKRQLVETRQITKHVAQILDSRMNTKYDENDKLIREVKVITLKSKLVSDFRKDFQFYKVREINNYHHAHDAYLNAVVGTALIKKYPKLESEFVYGDYKVYDVRKMIAKSEQEIGKATAKYFFYSNIMNFFKTEITLANGEIRKRPLIETNGETGEIVWDKGRDFATVRKVLSMPQVNIVKKTEVQTGGFSKESILPKRNSDKLIARKKDWDPKKYGGFDSPTVAYSVLVVAKVEKGKSKKLKSVKELLGITIMERSSFEKNPIDFLEAKGYKEVKKDLIIKLPKYSLFELENGRKRMLASAGELQKGNELALPSKYVNFLYLASHYEKLKGSPEDNEQKQLFVEQHKHYLDEIIEQISEFSKRVILADANLDKVLSAYNKHRDKPIREQAENIIHLFTLTNLGAPAAFKYFDTTIDRKRYTSTKEVLDATLIHQSITGLYETRIDLSQLGGDGGGGGGGGGGTLGDQGSRGSDPLPEPRVTLTVEGIPTEFLVNTGAEHSVLTKPMGKMGSKRTVVAGATGSKVYPWTTKRLLKIGQKQVTHSFLVIPECPAPLLGRDLLTKLKAQIQFSTEGPQVTWEDRPAMCLVLNLEEEYRLHEKPVPPSIDPSWLQLFPMVWAEKAGMGLANQVPPVVVELKSDASPVAVRQYPMSKEAREGIRPHIQRFLDLGILVPCQSPWNTPLLPVKKPGTNDYRPVQDLREVNKRVQDIHPTVPNPYNLLSSLPPSHTWYSVLDLKDAFFCLKLHPNSQPLFAFEWRDPEKGNTGQLTWTRLPQGFKNSPTLFNEALHRDLASFRALNPQVVMLQYVDDLLVAAPTYRDCKEGTRRLLQELSKLGYRVSAKKAQLCREEVTYLGYLLKGGKRWLTPARKATVMKIPTPTTPRQVREFLGTAGFCRLWIPGFASLAAPLYPLTRPKVPFTWTEAHQEAFGRIKEALLSAPALALPDLTKPFALYVDEKEGVARGVLTQTLGPWRRPVAYLSKKLDPVASGWPTCLKAIAAVALLLKDADKLTLGQNVLVIAPHNLESIVRQPPDRWMTNARMTHYQSLLLNERVSFAPPAILNPATLLPVESDDTPIHICSEILAEETGTRPDLRDQPLPGVPAWYTDGSSFIMDGRRQAGAAIVDNKRTVWASNLPEGTSAQKAELIALTQALRLAEGKSINIYTDSRYAFATAHVHGAIYKQRGWLTSAGKDIKNKEEILALLEAIHLPKRVAIIHCPGHQRGTDPVATGNRKADEAAKQAAQSTRILTETTKNAGKRTADGSEFEKRTADGSEFESPKKKAKVE

SEQ ID NO: 6258 - protein, 2213 aa, synthetic construct
MPAAKRVKLDGGDKKYSIGLDIGTNSVGWAVITDEYKVPSKKFKVLGNTDRHSIKKNLIGALLFDSGETAEATRLKRTARRRYTRRKNRICYLQEIFSNEMAKVDDSFFHRLEESFLVEEDKKHERHPIFGNIVDEVAYHEKYPTIYHLRKKLVDSTDKADLRLIYLALAHMIKFRGHFLIEGDLNPDNSDVDKLFIQLVQTYNQLFEENPINASGVDAKAILSARLSKSRRLENLIAQLPGEKKNGLFGNLIALSLGLTPNFKSNFDLAEDAKLQLSKDTYDDDLDNLLAQIGDQYADLFLAAKNLSDAILLSDILRVNTEITKAPLSASMIKRYDEHHQDLTLLKALVRQQLPEKYKEIFFDQSKNGYAGYIDGGASQEEFYKFIKPILEKMDGTEELLVKLNREDLLRKQRTFDNGSIPHQIHLGELHAILRRQEDFYPFLKDNREKIEKILTFRIPYYVGPLARGNSRFAWMTRKSEETITPWNFEEVVDKGASAQSFIERMTNFDKNLPNEKVLPKHSLLYEYFTVYNELTKVKYVTEGMRKPAFLSGEQKKAIVDLLFKTNRKVTVKQLKEDYFKKIECFDSVEISGVEDRFNASLGTYHDLLKIIKDKDFLDNEENEDILEDIVLTLTLFEDREMIEERLKTYAHLFDDKVMKQLKRRRYTGWGRLSRKLINGIRDKQSGKTILDFLKSDGFANRNFMQLIHDDSLTFKEDIQKAQVSGQGDSLHEHIANLAGSPAIKKGILQTVKVVDELVKVMGRHKPENIVIEMARENQTTQKGQKNSRERMKRIEEGIKELGSQILKEHPVENTQLQNEKLYLYYLQNGRDMYVDQELDINRLSDYDVDHIVPQSFLKDDSIDNKVLTRSDKARGKSDNVPSEEVVKKMKNYWRQLLNAKLITQRKFDNLTKAERGGLSELDKAGFIKRQLVETRQITKHVAQILDSRMNTKYDENDKLIREVKVITLKSKLVSDFRKDFQFYKVREINNYHHAHDAYLNAVVGTALIKKYPKLESEFVYGDYKVYDVRKMIAKSEQEIGKATAKYFFYSNIMNFFKTEITLANGEIRKRPLIETNGETGEIVWDKGRDFATVRKVLSMPQVNIVKKTEVQTGGFSKESILPKRNSDKLIARKKDWDPKKYGGFDSPTVAYSVLVVAKVEKGKSKKLKSVKELLGITIMERSSFEKNPIDFLEAKGYKEVKKDLIIKLPKYSLFELENGRKRMLASAGELQKGNELALPSKYVNFLYLASHYEKLKGSPEDNEQKQLFVEQHKHYLDEIIEQISEFSKRVILADANLDKVLSAYNKHRDKPIREQAENIIHLFTLTNLGAPAAFKYFDTTIDRKRYTSTKEVLDATLIHQSITGLYETRIDLSQLGGDGGGGGGGGGGTLGDQGSRGSDPLPEPRVTLTVEGIPTEFLVNTGAEHSVLTKPMGKMGSKRTVVAGATGSKVYPWTTKRLLKIGQKQVTHSFLVIPECPAPLLGRDLLTKLKAQIQFSTEGPQVTWEDRPAMCLVLNLEEEYRLHEKPVPPSIDPSWLQLFPMVWAEKAGMGLANQVPPVVVELKSDASPVAVRQYPMSKEAREGIRPHIQRFLDLGILVPCQSPWNTPLLPVKKPGTNDYRPVQDLREVNKRVQDIHPTVPNPYNLLSSLPPSHTWYSVLDLKDAFFCLKLHPNSQPLFAFEWRDPEKGNTGQLTWTRLPQGFKNSPTLFNEALHRDLASFRALNPQVVMLQYVDDLLVAAPTYRDCKEGTRRLLQELSKLGYRVSAKKAQLCREEVTYLGYLLKGGKRWLTPARKATVMKIPTPTTPRQVREFLGKAGFCRLFIPGFASLAAPLYPLTRPKVPFTWTEAHQEAFGRIKEALLSAPALALPDLTKPFALYVDEKEGVARGVLTQTLGPWRRPVAYLSKKLDPVASGWPTCLKAIAAVALLLKDADKLTLGQNVLVIAPHNLESIVRQPPDRWMTNARMTHYQSLLLNERVSFAPPAILNPATLLPVESDDTPIHICSEILAEETGTRPDLRDQPLPGVPAWYTDGSSFIMDGRRQAGAAIVDNKRTVWASNLPEGTSAQKAELIALTQALRLAEGKSINIYTDSRYAFATAHVHGAIYKQRGWLTSAGKDIKNKEEILALLEAIHLPKRVAIIHCPGHQRGTDPVATGNRKADEAAKQAAQSTRILTETTKNAGKRTADGSEFEKRTADGSEFESPKKKAKVE

SEQ ID NO: 6259 - protein, 2091 aa, synthetic construct
MPAAKRVKLDGGDKKYSIGLDIGTNSVGWAVITDEYKVPSKKFKVLGNTDRHSIKKNLIGALLFDSGETAEATRLKRTARRRYTRRKNRICYLQEIFSNEMAKVDDSFFHRLEESFLVEEDKKHERHPIFGNIVDEVAYHEKYPTIYHLRKKLVDSTDKADLRLIYLALAHMIKFRGHFLIEGDLNPDNSDVDKLFIQLVQTYNQLFEENPINASGVDAKAILSARLSKSRRLENLIAQLPGEKKNGLFGNLIALSLGLTPNFKSNFDLAEDAKLQLSKDTYDDDLDNLLAQIGDQYADLFLAAKNLSDAILLSDILRVNTEITKAPLSASMIKRYDEHHQDLTLLKALVRQQLPEKYKEIFFDQSKNGYAGYIDGGASQEEFYKFIKPILEKMDGTEELLVKLNREDLLRKQRTFDNGSIPHQIHLGELHAILRRQEDFYPFLKDNREKIEKILTFRIPYYVGPLARGNSRFAWMTRKSEETITPWNFEEVVDKGASAQSFIERMTNFDKNLPNEKVLPKHSLLYEYFTVYNELTKVKYVTEGMRKPAFLSGEQKKAIVDLLFKTNRKVTVKQLKEDYFKKIECFDSVEISGVEDRFNASLGTYHDLLKIIKDKDFLDNEENEDILEDIVLTLTLFEDREMIEERLKTYAHLFDDKVMKQLKRRRYTGWGRLSRKLINGIRDKQSGKTILDFLKSDGFANRNFMQLIHDDSLTFKEDIQKAQVSGQGDSLHEHIANLAGSPAIKKGILQTVKVVDELVKVMGRHKPENIVIEMARENQTTQKGQKNSRERMKRIEEGIKELGSQILKEHPVENTQLQNEKLYLYYLQNGRDMYVDQELDINRLSDYDVDHIVPQSFLKDDSIDNKVLTRSDKARGKSDNVPSEEVVKKMKNYWRQLLNAKLITQRKFDNLTKAERGGLSELDKAGFIKRQLVETRQITKHVAQILDSRMNTKYDENDKLIREVKVITLKSKLVSDFRKDFQFYKVREINNYHHAHDAYLNAVVGTALIKKYPKLESEFVYGDYKVYDVRKMIAKSEQEIGKATAKYFFYSNIMNFFKTEITLANGEIRKRPLIETNGETGEIVWDKGRDFATVRKVLSMPQVNIVKKTEVQTGGFSKESILPKRNSDKLIARKKDWDPKKYGGFDSPTVAYSVLVVAKVEKGKSKKLKSVKELLGITIMERSSFEKNPIDFLEAKGYKEVKKDLIIKLPKYSLFELENGRKRMLASAGELQKGNELALPSKYVNFLYLASHYEKLKGSPEDNEQKQLFVEQHKHYLDEIIEQISEFSKRVILADANLDKVLSAYNKHRDKPIREQAENIIHLFTLTNLGAPAAFKYFDTTIDRKRYTSTKEVLDATLIHQSITGLYETRIDLSQLGGDGGGGGGGGGGTLNLEDEYRLYETSAEPEVSPGSTWLSDFPQAWAETGGMGLAVRQAPLIIPLKATSTPVSIKQYPMSQEAKLGIKPHIQRLLDQGILVPCQSPWNTPLLPVKKPGTNDYRPVQDLREVNKRVEDIHPTVPNPYNLLSGLPPSHRWYTVLDLKDAFFCLRLHPTSQPLFAFEWRDPGMGISGQLTWTRLPQGFKNSPTLFNEALHRDLADFRIQHPDLILLQYVDDILLAATSELDCQQGTRALLLTLGNLGYRASAKKAQLCQKQVKYLGYLLKEGQRWLTEARKETVMGQPTPKTPRQLREFLGTAGFCRLWIPGFAEMAAPLYPLTKPGTLFNWGPDQQKAYQEIKQALLTAPALGLPDLTKPFELFVDEKQGYAKGVLTQKLGPWRRPVAYLSKKLDPVAAGWPPCLRMVAAIAVLRKDAGKLTMGQPLVILAPHAVEALVKQPPDRWLSNARMTHYQAMLLDTDRVQFGPVVALNPATLLPLPEEGAPHDCLEILAETHGTRPDLTDQPIPDADHTWYTDGSSFLQEGQRKAGAAVTTETEVIWARALPAGTSAQRAELIALTQALKMAEGKRLNVYTDSRYAFATAHIHGEIYRRRGWLTSEGREIKNKSEILALLKALFLPKRLSIIHCLGHQKGDSAEARGNRLADQAAREAAIKTPPDTSTLLAGKRTADGSEFEKRTADGSEFESPKKKAKVE

SEQ ID NO: 6260 - protein, 2091 aa, synthetic construct
MPAAKRVKLDGGDKKYSIGLDIGTNSVGWAVITDEYKVPSKKFKVLGNTDRHSIKKNLIGALLFDSGETAEATRLKRTARRRYTRRKNRICYLQEIFSNEMAKVDDSFFHRLEESFLVEEDKKHERHPIFGNIVDEVAYHEKYPTIYHLRKKLVDSTDKADLRLIYLALAHMIKFRGHFLIEGDLNPDNSDVDKLFIQLVQTYNQLFEENPINASGVDAKAILSARLSKSRRLENLIAQLPGEKKNGLFGNLIALSLGLTPNFKSNFDLAEDAKLQLSKDTYDDDLDNLLAQIGDQYADLFLAAKNLSDAILLSDILRVNTEITKAPLSASMIKRYDEHHQDLTLLKALVRQQLPEKYKEIFFDQSKNGYAGYIDGGASQEEFYKFIKPILEKMDGTEELLVKLNREDLLRKQRTFDNGSIPHQIHLGELHAILRRQEDFYPFLKDNREKIEKILTFRIPYYVGPLARGNSRFAWMTRKSEETITPWNFEEVVDKGASAQSFIERMTNFDKNLPNEKVLPKHSLLYEYFTVYNELTKVKYVTEGMRKPAFLSGEQKKAIVDLLFKTNRKVTVKQLKEDYFKKIECFDSVEISGVEDRFNASLGTYHDLLKIIKDKDFLDNEENEDILEDIVLTLTLFEDREMIEERLKTYAHLFDDKVMKQLKRRRYTGWGRLSRKLINGIRDKQSGKTILDFLKSDGFANRNFMQLIHDDSLTFKEDIQKAQVSGQGDSLHEHIANLAGSPAIKKGILQTVKVVDELVKVMGRHKPENIVIEMARENQTTQKGQKNSRERMKRIEEGIKELGSQILKEHPVENTQLQNEKLYLYYLQNGRDMYVDQELDINRLSDYDVDHIVPQSFLKDDSIDNKVLTRSDKARGKSDNVPSEEVVKKMKNYWRQLLNAKLITQRKFDNLTKAERGGLSELDKAGFIKRQLVETRQITKHVAQILDSRMNTKYDENDKLIREVKVITLKSKLVSDFRKDFQFYKVREINNYHHAHDAYLNAVVGTALIKKYPKLESEFVYGDYKVYDVRKMIAKSEQEIGKATAKYFFYSNIMNFFKTEITLANGEIRKRPLIETNGETGEIVWDKGRDFATVRKVLSMPQVNIVKKTEVQTGGFSKESILPKRNSDKLIARKKDWDPKKYGGFDSPTVAYSVLVVAKVEKGKSKKLKSVKELLGITIMERSSFEKNPIDFLEAKGYKEVKKDLIIKLPKYSLFELENGRKRMLASAGELQKGNELALPSKYVNFLYLASHYEKLKGSPEDNEQKQLFVEQHKHYLDEIIEQISEFSKRVILADANLDKVLSAYNKHRDKPIREQAENIIHLFTLTNLGAPAAFKYFDTTIDRKRYTSTKEVLDATLIHQSITGLYETRIDLSQLGGDGGGGGGGGGGTLNIEDEYRLHETSKEPDVSLGSTWLSDFPQAWAETGGMGLAVRQAPLIIPLKATSTPVSIKQYPMSQEARLGIKPHIQRLLDQGILVPCQSPWNTPLLPVKKPGTNDYRPVQDLREVNKRVEDIHPTVPNPYNLLSGLPPSHQWYTVLDLKDAFFCLRLHPTSQPLFAFEWRDPEMGISGQLTWTRLPQGFKNSPTLFNEALHRDLAGFRIQHPDLILLQYVDDLLLAATSELDCQQGTRALLQTLGDLGYRASAKKAQICQKQVKYLGYLLKEGQRWLTEARKETVMGQPIPKTPRQLREFLGTAGFCRLWIPGFAEMAAPLYPLTKPGTLFNWGPDQQKAFQEIKQALLTAPALGLPDLTKPFELFVDEKQGYAKGVLTQKLGPWRRPVAYLSKKLDPVAAGWPPCLRMVAAIAVLTKDAGKLTMGQPLVILAPHAVEALVKQPPDRWLSNARMTHYQALLLDTDRVQFGPVVALNPATLLPLPEEGLQHDCLDILAEAHGTRSDLMDQPLPDADHTWYTDGSSFLQEGQRKAGAAVTTETEVIWARALPAGTSAQRAELIALTQALKMAEGKKLNVYTDSRYAFATAHIHGEIYRRRGWLTSEGKEIKNKDEILALLKALFLPKRLSIIHCPGHQKGNSAEARGNRMADQAAREVATRETPETSTLLAGKRTADGSEFEKRTADGSEFESPKKKAKVE

SEQ ID NO: 6261 - protein, 2082 aa, synthetic construct
MPAAKRVKLDGGDKKYSIGLDIGTNSVGWAVITDEYKVPSKKFKVLGNTDRHSIKKNLIGALLFDSGETAEATRLKRTARRRYTRRKNRICYLQEIFSNEMAKVDDSFFHRLEESFLVEEDKKHERHPIFGNIVDEVAYHEKYPTIYHLRKKLVDSTDKADLRLIYLALAHMIKFRGHFLIEGDLNPDNSDVDKLFIQLVQTYNQLFEENPINASGVDAKAILSARLSKSRRLENLIAQLPGEKKNGLFGNLIALSLGLTPNFKSNFDLAEDAKLQLSKDTYDDDLDNLLAQIGDQYADLFLAAKNLSDAILLSDILRVNTEITKAPLSASMIKRYDEHHQDLTLLKALVRQQLPEKYKEIFFDQSKNGYAGYIDGGASQEEFYKFIKPILEKMDGTEELLVKLNREDLLRKQRTFDNGSIPHQIHLGELHAILRRQEDFYPFLKDNREKIEKILTFRIPYYVGPLARGNSRFAWMTRKSEETITPWNFEEVVDKGASAQSFIERMTNFDKNLPNEKVLPKHSLLYEYFTVYNELTKVKYVTEGMRKPAFLSGEQKKAIVDLLFKTNRKVTVKQLKEDYFKKIECFDSVEISGVEDRFNASLGTYHDLLKIIKDKDFLDNEENEDILEDIVLTLTLFEDREMIEERLKTYAHLFDDKVMKQLKRRRYTGWGRLSRKLINGIRDKQSGKTILDFLKSDGFANRNFMQLIHDDSLTFKEDIQKAQVSGQGDSLHEHIANLAGSPAIKKGILQTVKVVDELVKVMGRHKPENIVIEMARENQTTQKGQKNSRERMKRIEEGIKELGSQILKEHPVENTQLQNEKLYLYYLQNGRDMYVDQELDINRLSDYDVDHIVPQSFLKDDSIDNKVLTRSDKARGKSDNVPSEEVVKKMKNYWRQLLNAKLITQRKFDNLTKAERGGLSELDKAGFIKRQLVETRQITKHVAQILDSRMNTKYDENDKLIREVKVITLKSKLVSDFRKDFQFYKVREINNYHHAHDAYLNAVVGTALIKKYPKLESEFVYGDYKVYDVRKMIAKSEQEIGKATAKYFFYSNIMNFFKTEITLANGEIRKRPLIETNGETGEIVWDKGRDFATVRKVLSMPQVNIVKKTEVQTGGFSKESILPKRNSDKLIARKKDWDPKKYGGFDSPTVAYSVLVVAKVEKGKSKKLKSVKELLGITIMERSSFEKNPIDFLEAKGYKEVKKDLIIKLPKYSLFELENGRKRMLASAGELQKGNELALPSKYVNFLYLASHYEKLKGSPEDNEQKQLFVEQHKHYLDEIIEQISEFSKRVILADANLDKVLSAYNKHRDKPIREQAENIIHLFTLTNLGAPAAFKYFDTTIDRKRYTSTKEVLDATLIHQSITGLYETRIDLSQLGGDGGGGGGGGGGIPWLMKKPLQLTTLVPLQEYEERLLKQTMLTGSYKEKLQSLFLKYDALWQHWENQVGHRRIKPHHIATGTVNPRPQKQYPINPKAKASIQTVINDLLKQGVLIQQNSIMNTPVYPVPKPDGKWRMVLDYREVNKTIPLIAAQNQHSAGILSSIFRGKYKTTLDLSNGFWAHSITPESYWLTAFTWLGQQYCWTRLPQGFLNSPALFNADVVDLLKEVPNVQVYVDDIYISHDDPREHLEQLEKVFSLLLNAGYVVSLKKSEIAQHEVEFLGFNITKEGRGLTETFKQKLLNITPPRDLKQLQSILGLLNFARNFIPNFSELVKPLYNIIATAPGKYITWTTDNSQQLQNIISMLNSAENLEERNPEVRLIMKVNTSPSAGYIRFYNEFAKRPIMYLNYVYTKAEVKFTNTEKLLTTIHKGLIKALDLGMGQEILVYSPIVSMTKIQKTPLPERKALPIRWITWMSYLEDPRIQFHYDKTLPELQQVPTVTDDIIAKIKHPSEFSMVFYTDGSAIKHPNVNKSHNAGMGIAQVQFKPEFTVINTWSIPLGDHTAQLAEVAAVEFACKKALKIDGPVLIVTDSFYVAESVNKELPYWQSNGFFNNKKKPLKHVSKWKSIADCIQLKPDIIIIHEKGHQPTASTFHTEGNNLADKLATQGSYVVNAGKRTADGSEFEKRTADGSEFESPKKKAKVE

SEQ ID NO: 6262 - protein, 2091 aa, synthetic construct
MPAAKRVKLDGGDKKYSIGLDIGTNSVGWAVITDEYKVPSKKFKVLGNTDRHSIKKNLIGALLFDSGETAEATRLKRTARRRYTRRKNRICYLQEIFSNEMAKVDDSFFHRLEESFLVEEDKKHERHPIFGNIVDEVAYHEKYPTIYHLRKKLVDSTDKADLRLIYLALAHMIKFRGHFLIEGDLNPDNSDVDKLFIQLVQTYNQLFEENPINASGVDAKAILSARLSKSRRLENLIAQLPGEKKNGLFGNLIALSLGLTPNFKSNFDLAEDAKLQLSKDTYDDDLDNLLAQIGDQYADLFLAAKNLSDAILLSDILRVNTEITKAPLSASMIKRYDEHHQDLTLLKALVRQQLPEKYKEIFFDQSKNGYAGYIDGGASQEEFYKFIKPILEKMDGTEELLVKLNREDLLRKQRTFDNGSIPHQIHLGELHAILRRQEDFYPFLKDNREKIEKILTFRIPYYVGPLARGNSRFAWMTRKSEETITPWNFEEVVDKGASAQSFIERMTNFDKNLPNEKVLPKHSLLYEYFTVYNELTKVKYVTEGMRKPAFLSGEQKKAIVDLLFKTNRKVTVKQLKEDYFKKIECFDSVEISGVEDRFNASLGTYHDLLKIIKDKDFLDNEENEDILEDIVLTLTLFEDREMIEERLKTYAHLFDDKVMKQLKRRRYTGWGRLSRKLINGIRDKQSGKTILDFLKSDGFANRNFMQLIHDDSLTFKEDIQKAQVSGQGDSLHEHIANLAGSPAIKKGILQTVKVVDELVKVMGRHKPENIVIEMARENQTTQKGQKNSRERMKRIEEGIKELGSQILKEHPVENTQLQNEKLYLYYLQNGRDMYVDQELDINRLSDYDVDHIVPQSFLKDDSIDNKVLTRSDKARGKSDNVPSEEVVKKMKNYWRQLLNAKLITQRKFDNLTKAERGGLSELDKAGFIKRQLVETRQITKHVAQILDSRMNTKYDENDKLIREVKVITLKSKLVSDFRKDFQFYKVREINNYHHAHDAYLNAVVGTALIKKYPKLESEFVYGDYKVYDVRKMIAKSEQEIGKATAKYFFYSNIMNFFKTEITLANGEIRKRPLIETNGETGEIVWDKGRDFATVRKVLSMPQVNIVKKTEVQTGGFSKESILPKRNSDKLIARKKDWDPKKYGGFDSPTVAYSVLVVAKVEKGKSKKLKSVKELLGITIMERSSFEKNPIDFLEAKGYKEVKKDLIIKLPKYSLFELENGRKRMLASAGELQKGNELALPSKYVNFLYLASHYEKLKGSPEDNEQKQLFVEQHKHYLDEIIEQISEFSKRVILADANLDKVLSAYNKHRDKPIREQAENIIHLFTLTNLGAPAAFKYFDTTIDRKRYTSTKEVLDATLIHQSITGLYETRIDLSQLGGDGGGGGGGGGGTLNIEDEYRLHETSKEPDVPLGSTWLSDFPQAWAETGGMGLAVRQAPLIIPLKATSTPVSIKQYPMSQEARLGIKPHIQRLLDQGILVPCQSPWNTPLLPVKKPGTNDYRPVQDLREVNKRVEDIHPTVPNPYNLLSGLPPSHQWYTVLDLKDAFFCLRLHPTSQPLFAFEWRDPEMGISGQLTWTRLPQGFKNSPTLFNEALHRDLADFRIQHPDLILLQYVDDLLLAATSEQDCQRGTRALLQTLGNLGYRASAKKAQICQKQVKYLGYLLKEGQRWLTEARKETVMGQPTPKTPRQLREFLGTAGFCRLWIPGFAEMAAPLYPLTKPGTLFNWGPDQQKAYQEIKQALLTAPALGLPDLTKPFELFVDEKQGYAKGVLTQKLGPWRRPVAYLSKKLDPVAAGWPPCLRMVAAIAVLTKDAGKLTMGQPLVILAPHAVEALVKQPPDRWLSNARMTHYQAMLLDTDRVQFGPVVALNPATLLPLPEKEAPHDCLEILAETHGTRPDLTDQPIPDADYTWYTDGSSFLQEGQRRAGAAVTTETEVIWARALPAGTSAQRAELIALTQALKMAEGKKLNVYTDSRYAFATAHVHGEIYRRRGWLTSEGREIKNKNEILALLKALFLPKRLSIIHCPGHQKGNSAEARGNRMADQAAREAAMKAVLETSTLLAGKRTADGSEFEKRTADGSEFESPKKKAKVE

SEQ ID NO: 6263 - protein, 2091 aa, synthetic construct
MPAAKRVKLDGGDKKYSIGLDIGTNSVGWAVITDEYKVPSKKFKVLGNTDRHSIKKNLIGALLFDSGETAEATRLKRTARRRYTRRKNRICYLQEIFSNEMAKVDDSFFHRLEESFLVEEDKKHERHPIFGNIVDEVAYHEKYPTIYHLRKKLVDSTDKADLRLIYLALAHMIKFRGHFLIEGDLNPDNSDVDKLFIQLVQTYNQLFEENPINASGVDAKAILSARLSKSRRLENLIAQLPGEKKNGLFGNLIALSLGLTPNFKSNFDLAEDAKLQLSKDTYDDDLDNLLAQIGDQYADLFLAAKNLSDAILLSDILRVNTEITKAPLSASMIKRYDEHHQDLTLLKALVRQQLPEKYKEIFFDQSKNGYAGYIDGGASQEEFYKFIKPILEKMDGTEELLVKLNREDLLRKQRTFDNGSIPHQIHLGELHAILRRQEDFYPFLKDNREKIEKILTFRIPYYVGPLARGNSRFAWMTRKSEETITPWNFEEVVDKGASAQSFIERMTNFDKNLPNEKVLPKHSLLYEYFTVYNELTKVKYVTEGMRKPAFLSGEQKKAIVDLLFKTNRKVTVKQLKEDYFKKIECFDSVEISGVEDRFNASLGTYHDLLKIIKDKDFLDNEENEDILEDIVLTLTLFEDREMIEERLKTYAHLFDDKVMKQLKRRRYTGWGRLSRKLINGIRDKQSGKTILDFLKSDGFANRNFMQLIHDDSLTFKEDIQKAQVSGQGDSLHEHIANLAGSPAIKKGILQTVKVVDELVKVMGRHKPENIVIEMARENQTTQKGQKNSRERMKRIEEGIKELGSQILKEHPVENTQLQNEKLYLYYLQNGRDMYVDQELDINRLSDYDVDHIVPQSFLKDDSIDNKVLTRSDKARGKSDNVPSEEVVKKMKNYWRQLLNAKLITQRKFDNLTKAERGGLSELDKAGFIKRQLVETRQITKHVAQILDSRMNTKYDENDKLIREVKVITLKSKLVSDFRKDFQFYKVREINNYHHAHDAYLNAVVGTALIKKYPKLESEFVYGDYKVYDVRKMIAKSEQEIGKATAKYFFYSNIMNFFKTEITLANGEIRKRPLIETNGETGEIVWDKGRDFATVRKVLSMPQVNIVKKTEVQTGGFSKESILPKRNSDKLIARKKDWDPKKYGGFDSPTVAYSVLVVAKVEKGKSKKLKSVKELLGITIMERSSFEKNPIDFLEAKGYKEVKKDLIIKLPKYSLFELENGRKRMLASAGELQKGNELALPSKYVNFLYLASHYEKLKGSPEDNEQKQLFVEQHKHYLDEIIEQISEFSKRVILADANLDKVLSAYNKHRDKPIREQAENIIHLFTLTNLGAPAAFKYFDTTIDRKRYTSTKEVLDATLIHQSITGLYETRIDLSQLGGDGGGGGGGGGGTLNIEDEYRLHETSKEPDVPLGSTWLSDFPQAWAETGGMGLAVRQAPLIIPLKATSTPVSIKQYPMSQEARLGIKPHIQRLLDQGILVPCQSPWNTPLLPVKKPGTNDYRPVQDLREVNKRVEDIHPTVPNPYNLLSGLPPSHQWYTVLDLKDAFFCLRLHPTSQPLFAFEWRDPEMGISGQLTWTRLPQGFKNSPTLFNEALHRDLADFRIQHPDLILLQYVDDLLLAATSEQDCQRGTRALLQTLGNLGYRASAKKAQICQKQVKYLGYLLKEGQRWLTEARKETVMGQPTPKTPRQLREFLGKAGFCRLFIPGFAEMAAPLYPLTKPGTLFNWGPDQQKAYQEIKQALLTAPALGLPDLTKPFELFVDEKQGYAKGVLTQKLGPWRRPVAYLSKKLDPVAAGWPPCLRMVAAIAVLTKDAGKLTMGQPLVILAPHAVEALVKQPPDRWLSNARMTHYQAMLLDTDRVQFGPVVALNPATLLPLPEKEAPHDCLEILAETHGTRPDLTDQPIPDADYTWYTDGSSFLQEGQRRAGAAVTTETEVIWARALPAGTSAQRAELIALTQALKMAEGKKLNVYTDSRYAFATAHVHGEIYRRRGWLTSEGREIKNKNEILALLKALFLPKRLSIIHCPGHQKGNSAEARGNRMADQAAREAAMKAVLETSTLLAGKRTADGSEFEKRTADGSEFESPKKKAKVE

SEQ ID NO: 6264 - protein, 2094 aa, synthetic construct
MPAAKRVKLDGGDKKYSIGLDIGTNSVGWAVITDEYKVPSKKFKVLGNTDRHSIKKNLIGALLFDSGETAEATRLKRTARRRYTRRKNRICYLQEIFSNEMAKVDDSFFHRLEESFLVEEDKKHERHPIFGNIVDEVAYHEKYPTIYHLRKKLVDSTDKADLRLIYLALAHMIKFRGHFLIEGDLNPDNSDVDKLFIQLVQTYNQLFEENPINASGVDAKAILSARLSKSRRLENLIAQLPGEKKNGLFGNLIALSLGLTPNFKSNFDLAEDAKLQLSKDTYDDDLDNLLAQIGDQYADLFLAAKNLSDAILLSDILRVNTEITKAPLSASMIKRYDEHHQDLTLLKALVRQQLPEKYKEIFFDQSKNGYAGYIDGGASQEEFYKFIKPILEKMDGTEELLVKLNREDLLRKQRTFDNGSIPHQIHLGELHAILRRQEDFYPFLKDNREKIEKILTFRIPYYVGPLARGNSRFAWMTRKSEETITPWNFEEVVDKGASAQSFIERMTNFDKNLPNEKVLPKHSLLYEYFTVYNELTKVKYVTEGMRKPAFLSGEQKKAIVDLLFKTNRKVTVKQLKEDYFKKIECFDSVEISGVEDRFNASLGTYHDLLKIIKDKDFLDNEENEDILEDIVLTLTLFEDREMIEERLKTYAHLFDDKVMKQLKRRRYTGWGRLSRKLINGIRDKQSGKTILDFLKSDGFANRNFMQLIHDDSLTFKEDIQKAQVSGQGDSLHEHIANLAGSPAIKKGILQTVKVVDELVKVMGRHKPENIVIEMARENQTTQKGQKNSRERMKRIEEGIKELGSQILKEHPVENTQLQNEKLYLYYLQNGRDMYVDQELDINRLSDYDVDHIVPQSFLKDDSIDNKVLTRSDKARGKSDNVPSEEVVKKMKNYWRQLLNAKLITQRKFDNLTKAERGGLSELDKAGFIKRQLVETRQITKHVAQILDSRMNTKYDENDKLIREVKVITLKSKLVSDFRKDFQFYKVREINNYHHAHDAYLNAVVGTALIKKYPKLESEFVYGDYKVYDVRKMIAKSEQEIGKATAKYFFYSNIMNFFKTEITLANGEIRKRPLIETNGETGEIVWDKGRDFATVRKVLSMPQVNIVKKTEVQTGGFSKESILPKRNSDKLIARKKDWDPKKYGGFDSPTVAYSVLVVAKVEKGKSKKLKSVKELLGITIMERSSFEKNPIDFLEAKGYKEVKKDLIIKLPKYSLFELENGRKRMLASAGELQKGNELALPSKYVNFLYLASHYEKLKGSPEDNEQKQLFVEQHKHYLDEIIEQISEFSKRVILADANLDKVLSAYNKHRDKPIREQAENIIHLFTLTNLGAPAAFKYFDTTIDRKRYTSTKEVLDATLIHQSITGLYETRIDLSQLGGDGGGGGGGGGGGTAPLEEEYRLFLEAPIQNVTLLEQWKREIPKVWAEINPPGLASTQAPIHVQLLSTALPVRVRQYPITLEAKRSLRETIRKFRAAGILRPVHSPWNTPLLPVRKSGTSEYRMVQDLREVNKRVETIHPTVPNPYTLLSLLPPDRIWYSVLDLKDAFFCIPLAPESQLIFAFEWADAEEGESGQLTWTRLPQGFKNSPTLFNEALNRDLQGFRLDHPSVSLLQYVDDLLIAADTQAACLSATRDLLMTLAELGYRVSGKKAQLCQEEVTYLGFKIHKGSRSLSNSRTQAILQIPVPKTKRQVREFLGTIGYCRLWIPGFAELAQPLYAATRPGNDPLVWGEKEEEAFQSLKLALTQPPALALPSLDKPFQLFVEETSGAAKGVLTQALGPWKRPVAYLSKRLDPVAAGWPRCLRAIAAAALLTREASKLTFGQDIEITSSHNLESLLRSPPDKWLTNARITQYQVLLLDPPRVRFKQTAALNPATLLPETDDTLPIHHCLDTLDSLTSTRPDLTDQPLAQAEATLFTDGSSYIRDGKRYAGAAVVTLDSVIWAEPLPIGTSAQKAELIALTKALEWSKDKSVNIYTDSRYAFATLHVHGMIYRERGWLTAGGKAIKNAPEILALLTAVWLPKRVAVMHCKGHQKDDAPTSTGNRRADEVAREVAIRPLSTQATISAGKRTADGSEFEKRTADGSEFESPKKKAKVE

SEQ ID NO: 6265 - protein, 2094 aa, synthetic construct
MPAAKRVKLDGGDKKYSIGLDIGTNSVGWAVITDEYKVPSKKFKVLGNTDRHSIKKNLIGALLFDSGETAEATRLKRTARRRYTRRKNRICYLQEIFSNEMAKVDDSFFHRLEESFLVEEDKKHERHPIFGNIVDEVAYHEKYPTIYHLRKKLVDSTDKADLRLIYLALAHMIKFRGHFLIEGDLNPDNSDVDKLFIQLVQTYNQLFEENPINASGVDAKAILSARLSKSRRLENLIAQLPGEKKNGLFGNLIALSLGLTPNFKSNFDLAEDAKLQLSKDTYDDDLDNLLAQIGDQYADLFLAAKNLSDAILLSDILRVNTEITKAPLSASMIKRYDEHHQDLTLLKALVRQQLPEKYKEIFFDQSKNGYAGYIDGGASQEEFYKFIKPILEKMDGTEELLVKLNREDLLRKQRTFDNGSIPHQIHLGELHAILRRQEDFYPFLKDNREKIEKILTFRIPYYVGPLARGNSRFAWMTRKSEETITPWNFEEVVDKGASAQSFIERMTNFDKNLPNEKVLPKHSLLYEYFTVYNELTKVKYVTEGMRKPAFLSGEQKKAIVDLLFKTNRKVTVKQLKEDYFKKIECFDSVEISGVEDRFNASLGTYHDLLKIIKDKDFLDNEENEDILEDIVLTLTLFEDREMIEERLKTYAHLFDDKVMKQLKRRRYTGWGRLSRKLINGIRDKQSGKTILDFLKSDGFANRNFMQLIHDDSLTFKEDIQKAQVSGQGDSLHEHIANLAGSPAIKKGILQTVKVVDELVKVMGRHKPENIVIEMARENQTTQKGQKNSRERMKRIEEGIKELGSQILKEHPVENTQLQNEKLYLYYLQNGRDMYVDQELDINRLSDYDVDHIVPQSFLKDDSIDNKVLTRSDKARGKSDNVPSEEVVKKMKNYWRQLLNAKLITQRKFDNLTKAERGGLSELDKAGFIKRQLVETRQITKHVAQILDSRMNTKYDENDKLIREVKVITLKSKLVSDFRKDFQFYKVREINNYHHAHDAYLNAVVGTALIKKYPKLESEFVYGDYKVYDVRKMIAKSEQEIGKATAKYFFYSNIMNFFKTEITLANGEIRKRPLIETNGETGEIVWDKGRDFATVRKVLSMPQVNIVKKTEVQTGGFSKESILPKRNSDKLIARKKDWDPKKYGGFDSPTVAYSVLVVAKVEKGKSKKLKSVKELLGITIMERSSFEKNPIDFLEAKGYKEVKKDLIIKLPKYSLFELENGRKRMLASAGELQKGNELALPSKYVNFLYLASHYEKLKGSPEDNEQKQLFVEQHKHYLDEIIEQISEFSKRVILADANLDKVLSAYNKHRDKPIREQAENIIHLFTLTNLGAPAAFKYFDTTIDRKRYTSTKEVLDATLIHQSITGLYETRIDLSQLGGDGGGGGGGGGGGTAPLEEEYRLFLEAPIQNVTLLEQWKREIPKVWAEINPPGLASTQAPIHVQLLSTALPVRVRQYPITLEAKRSLRETIRKFRAAGILRPVHSPWNTPLLPVRKSGTSEYRMVQDLREVNKRVETIHPTVPNPYTLLSLLPPDRIWYSVLDLKDAFFCIPLAPESQLIFAFEWADAEEGESGQLTWTRLPQGFKNSPTLFNEALNRDLQGFRLDHPSVSLLQYVDDLLIAADTQAACLSATRDLLMTLAELGYRVSGKKAQLCQEEVTYLGFKIHKGSRSLSNSRTQAILQIPVPKTKRQVREFLGKIGYCRLFIPGFAELAQPLYAATRPGNDPLVWGEKEEEAFQSLKLALTQPPALALPSLDKPFQLFVEETSGAAKGVLTQALGPWKRPVAYLSKRLDPVAAGWPRCLRAIAAAALLTREASKLTFGQDIEITSSHNLESLLRSPPDKWLTNARITQYQVLLLDPPRVRFKQTAALNPATLLPETDDTLPIHHCLDTLDSLTSTRPDLTDQPLAQAEATLFTDGSSYIRDGKRYAGAAVVTLDSVIWAEPLPIGTSAQKAELIALTKALEWSKDKSVNIYTDSRYAFATLHVHGMIYRERGWLTAGGKAIKNAPEILALLTAVWLPKRVAVMHCKGHQKDDAPTSTGNRRADEVAREVAIRPLSTQATISAGKRTADGSEFEKRTADGSEFESPKKKAKVE

SEQ ID NO: 6266 - protein, 2098 aa, synthetic construct
MPAAKRVKLDGGDKKYSIGLDIGTNSVGWAVITDEYKVPSKKFKVLGNTDRHSIKKNLIGALLFDSGETAEATRLKRTARRRYTRRKNRICYLQEIFSNEMAKVDDSFFHRLEESFLVEEDKKHERHPIFGNIVDEVAYHEKYPTIYHLRKKLVDSTDKADLRLIYLALAHMIKFRGHFLIEGDLNPDNSDVDKLFIQLVQTYNQLFEENPINASGVDAKAILSARLSKSRRLENLIAQLPGEKKNGLFGNLIALSLGLTPNFKSNFDLAEDAKLQLSKDTYDDDLDNLLAQIGDQYADLFLAAKNLSDAILLSDILRVNTEITKAPLSASMIKRYDEHHQDLTLLKALVRQQLPEKYKEIFFDQSKNGYAGYIDGGASQEEFYKFIKPILEKMDGTEELLVKLNREDLLRKQRTFDNGSIPHQIHLGELHAILRRQEDFYPFLKDNREKIEKILTFRIPYYVGPLARGNSRFAWMTRKSEETITPWNFEEVVDKGASAQSFIERMTNFDKNLPNEKVLPKHSLLYEYFTVYNELTKVKYVTEGMRKPAFLSGEQKKAIVDLLFKTNRKVTVKQLKEDYFKKIECFDSVEISGVEDRFNASLGTYHDLLKIIKDKDFLDNEENEDILEDIVLTLTLFEDREMIEERLKTYAHLFDDKVMKQLKRRRYTGWGRLSRKLINGIRDKQSGKTILDFLKSDGFANRNFMQLIHDDSLTFKEDIQKAQVSGQGDSLHEHIANLAGSPAIKKGILQTVKVVDELVKVMGRHKPENIVIEMARENQTTQKGQKNSRERMKRIEEGIKELGSQILKEHPVENTQLQNEKLYLYYLQNGRDMYVDQELDINRLSDYDVDHIVPQSFLKDDSIDNKVLTRSDKARGKSDNVPSEEVVKKMKNYWRQLLNAKLITQRKFDNLTKAERGGLSELDKAGFIKRQLVETRQITKHVAQILDSRMNTKYDENDKLIREVKVITLKSKLVSDFRKDFQFYKVREINNYHHAHDAYLNAVVGTALIKKYPKLESEFVYGDYKVYDVRKMIAKSEQEIGKATAKYFFYSNIMNFFKTEITLANGEIRKRPLIETNGETGEIVWDKGRDFATVRKVLSMPQVNIVKKTEVQTGGFSKESILPKRNSDKLIARKKDWDPKKYGGFDSPTVAYSVLVVAKVEKGKSKKLKSVKELLGITIMERSSFEKNPIDFLEAKGYKEVKKDLIIKLPKYSLFELENGRKRMLASAGELQKGNELALPSKYVNFLYLASHYEKLKGSPEDNEQKQLFVEQHKHYLDEIIEQISEFSKRVILADANLDKVLSAYNKHRDKPIREQAENIIHLFTLTNLGAPAAFKYFDTTIDRKRYTSTKEVLDATLIHQSITGLYETRIDLSQLGGDGGGGGGGGGGGTVSLQDEHRLFDIPVTTSLPDVWLQDFPQAWAETGGLGRAKCQAPIIIDLKPTAVPVSIKQYPMSLEAHMGIRQHIIKFLELGVLRPCRSPWNTPLLPVKKPGTQDYRPVQDLREINKRTVDIHPTVPNPYNLLSTLKPDYSWYTVLDLKDAFFCLPLAPQSQELFAFEWKDPERGISGQLTWTRLPQGFKNSPTLFNEALHRDLTDFRTQHPEVTLLQYVDDLLLAAPTKKACTQGTRHLLQELGEKGYRASAKKAQICQTKVTYLGYILSEGKRWLTPGRIETVARIPPPRNPREVREFLGKAGFCRLFIPGFAELAAPLYALTKPSTPFTWQTEHQLAFEALKKALLSAPALGLPDTSKPFTLFLDERQGIAKGVLTQKLGPWKRPVAYLSKKLDPVAAGWPPCLRIMAATAMLVKDSAKLTLGQPLTVITPHTLEAIVRQPPDRWITNARLTHYQALLLDTDRVQFGPPVTLNPATLLPVPENQPSPHDCRQVLAETHGTREDLKDQELPDADHTWYTDGSSYLDSGTRRAGAAVVDGHNTIWAQSLPPGTSAQKAELIALTKALELSKGKKANIYTDSRYAFATAHTHGSIYERRGWLTSEGKEIKNKAEIIALLKALFLPQEVAIIHCPGHQKGQDPVAVGNRQADRVARQAAMAEVLTLATEPDNTSHITAGKRTADGSEFEKRTADGSEFESPKKKAKVE

SEQ ID NO: 6267 - protein, 2091 aa, synthetic construct
MPAAKRVKLDGGDKKYSIGLDIGTNSVGWAVITDEYKVPSKKFKVLGNTDRHSIKKNLIGALLFDSGETAEATRLKRTARRRYTRRKNRICYLQEIFSNEMAKVDDSFFHRLEESFLVEEDKKHERHPIFGNIVDEVAYHEKYPTIYHLRKKLVDSTDKADLRLIYLALAHMIKFRGHFLIEGDLNPDNSDVDKLFIQLVQTYNQLFEENPINASGVDAKAILSARLSKSRRLENLIAQLPGEKKNGLFGNLIALSLGLTPNFKSNFDLAEDAKLQLSKDTYDDDLDNLLAQIGDQYADLFLAAKNLSDAILLSDILRVNTEITKAPLSASMIKRYDEHHQDLTLLKALVRQQLPEKYKEIFFDQSKNGYAGYIDGGASQEEFYKFIKPILEKMDGTEELLVKLNREDLLRKQRTFDNGSIPHQIHLGELHAILRRQEDFYPFLKDNREKIEKILTFRIPYYVGPLARGNSRFAWMTRKSEETITPWNFEEVVDKGASAQSFIERMTNFDKNLPNEKVLPKHSLLYEYFTVYNELTKVKYVTEGMRKPAFLSGEQKKAIVDLLFKTNRKVTVKQLKEDYFKKIECFDSVEISGVEDRFNASLGTYHDLLKIIKDKDFLDNEENEDILEDIVLTLTLFEDREMIEERLKTYAHLFDDKVMKQLKRRRYTGWGRLSRKLINGIRDKQSGKTILDFLKSDGFANRNFMQLIHDDSLTFKEDIQKAQVSGQGDSLHEHIANLAGSPAIKKGILQTVKVVDELVKVMGRHKPENIVIEMARENQTTQKGQKNSRERMKRIEEGIKELGSQILKEHPVENTQLQNEKLYLYYLQNGRDMYVDQELDINRLSDYDVDHIVPQSFLKDDSIDNKVLTRSDKARGKSDNVPSEEVVKKMKNYWRQLLNAKLITQRKFDNLTKAERGGLSELDKAGFIKRQLVETRQITKHVAQILDSRMNTKYDENDKLIREVKVITLKSKLVSDFRKDFQFYKVREINNYHHAHDAYLNAVVGTALIKKYPKLESEFVYGDYKVYDVRKMIAKSEQEIGKATAKYFFYSNIMNFFKTEITLANGEIRKRPLIETNGETGEIVWDKGRDFATVRKVLSMPQVNIVKKTEVQTGGFSKESILPKRNSDKLIARKKDWDPKKYGGFDSPTVAYSVLVVAKVEKGKSKKLKSVKELLGITIMERSSFEKNPIDFLEAKGYKEVKKDLIIKLPKYSLFELENGRKRMLASAGELQKGNELALPSKYVNFLYLASHYEKLKGSPEDNEQKQLFVEQHKHYLDEIIEQISEFSKRVILADANLDKVLSAYNKHRDKPIREQAENIIHLFTLTNLGAPAAFKYFDTTIDRKRYTSTKEVLDATLIHQSITGLYETRIDLSQLGGDGGGGGGGGGGGTLQLEEEYRLFEPESTQKQEMDIWLKNFPQAWAETGGMGTAHCQAPVLIQLKATATPISIRQYPMPHEAYQGIKPHIRRMLDQGILKPCQSPWNTPLLPVKKPGTEDYRPVQDLREVNKRVEDIHPTVPNPYNLLSTLPPSHPWYTVLDLKDAFFCLRLHSESQLLFAFEWRDPEIGLSGQLTWTRLPQGFKNSPTLFNEALHSDLADFRVRYPALVLLQYVDDLLLAAATRTECLEGTKALLETLGNKGYRASAKKAQICLQEVTYLGYSLKDGQRWLTKARKEAILSIPVPKNSRQVREFLGKAGYCRLFIPGFAELAAPLYPLTRPGTLFQWGTEQQLAFEDIKKALLSSPALGLPDITKPFELFIDENSGFAKGVLVQKLGPWKRPVAYLSKKLDTVASGWPPCLRMVAAIAILVKDAGKLTLGQPLTILTSHPVEALVRQPPNKWLSNARMTHYQAMLLDAERVHFGPTVSLNPATLLPLPSGGNHHDCLQILAETHGTRPDLTDQPLPDADLTWYTDGSSFIRNGEREAGAAVTTESEVIWAAPLPPGTSAQRAELIALTQALKMAEGKKLTVYTDSRYAFATTHVHGEIYRRRGWLTSEGKEIKNKNEILALLEALFLPKRLSIIHCPGHQKGDSPQAKGNRLADDTAKKAATETHSSLTVLPAGKRTADGSEFEKRTADGSEFESPKKKAKVE

SEQ ID NO: 6268 - protein, 2123 aa, synthetic construct
MPAAKRVKLDGGDKKYSIGLDIGTNSVGWAVITDEYKVPSKKFKVLGNTDRHSIKKNLIGALLFDSGETAEATRLKRTARRRYTRRKNRICYLQEIFSNEMAKVDDSFFHRLEESFLVEEDKKHERHPIFGNIVDEVAYHEKYPTIYHLRKKLVDSTDKADLRLIYLALAHMIKFRGHFLIEGDLNPDNSDVDKLFIQLVQTYNQLFEENPINASGVDAKAILSARLSKSRRLENLIAQLPGEKKNGLFGNLIALSLGLTPNFKSNFDLAEDAKLQLSKDTYDDDLDNLLAQIGDQYADLFLAAKNLSDAILLSDILRVNTEITKAPLSASMIKRYDEHHQDLTLLKALVRQQLPEKYKEIFFDQSKNGYAGYIDGGASQEEFYKFIKPILEKMDGTEELLVKLNREDLLRKQRTFDNGSIPHQIHLGELHAILRRQEDFYPFLKDNREKIEKILTFRIPYYVGPLARGNSRFAWMTRKSEETITPWNFEEVVDKGASAQSFIERMTNFDKNLPNEKVLPKHSLLYEYFTVYNELTKVKYVTEGMRKPAFLSGEQKKAIVDLLFKTNRKVTVKQLKEDYFKKIECFDSVEISGVEDRFNASLGTYHDLLKIIKDKDFLDNEENEDILEDIVLTLTLFEDREMIEERLKTYAHLFDDKVMKQLKRRRYTGWGRLSRKLINGIRDKQSGKTILDFLKSDGFANRNFMQLIHDDSLTFKEDIQKAQVSGQGDSLHEHIANLAGSPAIKKGILQTVKVVDELVKVMGRHKPENIVIEMARENQTTQKGQKNSRERMKRIEEGIKELGSQILKEHPVENTQLQNEKLYLYYLQNGRDMYVDQELDINRLSDYDVDHIVPQSFLKDDSIDNKVLTRSDKARGKSDNVPSEEVVKKMKNYWRQLLNAKLITQRKFDNLTKAERGGLSELDKAGFIKRQLVETRQITKHVAQILDSRMNTKYDENDKLIREVKVITLKSKLVSDFRKDFQFYKVREINNYHHAHDAYLNAVVGTALIKKYPKLESEFVYGDYKVYDVRKMIAKSEQEIGKATAKYFFYSNIMNFFKTEITLANGEIRKRPLIETNGETGEIVWDKGRDFATVRKVLSMPQVNIVKKTEVQTGGFSKESILPKRNSDKLIARKKDWDPKKYGGFDSPTVAYSVLVVAKVEKGKSKKLKSVKELLGITIMERSSFEKNPIDFLEAKGYKEVKKDLIIKLPKYSLFELENGRKRMLASAGELQKGNELALPSKYVNFLYLASHYEKLKGSPEDNEQKQLFVEQHKHYLDEIIEQISEFSKRVILADANLDKVLSAYNKHRDKPIREQAENIIHLFTLTNLGAPAAFKYFDTTIDRKRYTSTKEVLDATLIHQSITGLYETRIDLSQLGGDGGGGGGGGGGGLLGRDLLTKLKAQIQFSTEGPQVTWEDRPAMCLVLNLEEEYRLHEKPVPPSIDPSWLQLFPMVWAEKAGMGLANQVPPVVVELKSDASPVAVRQYPMSKEAREGIRPHIQRFLDLGILVPCQSPWNTPLLPVKKPGTNDYRPVQDLREVNKRVQDIHPTVPNPYNLLSSLPPSHTWYSVLDLKDAFFCLKLHPNSQPLFAFEWRDPEKGNTGQLTWTRLPQGFKNSPTLFNEALHRDLASFRALNPQVVMLQYVDDLLVAAPTYRDCKEGTRRLLQELSKLGYRVSAKKAQLCREEVTYLGYLLKGGKRWLTPARKATVMKIPTPTTPRQVREFLGTAGFCRLWIPGFASLAAPLYPLTRPKVPFTWTEAHQEAFGRIKEALLSAPALALPDLTKPFALYVDEKEGVARGVLTQTLGPWRRPVAYLSKKLDPVASGWPTCLKAIAAVALLLKDADKLTLGQNVLVIAPHNLESIVRQPPDRWMTNARMTHYQSLLLNERVSFAPPAILNPATLLPVESDDTPIHICSEILAEETGTRPDLRDQPLPGVPAWYTDGSSFIMDGRRQAGAAIVDNKRTVWASNLPEGTSAQKAELIALTQALRLAEGKSINIYTDSRYAFATAHVHGAIYKQRGWLTSAGKDIKNKEEILALLEAIHLPKRVAIIHCPGHQRGTDPVATGNRKADEAAKQAAQSTRILTETTKNAGKRTADGSEFEKRTADGSEFESPKKKAKVE

SEQ ID NO: 6269 - protein, 2123 aa, synthetic construct
MPAAKRVKLDGGDKKYSIGLDIGTNSVGWAVITDEYKVPSKKFKVLGNTDRHSIKKNLIGALLFDSGETAEATRLKRTARRRYTRRKNRICYLQEIFSNEMAKVDDSFFHRLEESFLVEEDKKHERHPIFGNIVDEVAYHEKYPTIYHLRKKLVDSTDKADLRLIYLALAHMIKFRGHFLIEGDLNPDNSDVDKLFIQLVQTYNQLFEENPINASGVDAKAILSARLSKSRRLENLIAQLPGEKKNGLFGNLIALSLGLTPNFKSNFDLAEDAKLQLSKDTYDDDLDNLLAQIGDQYADLFLAAKNLSDAILLSDILRVNTEITKAPLSASMIKRYDEHHQDLTLLKALVRQQLPEKYKEIFFDQSKNGYAGYIDGGASQEEFYKFIKPILEKMDGTEELLVKLNREDLLRKQRTFDNGSIPHQIHLGELHAILRRQEDFYPFLKDNREKIEKILTFRIPYYVGPLARGNSRFAWMTRKSEETITPWNFEEVVDKGASAQSFIERMTNFDKNLPNEKVLPKHSLLYEYFTVYNELTKVKYVTEGMRKPAFLSGEQKKAIVDLLFKTNRKVTVKQLKEDYFKKIECFDSVEISGVEDRFNASLGTYHDLLKIIKDKDFLDNEENEDILEDIVLTLTLFEDREMIEERLKTYAHLFDDKVMKQLKRRRYTGWGRLSRKLINGIRDKQSGKTILDFLKSDGFANRNFMQLIHDDSLTFKEDIQKAQVSGQGDSLHEHIANLAGSPAIKKGILQTVKVVDELVKVMGRHKPENIVIEMARENQTTQKGQKNSRERMKRIEEGIKELGSQILKEHPVENTQLQNEKLYLYYLQNGRDMYVDQELDINRLSDYDVDHIVPQSFLKDDSIDNKVLTRSDKARGKSDNVPSEEVVKKMKNYWRQLLNAKLITQRKFDNLTKAERGGLSELDKAGFIKRQLVETRQITKHVAQILDSRMNTKYDENDKLIREVKVITLKSKLVSDFRKDFQFYKVREINNYHHAHDAYLNAVVGTALIKKYPKLESEFVYGDYKVYDVRKMIAKSEQEIGKATAKYFFYSNIMNFFKTEITLANGEIRKRPLIETNGETGEIVWDKGRDFATVRKVLSMPQVNIVKKTEVQTGGFSKESILPKRNSDKLIARKKDWDPKKYGGFDSPTVAYSVLVVAKVEKGKSKKLKSVKELLGITIMERSSFEKNPIDFLEAKGYKEVKKDLIIKLPKYSLFELENGRKRMLASAGELQKGNELALPSKYVNFLYLASHYEKLKGSPEDNEQKQLFVEQHKHYLDEIIEQISEFSKRVILADANLDKVLSAYNKHRDKPIREQAENIIHLFTLTNLGAPAAFKYFDTTIDRKRYTSTKEVLDATLIHQSITGLYETRIDLSQLGGDGGGGGGGGGGGLLGRDLLTKLKAQIQFSTEGPQVTWEDRPAMCLVLNLEEEYRLHEKPVPPSIDPSWLQLFPMVWAEKAGMGLANQVPPVVVELKSDASPVAVRQYPMSKEAREGIRPHIQRFLDLGILVPCQSPWNTPLLPVKKPGTNDYRPVQDLREVNKRVQDIHPTVPNPYNLLSSLPPSHTWYSVLDLKDAFFCLKLHPNSQPLFAFEWRDPEKGNTGQLTWTRLPQGFKNSPTLFNEALHRDLASFRALNPQVVMLQYVDDLLVAAPTYRDCKEGTRRLLQELSKLGYRVSAKKAQLCREEVTYLGYLLKGGKRWLTPARKATVMKIPTPTTPRQVREFLGKAGFCRLFIPGFASLAAPLYPLTRPKVPFTWTEAHQEAFGRIKEALLSAPALALPDLTKPFALYVDEKEGVARGVLTQTLGPWRRPVAYLSKKLDPVASGWPTCLKAIAAVALLLKDADKLTLGQNVLVIAPHNLESIVRQPPDRWMTNARMTHYQSLLLNERVSFAPPAILNPATLLPVESDDTPIHICSEILAEETGTRPDLRDQPLPGVPAWYTDGSSFIMDGRRQAGAAIVDNKRTVWASNLPEGTSAQKAELIALTQALRLAEGKSINIYTDSRYAFATAHVHGAIYKQRGWLTSAGKDIKNKEEILALLEAIHLPKRVAIIHCPGHQRGTDPVATGNRKADEAAKQAAQSTRILTETTKNAGKRTADGSEFEKRTADGSEFESPKKKAKVE

SEQ ID NO: 6270 - protein, 2092 aa, synthetic construct
MPAAKRVKLDGGDKKYSIGLDIGTNSVGWAVITDEYKVPSKKFKVLGNTDRHSIKKNLIGALLFDSGETAEATRLKRTARRRYTRRKNRICYLQEIFSNEMAKVDDSFFHRLEESFLVEEDKKHERHPIFGNIVDEVAYHEKYPTIYHLRKKLVDSTDKADLRLIYLALAHMIKFRGHFLIEGDLNPDNSDVDKLFIQLVQTYNQLFEENPINASGVDAKAILSARLSKSRRLENLIAQLPGEKKNGLFGNLIALSLGLTPNFKSNFDLAEDAKLQLSKDTYDDDLDNLLAQIGDQYADLFLAAKNLSDAILLSDILRVNTEITKAPLSASMIKRYDEHHQDLTLLKALVRQQLPEKYKEIFFDQSKNGYAGYIDGGASQEEFYKFIKPILEKMDGTEELLVKLNREDLLRKQRTFDNGSIPHQIHLGELHAILRRQEDFYPFLKDNREKIEKILTFRIPYYVGPLARGNSRFAWMTRKSEETITPWNFEEVVDKGASAQSFIERMTNFDKNLPNEKVLPKHSLLYEYFTVYNELTKVKYVTEGMRKPAFLSGEQKKAIVDLLFKTNRKVTVKQLKEDYFKKIECFDSVEISGVEDRFNASLGTYHDLLKIIKDKDFLDNEENEDILEDIVLTLTLFEDREMIEERLKTYAHLFDDKVMKQLKRRRYTGWGRLSRKLINGIRDKQSGKTILDFLKSDGFANRNFMQLIHDDSLTFKEDIQKAQVSGQGDSLHEHIANLAGSPAIKKGILQTVKVVDELVKVMGRHKPENIVIEMARENQTTQKGQKNSRERMKRIEEGIKELGSQILKEHPVENTQLQNEKLYLYYLQNGRDMYVDQELDINRLSDYDVDHIVPQSFLKDDSIDNKVLTRSDKARGKSDNVPSEEVVKKMKNYWRQLLNAKLITQRKFDNLTKAERGGLSELDKAGFIKRQLVETRQITKHVAQILDSRMNTKYDENDKLIREVKVITLKSKLVSDFRKDFQFYKVREINNYHHAHDAYLNAVVGTALIKKYPKLESEFVYGDYKVYDVRKMIAKSEQEIGKATAKYFFYSNIMNFFKTEITLANGEIRKRPLIETNGETGEIVWDKGRDFATVRKVLSMPQVNIVKKTEVQTGGFSKESILPKRNSDKLIARKKDWDPKKYGGFDSPTVAYSVLVVAKVEKGKSKKLKSVKELLGITIMERSSFEKNPIDFLEAKGYKEVKKDLIIKLPKYSLFELENGRKRMLASAGELQKGNELALPSKYVNFLYLASHYEKLKGSPEDNEQKQLFVEQHKHYLDEIIEQISEFSKRVILADANLDKVLSAYNKHRDKPIREQAENIIHLFTLTNLGAPAAFKYFDTTIDRKRYTSTKEVLDATLIHQSITGLYETRIDLSQLGGDGGGGGGGGGGGTLNLEDEYRLYETSAEPEVSPGSTWLSDFPQAWAETGGMGLAVRQAPLIIPLKATSTPVSIKQYPMSQEAKLGIKPHIQRLLDQGILVPCQSPWNTPLLPVKKPGTNDYRPVQDLREVNKRVEDIHPTVPNPYNLLSGLPPSHRWYTVLDLKDAFFCLRLHPTSQPLFAFEWRDPGMGISGQLTWTRLPQGFKNSPTLFNEALHRDLADFRIQHPDLILLQYVDDILLAATSELDCQQGTRALLLTLGNLGYRASAKKAQLCQKQVKYLGYLLKEGQRWLTEARKETVMGQPTPKTPRQLREFLGTAGFCRLWIPGFAEMAAPLYPLTKPGTLFNWGPDQQKAYQEIKQALLTAPALGLPDLTKPFELFVDEKQGYAKGVLTQKLGPWRRPVAYLSKKLDPVAAGWPPCLRMVAAIAVLRKDAGKLTMGQPLVILAPHAVEALVKQPPDRWLSNARMTHYQAMLLDTDRVQFGPVVALNPATLLPLPEEGAPHDCLEILAETHGTRPDLTDQPIPDADHTWYTDGSSFLQEGQRKAGAAVTTETEVIWARALPAGTSAQRAELIALTQALKMAEGKRLNVYTDSRYAFATAHIHGEIYRRRGWLTSEGREIKNKSEILALLKALFLPKRLSIIHCLGHQKGDSAEARGNRLADQAAREAAIKTPPDTSTLLAGKRTADGSEFEKRTADGSEFESPKKKAKVE

SEQ ID NO: 6271 - protein, 2092 aa, synthetic construct
MPAAKRVKLDGGDKKYSIGLDIGTNSVGWAVITDEYKVPSKKFKVLGNTDRHSIKKNLIGALLFDSGETAEATRLKRTARRRYTRRKNRICYLQEIFSNEMAKVDDSFFHRLEESFLVEEDKKHERHPIFGNIVDEVAYHEKYPTIYHLRKKLVDSTDKADLRLIYLALAHMIKFRGHFLIEGDLNPDNSDVDKLFIQLVQTYNQLFEENPINASGVDAKAILSARLSKSRRLENLIAQLPGEKKNGLFGNLIALSLGLTPNFKSNFDLAEDAKLQLSKDTYDDDLDNLLAQIGDQYADLFLAAKNLSDAILLSDILRVNTEITKAPLSASMIKRYDEHHQDLTLLKALVRQQLPEKYKEIFFDQSKNGYAGYIDGGASQEEFYKFIKPILEKMDGTEELLVKLNREDLLRKQRTFDNGSIPHQIHLGELHAILRRQEDFYPFLKDNREKIEKILTFRIPYYVGPLARGNSRFAWMTRKSEETITPWNFEEVVDKGASAQSFIERMTNFDKNLPNEKVLPKHSLLYEYFTVYNELTKVKYVTEGMRKPAFLSGEQKKAIVDLLFKTNRKVTVKQLKEDYFKKIECFDSVEISGVEDRFNASLGTYHDLLKIIKDKDFLDNEENEDILEDIVLTLTLFEDREMIEERLKTYAHLFDDKVMKQLKRRRYTGWGRLSRKLINGIRDKQSGKTILDFLKSDGFANRNFMQLIHDDSLTFKEDIQKAQVSGQGDSLHEHIANLAGSPAIKKGILQTVKVVDELVKVMGRHKPENIVIEMARENQTTQKGQKNSRERMKRIEEGIKELGSQILKEHPVENTQLQNEKLYLYYLQNGRDMYVDQELDINRLSDYDVDHIVPQSFLKDDSIDNKVLTRSDKARGKSDNVPSEEVVKKMKNYWRQLLNAKLITQRKFDNLTKAERGGLSELDKAGFIKRQLVETRQITKHVAQILDSRMNTKYDENDKLIREVKVITLKSKLVSDFRKDFQFYKVREINNYHHAHDAYLNAVVGTALIKKYPKLESEFVYGDYKVYDVRKMIAKSEQEIGKATAKYFFYSNIMNFFKTEITLANGEIRKRPLIETNGETGEIVWDKGRDFATVRKVLSMPQVNIVKKTEVQTGGFSKESILPKRNSDKLIARKKDWDPKKYGGFDSPTVAYSVLVVAKVEKGKSKKLKSVKELLGITIMERSSFEKNPIDFLEAKGYKEVKKDLIIKLPKYSLFELENGRKRMLASAGELQKGNELALPSKYVNFLYLASHYEKLKGSPEDNEQKQLFVEQHKHYLDEIIEQISEFSKRVILADANLDKVLSAYNKHRDKPIREQAENIIHLFTLTNLGAPAAFKYFDTTIDRKRYTSTKEVLDATLIHQSITGLYETRIDLSQLGGDGGGGGGGGGGGTLNLEDEYRLYETSAEPEVSPGSTWLSDFPQAWAETGGMGLAVRQAPLIIPLKATSTPVSIKQYPMSQEAKLGIKPHIQRLLDQGILVPCQSPWNTPLLPVKKPGTNDYRPVQDLREVNKRVEDIHPTVPNPYNLLSGLPPSHRWYTVLDLKDAFFCLRLHPTSQPLFAFEWRDPGMGISGQLTWTRLPQGFKNSPTLFNEALHRDLADFRIQHPDLILLQYVDDILLAATSELDCQQGTRALLLTLGNLGYRASAKKAQLCQKQVKYLGYLLKEGQRWLTEARKETVMGQPTPKTPRQLREFLGKAGFCRLFIPGFAEMAAPLYPLTKPGTLFNWGPDQQKAYQEIKQALLTAPALGLPDLTKPFELFVDEKQGYAKGVLTQKLGPWRRPVAYLSKKLDPVAAGWPPCLRMVAAIAVLRKDAGKLTMGQPLVILAPHAVEALVKQPPDRWLSNARMTHYQAMLLDTDRVQFGPVVALNPATLLPLPEEGAPHDCLEILAETHGTRPDLTDQPIPDADHTWYTDGSSFLQEGQRKAGAAVTTETEVIWARALPAGTSAQRAELIALTQALKMAEGKRLNVYTDSRYAFATAHIHGEIYRRRGWLTSEGREIKNKSEILALLKALFLPKRLSIIHCLGHQKGDSAEARGNRLADQAAREAAIKTPPDTSTLLAGKRTADGSEFEKRTADGSEFESPKKKAKVE

SEQ ID NO: 6272 - protein, 2090 aa, synthetic construct
MPAAKRVKLDGGDKKYSIGLDIGTNSVGWAVITDEYKVPSKKFKVLGNTDRHSIKKNLIGALLFDSGETAEATRLKRTARRRYTRRKNRICYLQEIFSNEMAKVDDSFFHRLEESFLVEEDKKHERHPIFGNIVDEVAYHEKYPTIYHLRKKLVDSTDKADLRLIYLALAHMIKFRGHFLIEGDLNPDNSDVDKLFIQLVQTYNQLFEENPINASGVDAKAILSARLSKSRRLENLIAQLPGEKKNGLFGNLIALSLGLTPNFKSNFDLAEDAKLQLSKDTYDDDLDNLLAQIGDQYADLFLAAKNLSDAILLSDILRVNTEITKAPLSASMIKRYDEHHQDLTLLKALVRQQLPEKYKEIFFDQSKNGYAGYIDGGASQEEFYKFIKPILEKMDGTEELLVKLNREDLLRKQRTFDNGSIPHQIHLGELHAILRRQEDFYPFLKDNREKIEKILTFRIPYYVGPLARGNSRFAWMTRKSEETITPWNFEEVVDKGASAQSFIERMTNFDKNLPNEKVLPKHSLLYEYFTVYNELTKVKYVTEGMRKPAFLSGEQKKAIVDLLFKTNRKVTVKQLKEDYFKKIECFDSVEISGVEDRFNASLGTYHDLLKIIKDKDFLDNEENEDILEDIVLTLTLFEDREMIEERLKTYAHLFDDKVMKQLKRRRYTGWGRLSRKLINGIRDKQSGKTILDFLKSDGFANRNFMQLIHDDSLTFKEDIQKAQVSGQGDSLHEHIANLAGSPAIKKGILQTVKVVDELVKVMGRHKPENIVIEMARENQTTQKGQKNSRERMKRIEEGIKELGSQILKEHPVENTQLQNEKLYLYYLQNGRDMYVDQELDINRLSDYDVDHIVPQSFLKDDSIDNKVLTRSDKARGKSDNVPSEEVVKKMKNYWRQLLNAKLITQRKFDNLTKAERGGLSELDKAGFIKRQLVETRQITKHVAQILDSRMNTKYDENDKLIREVKVITLKSKLVSDFRKDFQFYKVREINNYHHAHDAYLNAVVGTALIKKYPKLESEFVYGDYKVYDVRKMIAKSEQEIGKATAKYFFYSNIMNFFKTEITLANGEIRKRPLIETNGETGEIVWDKGRDFATVRKVLSMPQVNIVKKTEVQTGGFSKESILPKRNSDKLIARKKDWDPKKYGGFDSPTVAYSVLVVAKVEKGKSKKLKSVKELLGITIMERSSFEKNPIDFLEAKGYKEVKKDLIIKLPKYSLFELENGRKRMLASAGELQKGNELALPSKYVNFLYLASHYEKLKGSPEDNEQKQLFVEQHKHYLDEIIEQISEFSKRVILADANLDKVLSAYNKHRDKPIREQAENIIHLFTLTNLGAPAAFKYFDTTIDRKRYTSTKEVLDATLIHQSITGLYETRIDLSQLGGDGGGGGGGGGGGVLNLEEEYRLHEKPVPSSIDPSWLQLFPTVWAERAGMGLANQVPPVVVELRSGASPVAVRQYPMSKEAREGIRPHIQRFLDLGVLVPCQSPWNTPLLPVKKPGTNDYRPVQDLREINKRVQDIHPTVPNPYNLLSSLPPSHTWYSVLDLKDAFFCLKLHPNSQPLFAFEWRDPEKGNTGQLTWTRLPQGFKNSPTLFNEALHRDLAPFRALNPQVVLLQYVDDLLVAAPTYRDCKEGTQKLLQELSKLGYRVSAKKAQLCQKEVTYLGYLLKEGKRWLTPARKATVMKIPPPTTPRQVREFLGKAGFCRLFIPGFASLAAPLYPLTKPSIPFIWTEEHQKAFDRIKEALLSAPALALPDLTKPFTLYVDERAGVARGVLTQTLGPWRRPVAYLSKKLDPVASGWPTCLKAVAAVALLLKDADKLTLGQNVTVIASHSLESIVRQPPDRWMTNARMTHYQSLLLNERVSFAPPAVLNPATLLPVESEATPVHRCSEILAEETGTRRDLKDQPLPGVPAWYTDGSSFIAEGKRRAGAAIVDGKRTVWASSLPEGTSAQKAELVALTQALRLAEGKDINIYTDSRYAFATAHIHGAIYKQRGWLTSAGKDIKNKEEILALLEAIHLPKRVAIIHCPGHQKGNDPVATGNRRADEAAKQAALSTRVLAETTKPAGKRTADGSEFEKRTADGSEFESPKKKAKVE

SEQ ID NO: 6273 - protein, 2092 aa, synthetic construct
MPAAKRVKLDGGDKKYSIGLDIGTNSVGWAVITDEYKVPSKKFKVLGNTDRHSIKKNLIGALLFDSGETAEATRLKRTARRRYTRRKNRICYLQEIFSNEMAKVDDSFFHRLEESFLVEEDKKHERHPIFGNIVDEVAYHEKYPTIYHLRKKLVDSTDKADLRLIYLALAHMIKFRGHFLIEGDLNPDNSDVDKLFIQLVQTYNQLFEENPINASGVDAKAILSARLSKSRRLENLIAQLPGEKKNGLFGNLIALSLGLTPNFKSNFDLAEDAKLQLSKDTYDDDLDNLLAQIGDQYADLFLAAKNLSDAILLSDILRVNTEITKAPLSASMIKRYDEHHQDLTLLKALVRQQLPEKYKEIFFDQSKNGYAGYIDGGASQEEFYKFIKPILEKMDGTEELLVKLNREDLLRKQRTFDNGSIPHQIHLGELHAILRRQEDFYPFLKDNREKIEKILTFRIPYYVGPLARGNSRFAWMTRKSEETITPWNFEEVVDKGASAQSFIERMTNFDKNLPNEKVLPKHSLLYEYFTVYNELTKVKYVTEGMRKPAFLSGEQKKAIVDLLFKTNRKVTVKQLKEDYFKKIECFDSVEISGVEDRFNASLGTYHDLLKIIKDKDFLDNEENEDILEDIVLTLTLFEDREMIEERLKTYAHLFDDKVMKQLKRRRYTGWGRLSRKLINGIRDKQSGKTILDFLKSDGFANRNFMQLIHDDSLTFKEDIQKAQVSGQGDSLHEHIANLAGSPAIKKGILQTVKVVDELVKVMGRHKPENIVIEMARENQTTQKGQKNSRERMKRIEEGIKELGSQILKEHPVENTQLQNEKLYLYYLQNGRDMYVDQELDINRLSDYDVDHIVPQSFLKDDSIDNKVLTRSDKARGKSDNVPSEEVVKKMKNYWRQLLNAKLITQRKFDNLTKAERGGLSELDKAGFIKRQLVETRQITKHVAQILDSRMNTKYDENDKLIREVKVITLKSKLVSDFRKDFQFYKVREINNYHHAHDAYLNAVVGTALIKKYPKLESEFVYGDYKVYDVRKMIAKSEQEIGKATAKYFFYSNIMNFFKTEITLANGEIRKRPLIETNGETGEIVWDKGRDFATVRKVLSMPQVNIVKKTEVQTGGFSKESILPKRNSDKLIARKKDWDPKKYGGFDSPTVAYSVLVVAKVEKGKSKKLKSVKELLGITIMERSSFEKNPIDFLEAKGYKEVKKDLIIKLPKYSLFELENGRKRMLASAGELQKGNELALPSKYVNFLYLASHYEKLKGSPEDNEQKQLFVEQHKHYLDEIIEQISEFSKRVILADANLDKVLSAYNKHRDKPIREQAENIIHLFTLTNLGAPAAFKYFDTTIDRKRYTSTKEVLDATLIHQSITGLYETRIDLSQLGGDGGGGGGGGGGGTLNIEDEYRLHETSKEPDVPLGSTWLSDFPQAWAETGGMGLAVRQAPLIIPLKATSTPVSIKQYPMSQEARLGIKPHIQRLLDQGILVPCQSPWNTPLLPVKKPGTNDYRPVQDLREVNKRVEDIHPTVPNPYNLLSGLPPSHQWYTVLDLKDAFFCLRLHPTSQPLFAFEWRDPEMGISGQLTWTRLPQGFKNSPTLFNEALHRDLADFRIQHPDLILLQYVDDLLLAATSEQDCQRGTRALLQTLGNLGYRASAKKAQICQKQVKYLGYLLKEGQRWLTEARKETVMGQPTPKTPRQLREFLGKAGFCRLFIPGFAEMAAPLYPLTKPGTLFNWGPDQQKAYQEIKQALLTAPALGLPDLTKPFELFVDEKQGYAKGVLTQKLGPWRRPVAYLSKKLDPVAAGWPPCLRMVAAIAVLTKDAGKLTMGQPLVILAPHAVEALVKQPPDRWLSNARMTHYQAMLLDTDRVQFGPVVALNPATLLPLPEKEAPHDCLEILAETHGTRPDLTDQPIPDADYTWYTDGSSFLQEGQRRAGAAVTTETEVIWARALPAGTSAQRAELIALTQALKMAEGKKLNVYTDSRYAFATAHVHGEIYRRRGWLTSEGREIKNKNEILALLKALFLPKRLSIIHCPGHQKGNSAEARGNRMADQAAREAAMKAVLETSTLLAGKRTADGSEFEKRTADGSEFESPKKKAKVE

SEQ ID NO: 6274 - protein, 2095 aa, synthetic construct
MPAAKRVKLDGGDKKYSIGLDIGTNSVGWAVITDEYKVPSKKFKVLGNTDRHSIKKNLIGALLFDSGETAEATRLKRTARRRYTRRKNRICYLQEIFSNEMAKVDDSFFHRLEESFLVEEDKKHERHPIFGNIVDEVAYHEKYPTIYHLRKKLVDSTDKADLRLIYLALAHMIKFRGHFLIEGDLNPDNSDVDKLFIQLVQTYNQLFEENPINASGVDAKAILSARLSKSRRLENLIAQLPGEKKNGLFGNLIALSLGLTPNFKSNFDLAEDAKLQLSKDTYDDDLDNLLAQIGDQYADLFLAAKNLSDAILLSDILRVNTEITKAPLSASMIKRYDEHHQDLTLLKALVRQQLPEKYKEIFFDQSKNGYAGYIDGGASQEEFYKFIKPILEKMDGTEELLVKLNREDLLRKQRTFDNGSIPHQIHLGELHAILRRQEDFYPFLKDNREKIEKILTFRIPYYVGPLARGNSRFAWMTRKSEETITPWNFEEVVDKGASAQSFIERMTNFDKNLPNEKVLPKHSLLYEYFTVYNELTKVKYVTEGMRKPAFLSGEQKKAIVDLLFKTNRKVTVKQLKEDYFKKIECFDSVEISGVEDRFNASLGTYHDLLKIIKDKDFLDNEENEDILEDIVLTLTLFEDREMIEERLKTYAHLFDDKVMKQLKRRRYTGWGRLSRKLINGIRDKQSGKTILDFLKSDGFANRNFMQLIHDDSLTFKEDIQKAQVSGQGDSLHEHIANLAGSPAIKKGILQTVKVVDELVKVMGRHKPENIVIEMARENQTTQKGQKNSRERMKRIEEGIKELGSQILKEHPVENTQLQNEKLYLYYLQNGRDMYVDQELDINRLSDYDVDHIVPQSFLKDDSIDNKVLTRSDKARGKSDNVPSEEVVKKMKNYWRQLLNAKLITQRKFDNLTKAERGGLSELDKAGFIKRQLVETRQITKHVAQILDSRMNTKYDENDKLIREVKVITLKSKLVSDFRKDFQFYKVREINNYHHAHDAYLNAVVGTALIKKYPKLESEFVYGDYKVYDVRKMIAKSEQEIGKATAKYFFYSNIMNFFKTEITLANGEIRKRPLIETNGETGEIVWDKGRDFATVRKVLSMPQVNIVKKTEVQTGGFSKESILPKRNSDKLIARKKDWDPKKYGGFDSPTVAYSVLVVAKVEKGKSKKLKSVKELLGITIMERSSFEKNPIDFLEAKGYKEVKKDLIIKLPKYSLFELENGRKRMLASAGELQKGNELALPSKYVNFLYLASHYEKLKGSPEDNEQKQLFVEQHKHYLDEIIEQISEFSKRVILADANLDKVLSAYNKHRDKPIREQAENIIHLFTLTNLGAPAAFKYFDTTIDRKRYTSTKEVLDATLIHQSITGLYETRIDLSQLGGDGGGGGGGGGGGGTAPLEEEYRLFLEAPIQNVTLLEQWKREIPKVWAEINPPGLASTQAPIHVQLLSTALPVRVRQYPITLEAKRSLRETIRKFRAAGILRPVHSPWNTPLLPVRKSGTSEYRMVQDLREVNKRVETIHPTVPNPYTLLSLLPPDRIWYSVLDLKDAFFCIPLAPESQLIFAFEWADAEEGESGQLTWTRLPQGFKNSPTLFDEALNRDLQGFRLDHPSVSLLQYVDDLLIAADTQAACLSATRDLLMTLAELGYRVSGKKAQLCQEEVTYLGFKIHKGSRSLSNSRTQAILQIPVPKTKRQVREFLGTIGYCRLWIPGFAELAQPLYAATRGGNDPLVWGEKEEEAFQSLKLALTQPPALALPSLDKPFQLFVEETSGAAKGVLTQALGPWKRPVAYLSKRLDPVAAGWPRCLRAIAAAALLTREASKLTFGQDIEITSSHNLESLLRSPPDKWLTNARITQYQVLLLDPPRVRFKQTAALNPATLLPETDDTLPIHHCLDTLDSLTSTRPDLTDQPLAQAEATLFTDGSSYIRDGKRYAGAAVVTLDSVIWAEPLPIGTSAQKAELIALTKALEWSKDKSVNIYTDSRYAFATLHVHGMIYRERGLLTAGGKAIKNAPEILALLTAVWLPKRVAVMHCKGHQKDDAPTSTGNRRADEVAREVAIRPLSTQATISAGKRTADGSEFEKRTADGSEFESPKKKAKVE

SEQ ID NO: 6275 - protein, 2095 aa, synthetic construct
MPAAKRVKLDGGDKKYSIGLDIGTNSVGWAVITDEYKVPSKKFKVLGNTDRHSIKKNLIGALLFDSGETAEATRLKRTARRRYTRRKNRICYLQEIFSNEMAKVDDSFFHRLEESFLVEEDKKHERHPIFGNIVDEVAYHEKYPTIYHLRKKLVDSTDKADLRLIYLALAHMIKFRGHFLIEGDLNPDNSDVDKLFIQLVQTYNQLFEENPINASGVDAKAILSARLSKSRRLENLIAQLPGEKKNGLFGNLIALSLGLTPNFKSNFDLAEDAKLQLSKDTYDDDLDNLLAQIGDQYADLFLAAKNLSDAILLSDILRVNTEITKAPLSASMIKRYDEHHQDLTLLKALVRQQLPEKYKEIFFDQSKNGYAGYIDGGASQEEFYKFIKPILEKMDGTEELLVKLNREDLLRKQRTFDNGSIPHQIHLGELHAILRRQEDFYPFLKDNREKIEKILTFRIPYYVGPLARGNSRFAWMTRKSEETITPWNFEEVVDKGASAQSFIERMTNFDKNLPNEKVLPKHSLLYEYFTVYNELTKVKYVTEGMRKPAFLSGEQKKAIVDLLFKTNRKVTVKQLKEDYFKKIECFDSVEISGVEDRFNASLGTYHDLLKIIKDKDFLDNEENEDILEDIVLTLTLFEDREMIEERLKTYAHLFDDKVMKQLKRRRYTGWGRLSRKLINGIRDKQSGKTILDFLKSDGFANRNFMQLIHDDSLTFKEDIQKAQVSGQGDSLHEHIANLAGSPAIKKGILQTVKVVDELVKVMGRHKPENIVIEMARENQTTQKGQKNSRERMKRIEEGIKELGSQILKEHPVENTQLQNEKLYLYYLQNGRDMYVDQELDINRLSDYDVDHIVPQSFLKDDSIDNKVLTRSDKARGKSDNVPSEEVVKKMKNYWRQLLNAKLITQRKFDNLTKAERGGLSELDKAGFIKRQLVETRQITKHVAQILDSRMNTKYDENDKLIREVKVITLKSKLVSDFRKDFQFYKVREINNYHHAHDAYLNAVVGTALIKKYPKLESEFVYGDYKVYDVRKMIAKSEQEIGKATAKYFFYSNIMNFFKTEITLANGEIRKRPLIETNGETGEIVWDKGRDFATVRKVLSMPQVNIVKKTEVQTGGFSKESILPKRNSDKLIARKKDWDPKKYGGFDSPTVAYSVLVVAKVEKGKSKKLKSVKELLGITIMERSSFEKNPIDFLEAKGYKEVKKDLIIKLPKYSLFELENGRKRMLASAGELQKGNELALPSKYVNFLYLASHYEKLKGSPEDNEQKQLFVEQHKHYLDEIIEQISEFSKRVILADANLDKVLSAYNKHRDKPIREQAENIIHLFTLTNLGAPAAFKYFDTTIDRKRYTSTKEVLDATLIHQSITGLYETRIDLSQLGGDGGGGGGGGGGGGTAPLEEEYRLFLEAPIQNVTLLEQWKREIPKVWAEINPPGLASTQAPIHVQLLSTALPVRVRQYPITLEAKRSLRETIRKFRAAGILRPVHSPWNTPLLPVRKSGTSEYRMVQDLREVNKRVETIHPTVPNPYTLLSLLPPDRIWYSVLDLKDAFFCIPLAPESQLIFAFEWADAEEGESGQLTWTRLPQGFKNSPTLFNEALNRDLQGFRLDHPSVSLLQYVDDLLIAADTQAACLSATRDLLMTLAELGYRVSGKKAQLCQEEVTYLGFKIHKGSRSLSNSRTQAILQIPVPKTKRQVREFLGKIGYCRLFIPGFAELAQPLYAATRPGNDPLVWGEKEEEAFQSLKLALTQPPALALPSLDKPFQLFVEETSGAAKGVLTQALGPWKRPVAYLSKRLDPVAAGWPRCLRAIAAAALLTREASKLTFGQDIEITSSHNLESLLRSPPDKWLTNARITQYQVLLLDPPRVRFKQTAALNPATLLPETDDTLPIHHCLDTLDSLTSTRPDLTDQPLAQAEATLFTDGSSYIRDGKRYAGAAVVTLDSVIWAEPLPIGTSAQKAELIALTKALEWSKDKSVNIYTDSRYAFATLHVHGMIYRERGWLTAGGKAIKNAPEILALLTAVWLPKRVAVMHCKGHQKDDAPTSTGNRRADEVAREVAIRPLSTQATISAGKRTADGSEFEKRTADGSEFESPKKKAKVE

SEQ ID NO: 6276 - protein, 2099 aa, synthetic construct
MPAAKRVKLDGGDKKYSIGLDIGTNSVGWAVITDEYKVPSKKFKVLGNTDRHSIKKNLIGALLFDSGETAEATRLKRTARRRYTRRKNRICYLQEIFSNEMAKVDDSFFHRLEESFLVEEDKKHERHPIFGNIVDEVAYHEKYPTIYHLRKKLVDSTDKADLRLIYLALAHMIKFRGHFLIEGDLNPDNSDVDKLFIQLVQTYNQLFEENPINASGVDAKAILSARLSKSRRLENLIAQLPGEKKNGLFGNLIALSLGLTPNFKSNFDLAEDAKLQLSKDTYDDDLDNLLAQIGDQYADLFLAAKNLSDAILLSDILRVNTEITKAPLSASMIKRYDEHHQDLTLLKALVRQQLPEKYKEIFFDQSKNGYAGYIDGGASQEEFYKFIKPILEKMDGTEELLVKLNREDLLRKQRTFDNGSIPHQIHLGELHAILRRQEDFYPFLKDNREKIEKILTFRIPYYVGPLARGNSRFAWMTRKSEETITPWNFEEVVDKGASAQSFIERMTNFDKNLPNEKVLPKHSLLYEYFTVYNELTKVKYVTEGMRKPAFLSGEQKKAIVDLLFKTNRKVTVKQLKEDYFKKIECFDSVEISGVEDRFNASLGTYHDLLKIIKDKDFLDNEENEDILEDIVLTLTLFEDREMIEERLKTYAHLFDDKVMKQLKRRRYTGWGRLSRKLINGIRDKQSGKTILDFLKSDGFANRNFMQLIHDDSLTFKEDIQKAQVSGQGDSLHEHIANLAGSPAIKKGILQTVKVVDELVKVMGRHKPENIVIEMARENQTTQKGQKNSRERMKRIEEGIKELGSQILKEHPVENTQLQNEKLYLYYLQNGRDMYVDQELDINRLSDYDVDHIVPQSFLKDDSIDNKVLTRSDKARGKSDNVPSEEVVKKMKNYWRQLLNAKLITQRKFDNLTKAERGGLSELDKAGFIKRQLVETRQITKHVAQILDSRMNTKYDENDKLIREVKVITLKSKLVSDFRKDFQFYKVREINNYHHAHDAYLNAVVGTALIKKYPKLESEFVYGDYKVYDVRKMIAKSEQEIGKATAKYFFYSNIMNFFKTEITLANGEIRKRPLIETNGETGEIVWDKGRDFATVRKVLSMPQVNIVKKTEVQTGGFSKESILPKRNSDKLIARKKDWDPKKYGGFDSPTVAYSVLVVAKVEKGKSKKLKSVKELLGITIMERSSFEKNPIDFLEAKGYKEVKKDLIIKLPKYSLFELENGRKRMLASAGELQKGNELALPSKYVNFLYLASHYEKLKGSPEDNEQKQLFVEQHKHYLDEIIEQISEFSKRVILADANLDKVLSAYNKHRDKPIREQAENIIHLFTLTNLGAPAAFKYFDTTIDRKRYTSTKEVLDATLIHQSITGLYETRIDLSQLGGDGGGGGGGGGGGGTVSLQDEHRLFDIPVTTSLPDVWLQDFPQAWAETGGLGRAKCQAPIIIDLKPTAVPVSIKQYPMSLEAHMGIRQHIIKFLELGVLRPCRSPWNTPLLPVKKPGTQDYRPVQDLREINKRTVDIHPTVPNPYNLLSTLKPDYSWYTVLDLKDAFFCLPLAPQSQELFAFEWKDPERGISGQLTWTRLPQGFKNSPTLFDEALHRDLTDFRTQHPEVTLLQYVDDLLLAAPTKKACTQGTRHLLQELGEKGYRASAKKAQICQTKVTYLGYILSEGKRWLTPGRIETVARIPPPRNPREVREFLGTAGFCRLWIPGFAELAAPLYALTKESTPFTWQTEHQLAFEALKKALLSAPALGLPDTSKPFTLFLDERQGIAKGVLTQKLGPWKRPVAYLSKKLDPVAAGWPPCLRIMAATAMLVKDSAKLTLGQPLTVITPHTLEAIVRQPPDRWITNARLTHYQALLLDTDRVQFGPPVTLNPATLLPVPENQPSPHDCRQVLAETHGTREDLKDQELPDADHTWYTDGSSYLDSGTRRAGAAVVDGHNTIWAQSLPPGTSAQKAELIALTKALELSKGKKANIYTDSRYAFATAHTHGSIYERRGLLTSEGKEIKNKAEIIALLKALFLPQEVAIIHCPGHQKGQDPVAVGNRQADRVARQAAMAEVLTLATEPDNTSHITAGKRTADGSEFEKRTADGSEFESPKKKAKVE

SEQ ID NO: 6277 - protein, 2091 aa, synthetic construct
MPAAKRVKLDGGDKKYSIGLDIGTNSVGWAVITDEYKVPSKKFKVLGNTDRHSIKKNLIGALLFDSGETAEATRLKRTARRRYTRRKNRICYLQEIFSNEMAKVDDSFFHRLEESFLVEEDKKHERHPIFGNIVDEVAYHEKYPTIYHLRKKLVDSTDKADLRLIYLALAHMIKFRGHFLIEGDLNPDNSDVDKLFIQLVQTYNQLFEENPINASGVDAKAILSARLSKSRRLENLIAQLPGEKKNGLFGNLIALSLGLTPNFKSNFDLAEDAKLQLSKDTYDDDLDNLLAQIGDQYADLFLAAKNLSDAILLSDILRVNTEITKAPLSASMIKRYDEHHQDLTLLKALVRQQLPEKYKEIFFDQSKNGYAGYIDGGASQEEFYKFIKPILEKMDGTEELLVKLNREDLLRKQRTFDNGSIPHQIHLGELHAILRRQEDFYPFLKDNREKIEKILTFRIPYYVGPLARGNSRFAWMTRKSEETITPWNFEEVVDKGASAQSFIERMTNFDKNLPNEKVLPKHSLLYEYFTVYNELTKVKYVTEGMRKPAFLSGEQKKAIVDLLFKTNRKVTVKQLKEDYFKKIECFDSVEISGVEDRFNASLGTYHDLLKIIKDKDFLDNEENEDILEDIVLTLTLFEDREMIEERLKTYAHLFDDKVMKQLKRRRYTGWGRLSRKLINGIRDKQSGKTILDFLKSDGFANRNFMQLIHDDSLTFKEDIQKAQVSGQGDSLHEHIANLAGSPAIKKGILQTVKVVDELVKVMGRHKPENIVIEMARENQTTQKGQKNSRERMKRIEEGIKELGSQILKEHPVENTQLQNEKLYLYYLQNGRDMYVDQELDINRLSDYDVDHIVPQSFLKDDSIDNKVLTRSDKARGKSDNVPSEEVVKKMKNYWRQLLNAKLITQRKFDNLTKAERGGLSELDKAGFIKRQLVETRQITKHVAQILDSRMNTKYDENDKLIREVKVITLKSKLVSDFRKDFQFYKVREINNYHHAHDAYLNAVVGTALIKKYPKLESEFVYGDYKVYDVRKMIAKSEQEIGKATAKYFFYSNIMNFFKTEITLANGEIRKRPLIETNGETGEIVWDKGRDFATVRKVLSMPQVNIVKKTEVQTGGFSKESILPKRNSDKLIARKKDWDPKKYGGFDSPTVAYSVLVVAKVEKGKSKKLKSVKELLGITIMERSSFEKNPIDFLEAKGYKEVKKDLIIKLPKYSLFELENGRKRMLASAGELQKGNELALPSKYVNFLYLASHYEKLKGSPEDNEQKQLFVEQHKHYLDEIIEQISEFSKRVILADANLDKVLSAYNKHRDKPIREQAENIIHLFTLTNLGAPAAFKYFDTTIDRKRYTSTKEVLDATLIHQSITGLYETRIDLSQLGGDGGGGGGGGGGGGVLNLEEEYRLHEKPVPSSIDPSWLQLFPTVWAERAGMGLANQVPPVVVELRSGASPVAVRQYPMSKEAREGIRPHIQKFLDLGVLVPCRSPWNTPLLPVKKPGTNDYRPVQDLREINKRVQDIHPTVPNPYNLLSSLPPSYTWYSVLDLKDAFFCLRLHPNSQPLFAFEWKDPEKGNTGQLTWTRLPQGFKNSPTLFNEALHRDLAPFRALNPQVVLLQYVDDLLVAAPTYEDCKKGTQKLLQELSKLGYRVSAKKAQLCQREVTYLGYLLKEGKRWLTPARKATVMKIPVPTTPRQVREFLGTAGFCRLWIPGFASLAAPLYPLTKPSIPFIWTEEHQQAFDHIKKALLSAPALALPDLTKPFTLYIDERAGVARGVLTQTLGPWRRPVAYLSKKLDPVASGWPTCLKAVAAVALLLKDADKLTLGQNVTVIASHSLESIVRQPPDRWMTNARMTHYQSLLLNERVSFAPPAVLNPATLLPVESEATPVHRCSEILAEETGTRRDLEDQPLPGVPTWYTDGSSFITEGKRRAGAPIVDGKRTVWASSLPEGTSAQKAELVALTQALRLAEGKNINIYTDSRYAFATAHIHGAIYKQRGWLTSAGKDIKNKEEILALLEAIHLPRRVAIIHCPGHQRGSNPVATGNRRADEAAKQAALSTRVLAGTTKPAGKRTADGSEFEKRTADGSEFESPKKKAKVE

SEQ ID NO: 6278 - protein, 2124 aa, synthetic construct
MPAAKRVKLDGGDKKYSIGLDIGTNSVGWAVITDEYKVPSKKFKVLGNTDRHSIKKNLIGALLFDSGETAEATRLKRTARRRYTRRKNRICYLQEIFSNEMAKVDDSFFHRLEESFLVEEDKKHERHPIFGNIVDEVAYHEKYPTIYHLRKKLVDSTDKADLRLIYLALAHMIKFRGHFLIEGDLNPDNSDVDKLFIQLVQTYNQLFEENPINASGVDAKAILSARLSKSRRLENLIAQLPGEKKNGLFGNLIALSLGLTPNFKSNFDLAEDAKLQLSKDTYDDDLDNLLAQIGDQYADLFLAAKNLSDAILLSDILRVNTEITKAPLSASMIKRYDEHHQDLTLLKALVRQQLPEKYKEIFFDQSKNGYAGYIDGGASQEEFYKFIKPILEKMDGTEELLVKLNREDLLRKQRTFDNGSIPHQIHLGELHAILRRQEDFYPFLKDNREKIEKILTFRIPYYVGPLARGNSRFAWMTRKSEETITPWNFEEVVDKGASAQSFIERMTNFDKNLPNEKVLPKHSLLYEYFTVYNELTKVKYVTEGMRKPAFLSGEQKKAIVDLLFKTNRKVTVKQLKEDYFKKIECFDSVEISGVEDRFNASLGTYHDLLKIIKDKDFLDNEENEDILEDIVLTLTLFEDREMIEERLKTYAHLFDDKVMKQLKRRRYTGWGRLSRKLINGIRDKQSGKTILDFLKSDGFANRNFMQLIHDDSLTFKEDIQKAQVSGQGDSLHEHIANLAGSPAIKKGILQTVKVVDELVKVMGRHKPENIVIEMARENQTTQKGQKNSRERMKRIEEGIKELGSQILKEHPVENTQLQNEKLYLYYLQNGRDMYVDQELDINRLSDYDVDHIVPQSFLKDDSIDNKVLTRSDKARGKSDNVPSEEVVKKMKNYWRQLLNAKLITQRKFDNLTKAERGGLSELDKAGFIKRQLVETRQITKHVAQILDSRMNTKYDENDKLIREVKVITLKSKLVSDFRKDFQFYKVREINNYHHAHDAYLNAVVGTALIKKYPKLESEFVYGDYKVYDVRKMIAKSEQEIGKATAKYFFYSNIMNFFKTEITLANGEIRKRPLIETNGETGEIVWDKGRDFATVRKVLSMPQVNIVKKTEVQTGGFSKESILPKRNSDKLIARKKDWDPKKYGGFDSPTVAYSVLVVAKVEKGKSKKLKSVKELLGITIMERSSFEKNPIDFLEAKGYKEVKKDLIIKLPKYSLFELENGRKRMLASAGELQKGNELALPSKYVNFLYLASHYEKLKGSPEDNEQKQLFVEQHKHYLDEIIEQISEFSKRVILADANLDKVLSAYNKHRDKPIREQAENIIHLFTLTNLGAPAAFKYFDTTIDRKRYTSTKEVLDATLIHQSITGLYETRIDLSQLGGDGGGGGGGGGGGGLLGRDLLTKLKAQIQFSTEGPQVTWEDRPAMCLVLNLEEEYRLHEKPVPPSIDPSWLQLFPMVWAEKAGMGLANQVPPVVVELKSDASPVAVRQYPMSKEAREGIRPHIQRFLDLGILVPCQSPWNTPLLPVKKPGTNDYRPVQDLREVNKRVQDIHPTVPNPYNLLSSLPPSHTWYSVLDLKDAFFCLKLHPNSQPLFAFEWRDPEKGNTGQLTWTRLPQGFKNSPTLFNEALHRDLASFRALNPQVVMLQYVDDLLVAAPTYRDCKEGTRRLLQELSKLGYRVSAKKAQLCREEVTYLGYLLKGGKRWLTPARKATVMKIPTPTTPRQVREFLGTAGFCRLWIPGFASLAAPLYPLTRPKVPFTWTEAHQEAFGRIKEALLSAPALALPDLTKPFALYVDEKEGVARGVLTQTLGPWRRPVAYLSKKLDPVASGWPTCLKAIAAVALLLKDADKLTLGQNVLVIAPHNLESIVRQPPDRWMTNARMTHYQSLLLNERVSFAPPAILNPATLLPVESDDTPIHICSEILAEETGTRPDLRDQPLPGVPAWYTDGSSFIMDGRRQAGAAIVDNKRTVWASNLPEGTSAQKAELIALTQALRLAEGKSINIYTDSRYAFATAHVHGAIYKQRGWLTSAGKDIKNKEEILALLEAIHLPKRVAIIHCPGHQRGTDPVATGNRKADEAAKQAAQSTRILTETTKNAGKRTADGSEFEKRTADGSEFESPKKKAKVE

SEQ ID NO: 6279 - protein, 2124 aa, synthetic construct
MPAAKRVKLDGGDKKYSIGLDIGTNSVGWAVITDEYKVPSKKFKVLGNTDRHSIKKNLIGALLFDSGETAEATRLKRTARRRYTRRKNRICYLQEIFSNEMAKVDDSFFHRLEESFLVEEDKKHERHPIFGNIVDEVAYHEKYPTIYHLRKKLVDSTDKADLRLIYLALAHMIKFRGHFLIEGDLNPDNSDVDKLFIQLVQTYNQLFEENPINASGVDAKAILSARLSKSRRLENLIAQLPGEKKNGLFGNLIALSLGLTPNFKSNFDLAEDAKLQLSKDTYDDDLDNLLAQIGDQYADLFLAAKNLSDAILLSDILRVNTEITKAPLSASMIKRYDEHHQDLTLLKALVRQQLPEKYKEIFFDQSKNGYAGYIDGGASQEEFYKFIKPILEKMDGTEELLVKLNREDLLRKQRTFDNGSIPHQIHLGELHAILRRQEDFYPFLKDNREKIEKILTFRIPYYVGPLARGNSRFAWMTRKSEETITPWNFEEVVDKGASAQSFIERMTNFDKNLPNEKVLPKHSLLYEYFTVYNELTKVKYVTEGMRKPAFLSGEQKKAIVDLLFKTNRKVTVKQLKEDYFKKIECFDSVEISGVEDRFNASLGTYHDLLKIIKDKDFLDNEENEDILEDIVLTLTLFEDREMIEERLKTYAHLFDDKVMKQLKRRRYTGWGRLSRKLINGIRDKQSGKTILDFLKSDGFANRNFMQLIHDDSLTFKEDIQKAQVSGQGDSLHEHIANLAGSPAIKKGILQTVKVVDELVKVMGRHKPENIVIEMARENQTTQKGQKNSRERMKRIEEGIKELGSQILKEHPVENTQLQNEKLYLYYLQNGRDMYVDQELDINRLSDYDVDHIVPQSFLKDDSIDNKVLTRSDKARGKSDNVPSEEVVKKMKNYWRQLLNAKLITQRKFDNLTKAERGGLSELDKAGFIKRQLVETRQITKHVAQILDSRMNTKYDENDKLIREVKVITLKSKLVSDFRKDFQFYKVREINNYHHAHDAYLNAVVGTALIKKYPKLESEFVYGDYKVYDVRKMIAKSEQEIGKATAKYFFYSNIMNFFKTEITLANGEIRKRPLIETNGETGEIVWDKGRDFATVRKVLSMPQVNIVKKTEVQTGGFSKESILPKRNSDKLIARKKDWDPKKYGGFDSPTVAYSVLVVAKVEKGKSKKLKSVKELLGITIMERSSFEKNPIDFLEAKGYKEVKKDLIIKLPKYSLFELENGRKRMLASAGELQKGNELALPSKYVNFLYLASHYEKLKGSPEDNEQKQLFVEQHKHYLDEIIEQISEFSKRVILADANLDKVLSAYNKHRDKPIREQAENIIHLFTLTNLGAPAAFKYFDTTIDRKRYTSTKEVLDATLIHQSITGLYETRIDLSQLGGDGGGGGGGGGGGGLLGRDLLTKLKAQIQFSTEGPQVTWEDRPAMCLVLNLEEEYRLHEKPVPPSIDPSWLQLFPMVWAEKAGMGLANQVPPVVVELKSDASPVAVRQYPMSKEAREGIRPHIQRFLDLGILVPCQSPWNTPLLPVKKPGTNDYRPVQDLREVNKRVQDIHPTVPNPYNLLSSLPPSHTWYSVLDLKDAFFCLKLHPNSQPLFAFEWRDPEKGNTGQLTWTRLPQGFKNSPTLFNEALHRDLASFRALNPQVVMLQYVDDLLVAAPTYRDCKEGTRRLLQELSKLGYRVSAKKAQLCREEVTYLGYLLKGGKRWLTPARKATVMKIPTPTTPRQVREFLGKAGFCRLFIPGFASLAAPLYPLTRPKVPFTWTEAHQEAFGRIKEALLSAPALALPDLTKPFALYVDEKEGVARGVLTQTLGPWRRPVAYLSKKLDPVASGWPTCLKAIAAVALLLKDADKLTLGQNVLVIAPHNLESIVRQPPDRWMTNARMTHYQSLLLNERVSFAPPAILNPATLLPVESDDTPIHICSEILAEETGTRPDLRDQPLPGVPAWYTDGSSFIMDGRRQAGAAIVDNKRTVWASNLPEGTSAQKAELIALTQALRLAEGKSINIYTDSRYAFATAHVHGAIYKQRGWLTSAGKDIKNKEEILALLEAIHLPKRVAIIHCPGHQRGTDPVATGNRKADEAAKQAAQSTRILTETTKNAGKRTADGSEFEKRTADGSEFESPKKKAKVE

SEQ ID NO: 6280 - protein, 2093 aa, synthetic construct
MPAAKRVKLDGGDKKYSIGLDIGTNSVGWAVITDEYKVPSKKFKVLGNTDRHSIKKNLIGALLFDSGETAEATRLKRTARRRYTRRKNRICYLQEIFSNEMAKVDDSFFHRLEESFLVEEDKKHERHPIFGNIVDEVAYHEKYPTIYHLRKKLVDSTDKADLRLIYLALAHMIKFRGHFLIEGDLNPDNSDVDKLFIQLVQTYNQLFEENPINASGVDAKAILSARLSKSRRLENLIAQLPGEKKNGLFGNLIALSLGLTPNFKSNFDLAEDAKLQLSKDTYDDDLDNLLAQIGDQYADLFLAAKNLSDAILLSDILRVNTEITKAPLSASMIKRYDEHHQDLTLLKALVRQQLPEKYKEIFFDQSKNGYAGYIDGGASQEEFYKFIKPILEKMDGTEELLVKLNREDLLRKQRTFDNGSIPHQIHLGELHAILRRQEDFYPFLKDNREKIEKILTFRIPYYVGPLARGNSRFAWMTRKSEETITPWNFEEVVDKGASAQSFIERMTNFDKNLPNEKVLPKHSLLYEYFTVYNELTKVKYVTEGMRKPAFLSGEQKKAIVDLLFKTNRKVTVKQLKEDYFKKIECFDSVEISGVEDRFNASLGTYHDLLKIIKDKDFLDNEENEDILEDIVLTLTLFEDREMIEERLKTYAHLFDDKVMKQLKRRRYTGWGRLSRKLINGIRDKQSGKTILDFLKSDGFANRNFMQLIHDDSLTFKEDIQKAQVSGQGDSLHEHIANLAGSPAIKKGILQTVKVVDELVKVMGRHKPENIVIEMARENQTTQKGQKNSRERMKRIEEGIKELGSQILKEHPVENTQLQNEKLYLYYLQNGRDMYVDQELDINRLSDYDVDHIVPQSFLKDDSIDNKVLTRSDKARGKSDNVPSEEVVKKMKNYWRQLLNAKLITQRKFDNLTKAERGGLSELDKAGFIKRQLVETRQITKHVAQILDSRMNTKYDENDKLIREVKVITLKSKLVSDFRKDFQFYKVREINNYHHAHDAYLNAVVGTALIKKYPKLESEFVYGDYKVYDVRKMIAKSEQEIGKATAKYFFYSNIMNFFKTEITLANGEIRKRPLIETNGETGEIVWDKGRDFATVRKVLSMPQVNIVKKTEVQTGGFSKESILPKRNSDKLIARKKDWDPKKYGGFDSPTVAYSVLVVAKVEKGKSKKLKSVKELLGITIMERSSFEKNPIDFLEAKGYKEVKKDLIIKLPKYSLFELENGRKRMLASAGELQKGNELALPSKYVNFLYLASHYEKLKGSPEDNEQKQLFVEQHKHYLDEIIEQISEFSKRVILADANLDKVLSAYNKHRDKPIREQAENIIHLFTLTNLGAPAAFKYFDTTIDRKRYTSTKEVLDATLIHQSITGLYETRIDLSQLGGDGGGGGGGGGGGGTLNLEDEYRLYETSAEPEVSPGSTWLSDFPQAWAETGGMGLAVRQAPLIIPLKATSTPVSIKQYPMSQEAKLGIKPHIQRLLDQGILVPCQSPWNTPLLPVKKPGTNDYRPVQDLREVNKRVEDIHPTVPNPYNLLSGLPPSHRWYTVLDLKDAFFCLRLHPTSQPLFAFEWRDPGMGISGQLTWTRLPQGFKNSPTLFNEALHRDLADFRIQHPDLILLQYVDDILLAATSELDCQQGTRALLLTLGNLGYRASAKKAQLCQKQVKYLGYLLKEGQRWLTEARKETVMGQPTPKTPRQLREFLGKAGFCRLFIPGFAEMAAPLYPLTKPGTLFNWGPDQQKAYQEIKQALLTAPALGLPDLTKPFELFVDEKQGYAKGVLTQKLGPWRRPVAYLSKKLDPVAAGWPPCLRMVAAIAVLRKDAGKLTMGQPLVILAPHAVEALVKQPPDRWLSNARMTHYQAMLLDTDRVQFGPVVALNPATLLPLPEEGAPHDCLEILAETHGTRPDLTDQPIPDADHTWYTDGSSFLQEGQRKAGAAVTTETEVIWARALPAGTSAQRAELIALTQALKMAEGKRLNVYTDSRYAFATAHIHGEIYRRRGWLTSEGREIKNKSEILALLKALFLPKRLSIIHCLGHQKGDSAEARGNRLADQAAREAAIKTPPDTSTLLAGKRTADGSEFEKRTADGSEFESPKKKAKVE

SEQ ID NO: 6281 - protein, 2093 aa, synthetic construct
MPAAKRVKLDGGDKKYSIGLDIGTNSVGWAVITDEYKVPSKKFKVLGNTDRHSIKKNLIGALLFDSGETAEATRLKRTARRRYTRRKNRICYLQEIFSNEMAKVDDSFFHRLEESFLVEEDKKHERHPIFGNIVDEVAYHEKYPTIYHLRKKLVDSTDKADLRLIYLALAHMIKFRGHFLIEGDLNPDNSDVDKLFIQLVQTYNQLFEENPINASGVDAKAILSARLSKSRRLENLIAQLPGEKKNGLFGNLIALSLGLTPNFKSNFDLAEDAKLQLSKDTYDDDLDNLLAQIGDQYADLFLAAKNLSDAILLSDILRVNTEITKAPLSASMIKRYDEHHQDLTLLKALVRQQLPEKYKEIFFDQSKNGYAGYIDGGASQEEFYKFIKPILEKMDGTEELLVKLNREDLLRKQRTFDNGSIPHQIHLGELHAILRRQEDFYPFLKDNREKIEKILTFRIPYYVGPLARGNSRFAWMTRKSEETITPWNFEEVVDKGASAQSFIERMTNFDKNLPNEKVLPKHSLLYEYFTVYNELTKVKYVTEGMRKPAFLSGEQKKAIVDLLFKTNRKVTVKQLKEDYFKKIECFDSVEISGVEDRFNASLGTYHDLLKIIKDKDFLDNEENEDILEDIVLTLTLFEDREMIEERLKTYAHLFDDKVMKQLKRRRYTGWGRLSRKLINGIRDKQSGKTILDFLKSDGFANRNFMQLIHDDSLTFKEDIQKAQVSGQGDSLHEHIANLAGSPAIKKGILQTVKVVDELVKVMGRHKPENIVIEMARENQTTQKGQKNSRERMKRIEEGIKELGSQILKEHPVENTQLQNEKLYLYYLQNGRDMYVDQELDINRLSDYDVDHIVPQSFLKDDSIDNKVLTRSDKARGKSDNVPSEEVVKKMKNYWRQLLNAKLITQRKFDNLTKAERGGLSELDKAGFIKRQLVETRQITKHVAQILDSRMNTKYDENDKLIREVKVITLKSKLVSDFRKDFQFYKVREINNYHHAHDAYLNAVVGTALIKKYPKLESEFVYGDYKVYDVRKMIAKSEQEIGKATAKYFFYSNIMNFFKTEITLANGEIRKRPLIETNGETGEIVWDKGRDFATVRKVLSMPQVNIVKKTEVQTGGFSKESILPKRNSDKLIARKKDWDPKKYGGFDSPTVAYSVLVVAKVEKGKSKKLKSVKELLGITIMERSSFEKNPIDFLEAKGYKEVKKDLIIKLPKYSLFELENGRKRMLASAGELQKGNELALPSKYVNFLYLASHYEKLKGSPEDNEQKQLFVEQHKHYLDEIIEQISEFSKRVILADANLDKVLSAYNKHRDKPIREQAENIIHLFTLTNLGAPAAFKYFDTTIDRKRYTSTKEVLDATLIHQSITGLYETRIDLSQLGGDGGGGGGGGGGGGLGIEDEYRLHETSTEPDVSLGSTWLSDFPQAWAETGGMGLAVRQAPLIIPLKATSTPVSIQQYPMSHEARLGIKPHIQRLLDQGILVPCQSPWNTPLLPVKKPGTNDYRPVQDLREVNKRVEDIHPTVPNPYNLLSGLPPSHQWYTVLDLKDAFFCLRLHPTSQPLFAFEWRDPGMGISGQLTWTRLPQGFKNSPTLFNEALHRDLADFRIQHPDLILLQYVDDILLAATSELDCQQGTRALLQTLGDLGYRASAKKAQICQKQVKYLGYLLREGQRWLTEARKETVMGQPVPKTPRQLREFLGKAGFCRLFIPGFAEMAAPLYPLTKPGTLFSWGPDQQKAYQEIKQALLTAPALGLPDLTKPFELFVDEKQGYAKGVLTQKLGPWRRPVAYLSKKLDPVAAGWPPCLRMVAAIAVLTKDAGKLTMGQPLVILAPHAVEALVKQPPDRWLSNARMTHYQAMLLDTDRVQFGPVVALNPATLLPLPEEGAPHDCLEILAETHGTRPDLTDQPIPDADHTWYTDGSSFLQEGQRKAGAAVTTETEVIWAGALPAGTSAQRAELIALTQALKMAEGKRLNVYTDSRYAFATAHIHGEIYRRRGWLTSEGREIKNKSEILALLKALFLPKRLSIIHCLGHQKGDSAEARGNRLADQAAREAAIKTPPDTSTLLIAGKRTADGSEFEKRTADGSEFESPKKKAKVE

SEQ ID NO: 6282 - protein, 2093 aa, synthetic construct; identical to SEQ ID NO: 6281

SEQ ID NO: 6283 - protein, 2093 aa, synthetic construct
MPAAKRVKLDGGDKKYSIGLDIGTNSVGWAVITDEYKVPSKKFKVLGNTDRHSIKKNLIGALLFDSGETAEATRLKRTARRRYTRRKNRICYLQEIFSNEMAKVDDSFFHRLEESFLVEEDKKHERHPIFGNIVDEVAYHEKYPTIYHLRKKLVDSTDKADLRLIYLALAHMIKFRGHFLIEGDLNPDNSDVDKLFIQLVQTYNQLFEENPINASGVDAKAILSARLSKSRRLENLIAQLPGEKKNGLFGNLIALSLGLTPNFKSNFDLAEDAKLQLSKDTYDDDLDNLLAQIGDQYADLFLAAKNLSDAILLSDILRVNTEITKAPLSASMIKRYDEHHQDLTLLKALVRQQLPEKYKEIFFDQSKNGYAGYIDGGASQEEFYKFIKPILEKMDGTEELLVKLNREDLLRKQRTFDNGSIPHQIHLGELHAILRRQEDFYPFLKDNREKIEKILTFRIPYYVGPLARGNSRFAWMTRKSEETITPWNFEEVVDKGASAQSFIERMTNFDKNLPNEKVLPKHSLLYEYFTVYNELTKVKYVTEGMRKPAFLSGEQKKAIVDLLFKTNRKVTVKQLKEDYFKKIECFDSVEISGVEDRFNASLGTYHDLLKIIKDKDFLDNEENEDILEDIVLTLTLFEDREMIEERLKTYAHLFDDKVMKQLKRRRYTGWGRLSRKLINGIRDKQSGKTILDFLKSDGFANRNFMQLIHDDSLTFKEDIQKAQVSGQGDSLHEHIANLAGSPAIKKGILQTVKVVDELVKVMGRHKPENIVIEMARENQTTQKGQKNSRERMKRIEEGIKELGSQILKEHPVENTQLQNEKLYLYYLQNGRDMYVDQELDINRLSDYDVDHIVPQSFLKDDSIDNKVLTRSDKARGKSDNVPSEEVVKKMKNYWRQLLNAKLITQRKFDNLTKAERGGLSELDKAGFIKRQLVETRQITKHVAQILDSRMNTKYDENDKLIREVKVITLKSKLVSDFRKDFQFYKVREINNYHHAHDAYLNAVVGTALIKKYPKLESEFVYGDYKVYDVRKMIAKSEQEIGKATAKYFFYSNIMNFFKTEITLANGEIRKRPLIETNGETGEIVWDKGRDFATVRKVLSMPQVNIVKKTEVQTGGFSKESILPKRNSDKLIARKKDWDPKKYGGFDSPTVAYSVLVVAKVEKGKSKKLKSVKELLGITIMERSSFEKNPIDFLEAKGYKEVKKDLIIKLPKYSLFELENGRKRMLASAGELQKGNELALPSKYVNFLYLASHYEKLKGSPEDNEQKQLFVEQHKHYLDEIIEQISEFSKRVILADANLDKVLSAYNKHRDKPIREQAENIIHLFTLTNLGAPAAFKYFDTTIDRKRYTSTKEVLDATLIHQSITGLYETRIDLSQLGGDGGGGGGGGGGGGTLNIEDEYRLHETSKEPDVSLGSTWLSDFPQAWAETGGMGLAVRQAPLIIPLKATSTPVSIKQYPMSQEARLGIKPHIQRLLDQGILVPCQSPWNTPLLPVKKPGTNDYRPVQDLREVNKRVEDIHPTVPNPYNLLSGLPPSHQWYTVLDLKDAFFCLRLHPTSQPLFAFEWRDPEMGISGQLTWTRLPQGFKNSPTLFNEALHRDLAGFRIQHPDLILLQYVDDLLLAATSELDCQQGTRALLQTLGDLGYRASAKKAQICQKQVKYLGYLLKEGQRWLTEARKETVMGQPIPKTPRQLREFLGTAGFCRLWIPGFAEMAAPLYPLTKPGTLFNWGPDQQKAFQEIKQALLTAPALGLPDLTKPFELFVDEKQGYAKGVLTQKLGPWRRPVAYLSKKLDPVAAGWPPCLRMVAAIAVLTKDAGKLTMGQPLVILAPHAVEALVKQPPDRWLSNARMTHYQALLLDTDRVQFGPVVALNPATLLPLPEEGLQHDCLDILAEAHGTRSDLMDQPLPDADHTWYTDGSSFLQEGQRKAGAAVTTETEVIWARALPAGTSAQRAELIALTQALKMAEGKKLNVYTDSRYAFATAHIHGEIYRRRGWLTSEGKEIKNKDEILALLKALFLPKRLSIIHCPGHQKGNSAEARGNRMADQAAREVATRETPETSTLLAGKRTADGSEFEKRTADGSEFESPKKKAKVE

SEQ ID NO: 6284 - protein, 2093 aa, synthetic construct
MPAAKRVKLDGGDKKYSIGLDIGTNSVGWAVITDEYKVPSKKFKVLGNTDRHSIKKNLIGALLFDSGETAEATRLKRTARRRYTRRKNRICYLQEIFSNEMAKVDDSFFHRLEESFLVEEDKKHERHPIFGNIVDEVAYHEKYPTIYHLRKKLVDSTDKADLRLIYLALAHMIKFRGHFLIEGDLNPDNSDVDKLFIQLVQTYNQLFEENPINASGVDAKAILSARLSKSRRLENLIAQLPGEKKNGLFGNLIALSLGLTPNFKSNFDLAEDAKLQLSKDTYDDDLDNLLAQIGDQYADLFLAAKNLSDAILLSDILRVNTEITKAPLSASMIKRYDEHHQDLTLLKALVRQQLPEKYKEIFFDQSKNGYAGYIDGGASQEEFYKFIKPILEKMDGTEELLVKLNREDLLRKQRTFDNGSIPHQIHLGELHAILRRQEDFYPFLKDNREKIEKILTFRIPYYVGPLARGNSRFAWMTRKSEETITPWNFEEVVDKGASAQSFIERMTNFDKNLPNEKVLPKHSLLYEYFTVYNELTKVKYVTEGMRKPAFLSGEQKKAIVDLLFKTNRKVTVKQLKEDYFKKIECFDSVEISGVEDRFNASLGTYHDLLKIIKDKDFLDNEENEDILEDIVLTLTLFEDREMIEERLKTYAHLFDDKVMKQLKRRRYTGWGRLSRKLINGIRDKQSGKTILDFLKSDGFANRNFMQLIHDDSLTFKEDIQKAQVSGQGDSLHEHIANLAGSPAIKKGILQTVKVVDELVKVMGRHKPENIVIEMARENQTTQKGQKNSRERMKRIEEGIKELGSQILKEHPVENTQLQNEKLYLYYLQNGRDMYVDQELDINRLSDYDVDHIVPQSFLKDDSIDNKVLTRSDKARGKSDNVPSEEVVKKMKNYWRQLLNAKLITQRKFDNLTKAERGGLSELDKAGFIKRQLVETRQITKHVAQILDSRMNTKYDENDKLIREVKVITLKSKLVSDFRKDFQFYKVREINNYHHAHDAYLNAVVGTALIKKYPKLESEFVYGDYKVYDVRKMIAKSEQEIGKATAKYFFYSNIMNFFKTEITLANGEIRKRPLIETNGETGEIVWDKGRDFATVRKVLSMPQVNIVKKTEVQTGGFSKESILPKRNSDKLIARKKDWDPKKYGGFDSPTVAYSVLVVAKVEKGKSKKLKSVKELLGITIMERSSFEKNPIDFLEAKGYKEVKKDLIIKLPKYSLFELENGRKRMLASAGELQKGNELALPSKYVNFLYLASHYEKLKGSPEDNEQKQLFVEQHKHYLDEIIEQISEFSKRVILADANLDKVLSAYNKHRDKPIREQAENIIHLFTLTNLGAPAAFKYFDTTIDRKRYTSTKEVLDATLIHQSITGLYETRIDLSQLGGDGGGGGGGGGGGGTLNIEDEHRLHETSKEPDVSLGSTWLSDFPQAWAETGGMGLAVRQAPLIIPLKATSTPVSIKQYPMSQEARLGIKPHIQRLLDQGILVPCQSPWNTPLLPVKKPGTNDYRPVQDLREVNKRVEDIHPTVPNPYNLLSGLPPSHQWYTVLDLKDAFFCLRLHPTSQPLFAFEWRDPEMGISGQLTWTRLPQGFKNSPTLFNEALHRDLADFRIQHPDLILLQYVDDLLLAATSELDCQQGTRALLQTLGNLGYRASAKKAQICQKQVKYLGYLLKEGQRWLTEARKETVMGQPTPKTPRQLREFLGKAGFCRLFIPGFAEMAAPLYPLTKPGTLFNWGPDQQKAYQEIKQALLTAPALGLPDLTKPFELFVDEKQGYAKGVLTQKLGPWRRPVAYLSKKLDPVAAGWPPCLRMVAAIAVLTKDAGKLTMGQPLVILAPHAVEALVKQPPDRWLSNARMTHYQALLLDTDRVQFGPVVALNPATLLPLPEEGLQHNCLDILAEAHGTRPDLTDQPLPDADHTWYTDGSSLLQEGQRKAGAAVTTETEVIWAKALPAGTSAQRAELIALTQALKMAEGKKLNVYTDSRYAFATAHIHGEIYRRRGWLTSEGKEIKNKDEILALLKALFLPKRLSIIHCPGHQKGHSAEARGNRMADQAARKAAITETPDTSTLLAGKRTADGSEFEKRTADGSEFESPKKKAKVE

SEQ ID NO: 6285 - protein, 2093 aa, synthetic construct; identical to SEQ ID NO: 6284

SEQ ID NO: 6286 - protein, 2091 aa, synthetic construct
MPAAKRVKLDGGDKKYSIGLDIGTNSVGWAVITDEYKVPSKKFKVLGNTDRHSIKKNLIGALLFDSGETAEATRLKRTARRRYTRRKNRICYLQEIFSNEMAKVDDSFFHRLEESFLVEEDKKHERHPIFGNIVDEVAYHEKYPTIYHLRKKLVDSTDKADLRLIYLALAHMIKFRGHFLIEGDLNPDNSDVDKLFIQLVQTYNQLFEENPINASGVDAKAILSARLSKSRRLENLIAQLPGEKKNGLFGNLIALSLGLTPNFKSNFDLAEDAKLQLSKDTYDDDLDNLLAQIGDQYADLFLAAKNLSDAILLSDILRVNTEITKAPLSASMIKRYDEHHQDLTLLKALVRQQLPEKYKEIFFDQSKNGYAGYIDGGASQEEFYKFIKPILEKMDGTEELLVKLNREDLLRKQRTFDNGSIPHQIHLGELHAILRRQEDFYPFLKDNREKIEKILTFRIPYYVGPLARGNSRFAWMTRKSEETITPWNFEEVVDKGASAQSFIERMTNFDKNLPNEKVLPKHSLLYEYFTVYNELTKVKYVTEGMRKPAFLSGEQKKAIVDLLFKTNRKVTVKQLKEDYFKKIECFDSVEISGVEDRFNASLGTYHDLLKIIKDKDFLDNEENEDILEDIVLTLTLFEDREMIEERLKTYAHLFDDKVMKQLKRRRYTGWGRLSRKLINGIRDKQSGKTILDFLKSDGFANRNFMQLIHDDSLTFKEDIQKAQVSGQGDSLHEHIANLAGSPAIKKGILQTVKVVDELVKVMGRHKPENIVIEMARENQTTQKGQKNSRERMKRIEEGIKELGSQILKEHPVENTQLQNEKLYLYYLQNGRDMYVDQELDINRLSDYDVDHIVPQSFLKDDSIDNKVLTRSDKARGKSDNVPSEEVVKKMKNYWRQLLNAKLITQRKFDNLTKAERGGLSELDKAGFIKRQLVETRQITKHVAQILDSRMNTKYDENDKLIREVKVITLKSKLVSDFRKDFQFYKVREINNYHHAHDAYLNAVVGTALIKKYPKLESEFVYGDYKVYDVRKMIAKSEQEIGKATAKYFFYSNIMNFFKTEITLANGEIRKRPLIETNGETGEIVWDKGRDFATVRKVLSMPQVNIVKKTEVQTGGFSKESILPKRNSDKLIARKKDWDPKKYGGFDSPTVAYSVLVVAKVEKGKSKKLKSVKELLGITIMERSSFEKNPIDFLEAKGYKEVKKDLIIKLPKYSLFELENGRKRMLASAGELQKGNELALPSKYVNFLYLASHYEKLKGSPEDNEQKQLFVEQHKHYLDEIIEQISEFSKRVILADANLDKVLSAYNKHRDKPIREQAENIIHLFTLTNLGAPAAFKYFDTTIDRKRYTSTKEVLDATLIHQSITGLYETRIDLSQLGGDGGGGGGGGGGGGVLNLEEEYRLHEKPVPSSIDPSWLQLFPTVWAERAGMGLANQVPPVVVELRSGASPVAVRQYPMSKEAREGIRPHIQRFLDLGVLVPCQSPWNTPLLPVKKPGTNDYRPVQDLREINKRVQDIHPTVPNPYNLLSSLPPSHTWYSVLDLKDAFFCLKLHPNSQPLFAFEWRDPEKGNTGQLTWTRLPQGFKNSPTLFNEALHRDLAPFRALNPQVVLLQYVDDLLVAAPTYRDCKEGTQKLLQELSKLGYRVSAKKAQLCQKEVTYLGYLLKEGKRWLTPARKATVMKIPPPTTPRQVREFLGKAGFCRLFIPGFASLAAPLYPLTKPSIPFIWTEEHQKAFDRIKEALLSAPALALPDLTKPFTLYVDERAGVARGVLTQTLGPWRRPVAYLSKKLDPVASGWPTCLKAVAAVALLLKDADKLTLGQNVTVIASHSLESIVRQPPDRWMTNARMTHYQSLLLNERVSFAPPAVLNPATLLPVESEATPVHRCSEILAEETGTRRDLKDQPLPGVPAWYTDGSSFIAEGKRRAGAAIVDGKRTVWASSLPEGTSAQKAELVALTQALRLAEGKDINIYTDSRYAFATAHIHGAIYKQRGWLTSAGKDIKNKEEILALLEAIHLPKRVAIIHCPGHQKGNDPVATGNRRADEAAKQAALSTRVLAETTKPAGKRTADGSEFEKRTADGSEFESPKKKAKVE

SEQ ID NO: 6287 - protein, 2093 aa, synthetic construct
MPAAKRVKLDGGDKKYSIGLDIGTNSVGWAVITDEYKVPSKKFKVLGNTDRHSIKKNLIGALLFDSGETAEATRLKRTARRRYTRRKNRICYLQEIFSNEMAKVDDSFFHRLEESFLVEEDKKHERHPIFGNIVDEVAYHEKYPTIYHLRKKLVDSTDKADLRLIYLALAHMIKFRGHFLIEGDLNPDNSDVDKLFIQLVQTYNQLFEENPINASGVDAKAILSARLSKSRRLENLIAQLPGEKKNGLFGNLIALSLGLTPNFKSNFDLAEDAKLQLSKDTYDDDLDNLLAQIGDQYADLFLAAKNLSDAILLSDILRVNTEITKAPLSASMIKRYDEHHQDLTLLKALVRQQLPEKYKEIFFDQSKNGYAGYIDGGASQEEFYKFIKPILEKMDGTEELLVKLNREDLLRKQRTFDNGSIPHQIHLGELHAILRRQEDFYPFLKDNREKIEKILTFRIPYYVGPLARGNSRFAWMTRKSEETITPWNFEEVVDKGASAQSFIERMTNFDKNLPNEKVLPKHSLLYEYFTVYNELTKVKYVTEGMRKPAFLSGEQKKAIVDLLFKTNRKVTVKQLKEDYFKKIECFDSVEISGVEDRFNASLGTYHDLLKIIKDKDFLDNEENEDILEDIVLTLTLFEDREMIEERLKTYAHLFDDKVMKQLKRRRYTGWGRLSRKLINGIRDKQSGKTILDFLKSDGFANRNFMQLIHDDSLTFKEDIQKAQVSGQGDSLHEHIANLAGSPAIKKGILQTVKVVDELVKVMGRHKPENIVIEMARENQTTQKGQKNSRERMKRIEEGIKELGSQILKEHPVENTQLQNEKLYLYYLQNGRDMYVDQELDINRLSDYDVDHIVPQSFLKDDSIDNKVLTRSDKARGKSDNVPSEEVVKKMKNYWRQLLNAKLITQRKFDNLTKAERGGLSELDKAGFIKRQLVETRQITKHVAQILDSRMNTKYDENDKLIREVKVITLKSKLVSDFRKDFQFYKVREINNYHHAHDAYLNAVVGTALIKKYPKLESEFVYGDYKVYDVRKMIAKSEQEIGKATAKYFFYSNIMNFFKTEITLANGEIRKRPLIETNGETGEIVWDKGRDFATVRKVLSMPQVNIVKKTEVQTGGFSKESILPKRNSDKLIARKKDWDPKKYGGFDSPTVAYSVLVVAKVEKGKSKKLKSVKELLGITIMERSSFEKNPIDFLEAKGYKEVKKDLIIKLPKYSLFELENGRKRMLASAGELQKGNELALPSKYVNFLYLASHYEKLKGSPEDNEQKQLFVEQHKHYLDEIIEQISEFSKRVILADANLDKVLSAYNKHRDKPIREQAENIIHLFTLTNLGAPAAFKYFDTTIDRKRYTSTKEVLDATLIHQSITGLYETRIDLSQLGGDGGGGGGGGGGGGTLNIEDEYRLHETSKEPDVPLGSTWLSDFPQAWAETGGMGLAVRQAPLIIPLKATSTPVSIKQYPMSQEARLGIKPHIQRLLDQGILVPCQSPWNTPLLPVKKPGTNDYRPVQDLREVNKRVEDIHPTVPNPYNLLSGLPPSHQWYTVLDLKDAFFCLRLHPTSQPLFAFEWRDPEMGISGQLTWTRLPQGFKNSPTLFNEALHRDLADFRIQHPDLILLQYVDDLLLAATSEQDCQRGTRALLQTLGNLGYRASAKKAQICQKQVKYLGYLLKEGQRWLTEARKETVMGQPTPKTPRQLREFLGTAGFCRLWIPGFAEMAAPLYPLTKPGTLFNWGPDQQKAYQEIKQALLTAPALGLPDLTKPFELFVDEKQGYAKGVLTQKLGPWRRPVAYLSKKLDPVAAGWPPCLRMVAAIAVLTKDAGKLTMGQPLVILAPHAVEALVKQPPDRWLSNARMTHYQAMLLDTDRVQFGPVVALNPATLLPLPEKEAPHDCLEILAETHGTRPDLTDQPIPDADYTWYTDGSSFLQEGQRRAGAAVTTETEVIWARALPAGTSAQRAELIALTQALKMAEGKKLNVYTDSRYAFATAHVHGEIYRRRGWLTSEGREIKNKNEILALLKALFLPKRLSIIHCPGHQKGNSAEARGNRMADQAAREAAMKAVLETSTLLAGKRTADGSEFEKRTADGSEFESPKKKAKVE

SEQ ID NO: 6288 - protein, 2093 aa, synthetic construct
MPAAKRVKLDGGDKKYSIGLDIGTNSVGWAVITDEYKVPSKKFKVLGNTDRHSIKKNLIGALLFDSGETAEATRLKRTARRRYTRRKNRICYLQEIFSNEMAKVDDSFFHRLEESFLVEEDKKHERHPIFGNIVDEVAYHEKYPTIYHLRKKLVDSTDKADLRLIYLALAHMIKFRGHFLIEGDLNPDNSDVDKLFIQLVQTYNQLFEENPINASGVDAKAILSARLSKSRRLENLIAQLPGEKKNGLFGNLIALSLGLTPNFKSNFDLAEDAKLQLSKDTYDDDLDNLLAQIGDQYADLFLAAKNLSDAILLSDILRVNTEITKAPLSASMIKRYDEHHQDLTLLKALVRQQLPEKYKEIFFDQSKNGYAGYIDGGASQEEFYKFIKPILEKMDGTEELLVKLNREDLLRKQRTFDNGSIPHQIHLGELHAILRRQEDFYPFLKDNREKIEKILTFRIPYYVGPLARGNSRFAWMTRKSEETITPWNFEEVVDKGASAQSFIERMTNFDKNLPNEKVLPKHSLLYEYFTVYNELTKVKYVTEGMRKPAFLSGEQKKAIVDLLFKTNRKVTVKQLKEDYFKKIECFDSVEISGVEDRFNASLGTYHDLLKIIKDKDFLDNEENEDILEDIVLTLTLFEDREMIEERLKTYAHLFDDKVMKQLKRRRYTGWGRLSRKLINGIRDKQSGKTILDFLKSDGFANRNFMQLIHDDSLTFKEDIQKAQVSGQGDSLHEHIANLAGSPAIKKGILQTVKVVDELVKVMGRHKPENIVIEMARENQTTQKGQKNSRERMKRIEEGIKELGSQILKEHPVENTQLQNEKLYLYYLQNGRDMYVDQELDINRLSDYDVDHIVPQSFLKDDSIDNKVLTRSDKARGKSDNVPSEEVVKKMKNYWRQLLNAKLITQRKFDNLTKAERGGLSELDKAGFIKRQLVETRQITKHVAQILDSRMNTKYDENDKLIREVKVITLKSKLVSDFRKDFQFYKVREINNYHHAHDAYLNAVVGTALIKKYPKLESEFVYGDYKVYDVRKMIAKSEQEIGKATAKYFFYSNIMNFFKTEITLANGEIRKRPLIETNGETGEIVWDKGRDFATVRKVLSMPQVNIVKKTEVQTGGFSKESILPKRNSDKLIARKKDWDPKKYGGFDSPTVAYSVLVVAKVEKGKSKKLKSVKELLGITIMERSSFEKNPIDFLEAKGYKEVKKDLIIKLPKYSLFELENGRKRMLASAGELQKGNELALPSKYVNFLYLASHYEKLKGSPEDNEQKQLFVEQHKHYLDEIIEQISEFSKRVILADANLDKVLSAYNKHRDKPIREQAENIIHLFTLTNLGAPAAFKYFDTTIDRKRYTSTKEVLDATLIHQSITGLYETRIDLSQLGGDGGGGGGGGGGGGTLNIEDEYRLHETSKEPDVPLGSTWLSDFPQAWAETGGMGLAVRQAPLIIPLKATSTPVSIKQYPMSQEARLGIKPHIQRLLDQGILVPCQSPWNTPLLPVKKPGTNDYRPVQDLREVNKRVEDIHPTVPNPYNLLSGLPPSHQWYTVLDLKDAFFCLRLHPTSQPLFAFEWRDPEMGISGQLTWTRLPQGFKNSPTLFNEALHRDLADFRIQHPDLILLQYVDDLLLAATSEQDCQRGTRALLQTLGNLGYRASAKKAQICQKQVKYLGYLLKEGQRWLTEARKETVMGQPTPKTPRQLREFLGKAGFCRLFIPGFAEMAAPLYPLTKPGTLFNWGPDQQKAYQEIKQALLTAPALGLPDLTKPFELFVDEKQGYAKGVLTQKLGPWRRPVAYLSKKLDPVAAGWPPCLRMVAAIAVLTKDAGKLTMGQPLVILAPHAVEALVKQPPDRWLSNARMTHYQAMLLDTDRVQFGPVVALNPATLLPLPEKEAPHDCLEILAETHGTRPDLTDQPIPDADYTWYTDGSSFLQEGQRRAGAAVTTETEVIWARALPAGTSAQRAELIALTQALKMAEGKKLNVYTDSRYAFATAHVHGEIYRRRGWLTSEGREIKNKNEILALLKALFLPKRLSIIHCPGHQKGNSAEARGNRMADQAAREAAMKAVLETSTLLAGKRTADGSEFEKRTADGSEFESPKKKAKVE

SEQ ID NO: 6289 - protein, 2090 aa, synthetic construct
MPAAKRVKLDGGDKKYSIGLDIGTNSVGWAVITDEYKVPSKKFKVLGNTDRHSIKKNLIGALLFDSGETAEATRLKRTARRRYTRRKNRICYLQEIFSNEMAKVDDSFFHRLEESFLVEEDKKHERHPIFGNIVDEVAYHEKYPTIYHLRKKLVDSTDKADLRLIYLALAHMIKFRGHFLIEGDLNPDNSDVDKLFIQLVQTYNQLFEENPINASGVDAKAILSARLSKSRRLENLIAQLPGEKKNGLFGNLIALSLGLTPNFKSNFDLAEDAKLQLSKDTYDDDLDNLLAQIGDQYADLFLAAKNLSDAILLSDILRVNTEITKAPLSASMIKRYDEHHQDLTLLKALVRQQLPEKYKEIFFDQSKNGYAGYIDGGASQEEFYKFIKPILEKMDGTEELLVKLNREDLLRKQRTFDNGSIPHQIHLGELHAILRRQEDFYPFLKDNREKIEKILTFRIPYYVGPLARGNSRFAWMTRKSEETITPWNFEEVVDKGASAQSFIERMTNFDKNLPNEKVLPKHSLLYEYFTVYNELTKVKYVTEGMRKPAFLSGEQKKAIVDLLFKTNRKVTVKQLKEDYFKKIECFDSVEISGVEDRFNASLGTYHDLLKIIKDKDFLDNEENEDILEDIVLTLTLFEDREMIEERLKTYAHLFDDKVMKQLKRRRYTGWGRLSRKLINGIRDKQSGKTILDFLKSDGFANRNFMQLIHDDSLTFKEDIQKAQVSGQGDSLHEHIANLAGSPAIKKGILQTVKVVDELVKVMGRHKPENIVIEMARENQTTQKGQKNSRERMKRIEEGIKELGSQILKEHPVENTQLQNEKLYLYYLQNGRDMYVDQELDINRLSDYDVDHIVPQSFLKDDSIDNKVLTRSDKARGKSDNVPSEEVVKKMKNYWRQLLNAKLITQRKFDNLTKAERGGLSELDKAGFIKRQLVETRQITKHVAQILDSRMNTKYDENDKLIREVKVITLKSKLVSDFRKDFQFYKVREINNYHHAHDAYLNAVVGTALIKKYPKLESEFVYGDYKVYDVRKMIAKSEQEIGKATAKYFFYSNIMNFFKTEITLANGEIRKRPLIETNGETGEIVWDKGRDFATVRKVLSMPQVNIVKKTEVQTGGFSKESILPKRNSDKLIARKKDWDPKKYGGFDSPTVAYSVLVVAKVEKGKSKKLKSVKELLGITIMERSSFEKNPIDFLEAKGYKEVKKDLIIKLPKYSLFELENGRKRMLASAGELQKGNELALPSKYVNFLYLASHYEKLKGSPEDNEQKQLFVEQHKHYLDEIIEQISEFSKRVILADANLDKVLSAYNKHRDKPIREQAENIIHLFTLTNLGAPAAFKYFDTTIDRKRYTSTKEVLDATLIHQSITGLYETRIDLSQLGGDGGGSSGGTAPLEEEYRLFLEAPIQNVTLLEQWKREIPKVWAEINPPGLASTQAPIHVQLLSTALPVRVRQYPITLEAKRSLRETIRKFRAAGILRPVHSPWNTPLLPVRKSGTSEYRMVQDLREVNKRVETIHPTVPNPYTLLSLLPPDRIWYSVLDLKDAFFCIPLAPESQLIFAFEWADAEEGESGQLTWTRLPQGFKNSPTLFNEALNRDLQGFRLDHPSVSLLQYVDDLLIAADTQAACLSATRDLLMTLAELGYRVSGKKAQLCQEEVTYLGFKIHKGSRSLSNSRTQAILQIPVPKTKRQVREFLGTIGYCRLWIPGFAELAQPLYAATRPGNDPLVWGEKEEEAFQSLKLALTQPPALALPSLDKPFQLFVEETSGAAKGVLTQALGPWKRPVAYLSKRLDPVAAGWPRCLRAIAAAALLTREASKLTFGQDIEITSSHNLESLLRSPPDKWLTNARITQYQVLLLDPPRVRFKQTAALNPATLLPETDDTLPIHHCLDTLDSLTSTRPDLTDQPLAQAEATLFTDGSSYIRDGKRYAGAAVVTLDSVIWAEPLPIGTSAQKAELIALTKALEWSKDKSVNIYTDSRYAFATLHVHGMIYRERGWLTAGGKAIKNAPEILALLTAVWLPKRVAVMHCKGHQKDDAPTSTGNRRADEVAREVAIRPLSTQATISAGKRTADGSEFEKRTADGSEFESPKKKAKVE

SEQ ID NO: 6290 - protein, 2210 aa, synthetic construct
MPAAKRVKLDGGDKKYSIGLDIGTNSVGWAVITDEYKVPSKKFKVLGNTDRHSIKKNLIGALLFDSGETAEATRLKRTARRRYTRRKNRICYLQEIFSNEMAKVDDSFFHRLEESFLVEEDKKHERHPIFGNIVDEVAYHEKYPTIYHLRKKLVDSTDKADLRLIYLALAHMIKFRGHFLIEGDLNPDNSDVDKLFIQLVQTYNQLFEENPINASGVDAKAILSARLSKSRRLENLIAQLPGEKKNGLFGNLIALSLGLTPNFKSNFDLAEDAKLQLSKDTYDDDLDNLLAQIGDQYADLFLAAKNLSDAILLSDILRVNTEITKAPLSASMIKRYDEHHQDLTLLKALVRQQLPEKYKEIFFDQSKNGYAGYIDGGASQEEFYKFIKPILEKMDGTEELLVKLNREDLLRKQRTFDNGSIPHQIHLGELHAILRRQEDFYPFLKDNREKIEKILTFRIPYYVGPLARGNSRFAWMTRKSEETITPWNFEEVVDKGASAQSFIERMTNFDKNLPNEKVLPKHSLLYEYFTVYNELTKVKYVTEGMRKPAFLSGEQKKAIVDLLFKTNRKVTVKQLKEDYFKKIECFDSVEISGVEDRFNASLGTYHDLLKIIKDKDFLDNEENEDILEDIVLTLTLFEDREMIEERLKTYAHLFDDKVMKQLKRRRYTGWGRLSRKLINGIRDKQSGKTILDFLKSDGFANRNFMQLIHDDSLTFKEDIQKAQVSGQGDSLHEHIANLAGSPAIKKGILQTVKVVDELVKVMGRHKPENIVIEMARENQTTQKGQKNSRERMKRIEEGIKELGSQILKEHPVENTQLQNEKLYLYYLQNGRDMYVDQELDINRLSDYDVDHIVPQSFLKDDSIDNKVLTRSDKARGKSDNVPSEEVVKKMKNYWRQLLNAKLITQRKFDNLTKAERGGLSELDKAGFIKRQLVETRQITKHVAQILDSRMNTKYDENDKLIREVKVITLKSKLVSDFRKDFQFYKVREINNYHHAHDAYLNAVVGTALIKKYPKLESEFVYGDYKVYDVRKMIAKSEQEIGKATAKYFFYSNIMNFFKTEITLANGEIRKRPLIETNGETGEIVWDKGRDFATVRKVLSMPQVNIVKKTEVQTGGFSKESILPKRNSDKLIARKKDWDPKKYGGFDSPTVAYSVLVVAKVEKGKSKKLKSVKELLGITIMERSSFEKNPIDFLEAKGYKEVKKDLIIKLPKYSLFELENGRKRMLASAGELQKGNELALPSKYVNFLYLASHYEKLKGSPEDNEQKQLFVEQHKHYLDEIIEQISEFSKRVILADANLDKVLSAYNKHRDKPIREQAENIIHLFTLTNLGAPAAFKYFDTTIDRKRYTSTKEVLDATLIHQSITGLYETRIDLSQLGGDGGGSSGGTLGDQGSRGSDPLPEPRVTLTVEGIPTEFLVNTGAEHSVLTKPMGKMGSKRTVVAGATGSKVYPWTTKRLLKIGQKQVTHSFLVIPECPAPLLGRDLLTKLKAQIQFSTEGPQVTWEDRPAMCLVLNLEEEYRLHEKPVPPSIDPSWLQLFPMVWAEKAGMGLANQVPPVVVELKSDASPVAVRQYPMSKEAREGIRPHIQRFLDLGILVPCQSPWNTPLLPVKKPGTNDYRPVQDLREVNKRVQDIHPTVPNPYNLLSSLPPSHTWYSVLDLKDAFFCLKLHPNSQPLFAFEWRDPEKGNTGQLTWTRLPQGFKNSPTLFNEALHRDLASFRALNPQVVMLQYVDDLLVAAPTYRDCKEGTRRLLQELSKLGYRVSAKKAQLCREEVTYLGYLLKGGKRWLTPARKATVMKIPTPTTPRQVREFLGTAGFCRLWIPGFASLAAPLYPLTRPKVPFTWTEAHQEAFGRIKEALLSAPALALPDLTKPFALYVDEKEGVARGVLTQTLGPWRRPVAYLSKKLDPVASGWPTCLKAIAAVALLLKDADKLTLGQNVLVIAPHNLESIVRQPPDRWMTNARMTHYQSLLLNERVSFAPPAILNPATLLPVESDDTPIHICSEILAEETGTRPDLRDQPLPGVPAWYTDGSSFIMDGRRQAGAAIVDNKRTVWASNLPEGTSAQKAELIALTQALRLAEGKSINIYTDSRYAFATAHVHGAIYKQRGWLTSAGKDIKNKEEILALLEAIHLPKRVAIIHCPGHQRGTDPVATGNRKADEAAKQAAQSTRILTETTKNAGKRTADGSEFEKRTADGSEFESPKKKAKVE

SEQ ID NO: 6291 - protein, 2088 aa, synthetic construct
MPAAKRVKLDGGDKKYSIGLDIGTNSVGWAVITDEYKVPSKKFKVLGNTDRHSIKKNLIGALLFDSGETAEATRLKRTARRRYTRRKNRICYLQEIFSNEMAKVDDSFFHRLEESFLVEEDKKHERHPIFGNIVDEVAYHEKYPTIYHLRKKLVDSTDKADLRLIYLALAHMIKFRGHFLIEGDLNPDNSDVDKLFIQLVQTYNQLFEENPINASGVDAKAILSARLSKSRRLENLIAQLPGEKKNGLFGNLIALSLGLTPNFKSNFDLAEDAKLQLSKDTYDDDLDNLLAQIGDQYADLFLAAKNLSDAILLSDILRVNTEITKAPLSASMIKRYDEHHQDLTLLKALVRQQLPEKYKEIFFDQSKNGYAGYIDGGASQEEFYKFIKPILEKMDGTEELLVKLNREDLLRKQRTFDNGSIPHQIHLGELHAILRRQEDFYPFLKDNREKIEKILTFRIPYYVGPLARGNSRFAWMTRKSEETITPWNFEEVVDKGASAQSFIERMTNFDKNLPNEKVLPKHSLLYEYFTVYNELTKVKYVTEGMRKPAFLSGEQKKAIVDLLFKTNRKVTVKQLKEDYFKKIECFDSVEISGVEDRFNASLGTYHDLLKIIKDKDFLDNEENEDILEDIVLTLTLFEDREMIEERLKTYAHLFDDKVMKQLKRRRYTGWGRLSRKLINGIRDKQSGKTILDFLKSDGFANRNFMQLIHDDSLTFKEDIQKAQVSGQGDSLHEHIANLAGSPAIKKGILQTVKVVDELVKVMGRHKPENIVIEMARENQTTQKGQKNSRERMKRIEEGIKELGSQILKEHPVENTQLQNEKLYLYYLQNGRDMYVDQELDINRLSDYDVDHIVPQSFLKDDSIDNKVLTRSDKARGKSDNVPSEEVVKKMKNYWRQLLNAKLITQRKFDNLTKAERGGLSELDKAGFIKRQLVETRQITKHVAQILDSRMNTKYDENDKLIREVKVITLKSKLVSDFRKDFQFYKVREINNYHHAHDAYLNAVVGTALIKKYPKLESEFVYGDYKVYDVRKMIAKSEQEIGKATAKYFFYSNIMNFFKTEITLANGEIRKRPLIETNGETGEIVWDKGRDFATVRKVLSMPQVNIVKKTEVQTGGFSKESILPKRNSDKLIARKKDWDPKKYGGFDSPTVAYSVLVVAKVEKGKSKKLKSVKELLGITIMERSSFEKNPIDFLEAKGYKEVKKDLIIKLPKYSLFELENGRKRMLASAGELQKGNELALPSKYVNFLYLASHYEKLKGSPEDNEQKQLFVEQHKHYLDEIIEQISEFSKRVILADANLDKVLSAYNKHRDKPIREQAENIIHLFTLTNLGAPAAFKYFDTTIDRKRYTSTKEVLDATLIHQSITGLYETRIDLSQLGGDGGGSSGGTLNLEDEYRLYETSAEPEVSPGSTWLSDFPQAWAETGGMGLAVRQAPLIIPLKATSTPVSIKQYPMSQEAKLGIKPHIQRLLDQGILVPCQSPWNTPLLPVKKPGTNDYRPVQDLREVNKRVEDIHPTVPNPYNLLSGLPPSHRWYTVLDLKDAFFCLRLHPTSQPLFAFEWRDPGMGISGQLTWTRLPQGFKNSPTLFNEALHRDLADFRIQHPDLILLQYVDDILLAATSELDCQQGTRALLLTLGNLGYRASAKKAQLCQKQVKYLGYLLKEGQRWLTEARKETVMGQPTPKTPRQLREFLGKAGFCRLFIPGFAEMAAPLYPLTKPGTLFNWGPDQQKAYQEIKQALLTAPALGLPDLTKPFELFVDEKQGYAKGVLTQKLGPWRRPVAYLSKKLDPVAAGWPPCLRMVAAIAVLRKDAGKLTMGQPLVILAPHAVEALVKQPPDRWLSNARMTHYQAMLLDTDRVQFGPVVALNPATLLPLPEEGAPHDCLEILAETHGTRPDLTDQPIPDADHTWYTDGSSFLQEGQRKAGAAVTTETEVIWARALPAGTSAQRAELIALTQALKMAEGKRLNVYTDSRYAFATAHIHGEIYRRRGWLTSEGREIKNKSEILALLKALFLPKRLSIIHCLGHQKGDSAEARGNRLADQAAREAAIKTPPDTSTLLAGKRTADGSEFEKRTADGSEFESPKKKAKVE

SEQ ID NO: 6292 - protein, 2088 aa, synthetic construct
MPAAKRVKLDGGDKKYSIGLDIGTNSVGWAVITDEYKVPSKKFKVLGNTDRHSIKKNLIGALLFDSGETAEATRLKRTARRRYTRRKNRICYLQEIFSNEMAKVDDSFFHRLEESFLVEEDKKHERHPIFGNIVDEVAYHEKYPTIYHLRKKLVDSTDKADLRLIYLALAHMIKFRGHFLIEGDLNPDNSDVDKLFIQLVQTYNQLFEENPINASGVDAKAILSARLSKSRRLENLIAQLPGEKKNGLFGNLIALSLGLTPNFKSNFDLAEDAKLQLSKDTYDDDLDNLLAQIGDQYADLFLAAKNLSDAILLSDILRVNTEITKAPLSASMIKRYDEHHQDLTLLKALVRQQLPEKYKEIFFDQSKNGYAGYIDGGASQEEFYKFIKPILEKMDGTEELLVKLNREDLLRKQRTFDNGSIPHQIHLGELHAILRRQEDFYPFLKDNREKIEKILTFRIPYYVGPLARGNSRFAWMTRKSEETITPWNFEEVVDKGASAQSFIERMTNFDKNLPNEKVLPKHSLLYEYFTVYNELTKVKYVTEGMRKPAFLSGEQKKAIVDLLFKTNRKVTVKQLKEDYFKKIECFDSVEISGVEDRFNASLGTYHDLLKIIKDKDFLDNEENEDILEDIVLTLTLFEDREMIEERLKTYAHLFDDKVMKQLKRRRYTGWGRLSRKLINGIRDKQSGKTILDFLKSDGFANRNFMQLIHDDSLTFKEDIQKAQVSGQGDSLHEHIANLAGSPAIKKGILQTVKVVDELVKVMGRHKPENIVIEMARENQTTQKGQKNSRERMKRIEEGIKELGSQILKEHPVENTQLQNEKLYLYYLQNGRDMYVDQELDINRLSDYDVDHIVPQSFLKDDSIDNKVLTRSDKARGKSDNVPSEEVVKKMKNYWRQLLNAKLITQRKFDNLTKAERGGLSELDKAGFIKRQLVETRQITKHVAQILDSRMNTKYDENDKLIREVKVITLKSKLVSDFRKDFQFYKVREINNYHHAHDAYLNAVVGTALIKKYPKLESEFVYGDYKVYDVRKMIAKSEQEIGKATAKYFFYSNIMNFFKTEITLANGEIRKRPLIETNGETGEIVWDKGRDFATVRKVLSMPQVNIVKKTEVQTGGFSKESILPKRNSDKLIARKKDWDPKKYGGFDSPTVAYSVLVVAKVEKGKSKKLKSVKELLGITIMERSSFEKNPIDFLEAKGYKEVKKDLIIKLPKYSLFELENGRKRMLASAGELQKGNELALPSKYVNFLYLASHYEKLKGSPEDNEQKQLFVEQHKHYLDEIIEQISEFSKRVILADANLDKVLSAYNKHRDKPIREQAENIIHLFTLTNLGAPAAFKYFDTTIDRKRYTSTKEVLDATLIHQSITGLYETRIDLSQLGGDGGGSSGGTLGIEDEYRLHETSTEPDVSLGSTWLSDFPQAWAETGGMGLAVRQAPLIIPLKATSTPVSIQQYPMSHEARLGIKPHIQRLLDQGILVPCQSPWNTPLLPVKKPGTNDYRPVQDLREVNKRVEDIHPTVPNPYNLLSGLPPSHQWYTVLDLKDAFFCLRLHPTSQPLFAFEWRDPGMGISGQLTWTRLPQGFKNSPTLFNEALHRDLADFRIQHPDLILLQYVDDILLAATSELDCQQGTRALLQTLGDLGYRASAKKAQICQKQVKYLGYLLREGQRWLTEARKETVMGQPVPKTPRQLREFLGTAGFCRLWIPGFAEMAAPLYPLTKPGTLFSWGPDQQKAYQEIKQALLTAPALGLPDLTKPFELFVDEKQGYAKGVLTQKLGPWRRPVAYLSKKLDPVAAGWPPCLRMVAAIAVLTKDAGKLTMGQPLVILAPHAVEALVKQPPDRWLSNARMTHYQAMLLDTDRVQFGPVVALNPATLLPLPEEGAPHDCLEILAETHGTRPDLTDQPIPDADHTWYTDGSSFLQEGQRKAGAAVTTETEVIWAGALPAGTSAQRAELIALTQALKMAEGKRLNVYTDSRYAFATAHIHGEIYRRRGWLTSEGREIKNKSEILALLKALFLPKRLSIIHCLGHQKGDSAEARGNRLADQAAREAAIKTPPDTSTLLAGKRTADGSEFEKRTADGSEFESPKKKAKVE

SEQ ID NO: 6293 - protein, 2080 aa, synthetic construct
MPAAKRVKLDGGDKKYSIGLDIGTNSVGWAVITDEYKVPSKKFKVLGNTDRHSIKKNLIGALLFDSGETAEATRLKRTARRRYTRRKNRICYLQEIFSNEMAKVDDSFFHRLEESFLVEEDKKHERHPIFGNIVDEVAYHEKYPTIYHLRKKLVDSTDKADLRLIYLALAHMIKFRGHFLIEGDLNPDNSDVDKLFIQLVQTYNQLFEENPINASGVDAKAILSARLSKSRRLENLIAQLPGEKKNGLFGNLIALSLGLTPNFKSNFDLAEDAKLQLSKDTYDDDLDNLLAQIGDQYADLFLAAKNLSDAILLSDILRVNTEITKAPLSASMIKRYDEHHQDLTLLKALVRQQLPEKYKEIFFDQSKNGYAGYIDGGASQEEFYKFIKPILEKMDGTEELLVKLNREDLLRKQRTFDNGSIPHQIHLGELHAILRRQEDFYPFLKDNREKIEKILTFRIPYYVGPLARGNSRFAWMTRKSEETITPWNFEEVVDKGASAQSFIERMTNFDKNLPNEKVLPKHSLLYEYFTVYNELTKVKYVTEGMRKPAFLSGEQKKAIVDLLFKTNRKVTVKQLKEDYFKKIECFDSVEISGVEDRFNASLGTYHDLLKIIKDKDFLDNEENEDILEDIVLTLTLFEDREMIEERLKTYAHLFDDKVMKQLKRRRYTGWGRLSRKLINGIRDKQSGKTILDFLKSDGFANRNFMQLIHDDSLTFKEDIQKAQVSGQGDSLHEHIANLAGSPAIKKGILQTVKVVDELVKVMGRHKPENIVIEMARENQTTQKGQKNSRERMKRIEEGIKELGSQILKEHPVENTQLQNEKLYLYYLQNGRDMYVDQELDINRLSDYDVDHIVPQSFLKDDSIDNKVLTRSDKARGKSDNVPSEEVVKKMKNYWRQLLNAKLITQRKFDNLTKAERGGLSELDKAGFIKRQLVETRQITKHVAQILDSRMNTKYDENDKLIREVKVITLKSKLVSDFRKDFQFYKVREINNYHHAHDAYLNAVVGTALIKKYPKLESEFVYGDYKVYDVRKMIAKSEQEIGKATAKYFFYSNIMNFFKTEITLANGEIRKRPLIETNGETGEIVWDKGRDFATVRKVLSMPQVNIVKKTEVQTGGFSKESILPKRNSDKLIARKKDWDPKKYGGFDSPTVAYSVLVVAKVEKGKSKKLKSVKELLGITIMERSSFEKNPIDFLEAKGYKEVKKDLIIKLPKYSLFELENGRKRMLASAGELQKGNELALPSKYVNFLYLASHYEKLKGSPEDNEQKQLFVEQHKHYLDEIIEQISEFSKRVILADANLDKVLSAYNKHRDKPIREQAENIIHLFTLTNLGAPAAFKYFDTTIDRKRYTSTKEVLDATLIHQSITGLYETRIDLSQLGGDGGGSSGGLDDEYRLYSPLVKPDQNIQFWLEQFPQAWAETAGMGLAKQVPPQVIQLKASATPVSVRQYPLSKEAQEGIRPHVQRLIQQGILVPVQSPWNTPLLPVRKPGTNDYRPVQDLREVNKRVQDIHPTVPNPYNLLCALPPQRSWYTVLDLKDAFFCLRLHPTSQPLFAFEWRDPGTGRTGQLTWTRLPQGFKNSPTIFNEALHRDLANFRIQHPQVTLLQYVDDLLLAGATKQDCLEGTKALLLELSDLGYRASAKKAQICRREVTYLGYSLRDGQRWLTEARKKTVVQIPAPTTAKQVREFLGKAGFCRLFIPGFATLAAPLYPLTKPKGEFSWAPEHQKAFDAIKKALLSAPALALPDVTKPFTLYVDERKGVARGVLTQTLGPWRRPVAYLSKKLDPVASGWPVCLKAIAAVAILVKDADKLTLGQNITVIAPHALENIVRQPPDRWMTNARMTHYQSLLLTERVTFAPPAALNPATLLPEETDEPVTHDCHQLLIEETGVRKDLTDIPLTGEVLTWFTDGSSYVVEGKRMAGAAVVDGTRTIWASSLPEGTSAQKAELMALTQALRLAEGKSINIYTDSRYAFATAHVHGAIYKQRGWLTSAGREIKNKEEILSLLEALHLPKRLAIIHCPGHQKAKDPISRGNQMADRVAKQAAQGVNLLPAGKRTADGSEFEKRTADGSEFESPKKKAKVE

SEQ ID NO: 6294 - protein, 2080 aa, synthetic construct; identical to SEQ ID NO: 6293

SEQ ID NO: 6295 - protein, 2168 aa, synthetic construct
MPAAKRVKLDGGDKKYSIGLDIGTNSVGWAVITDEYKVPSKKFKVLGNTDRHSIKKNLIGALLFDSGETAEATRLKRTARRRYTRRKNRICYLQEIFSNEMAKVDDSFFHRLEESFLVEEDKKHERHPIFGNIVDEVAYHEKYPTIYHLRKKLVDSTDKADLRLIYLALAHMIKFRGHFLIEGDLNPDNSDVDKLFIQLVQTYNQLFEENPINASGVDAKAILSARLSKSRRLENLIAQLPGEKKNGLFGNLIALSLGLTPNFKSNFDLAEDAKLQLSKDTYDDDLDNLLAQIGDQYADLFLAAKNLSDAILLSDILRVNTEITKAPLSASMIKRYDEHHQDLTLLKALVRQQLPEKYKEIFFDQSKNGYAGYIDGGASQEEFYKFIKPILEKMDGTEELLVKLNREDLLRKQRTFDNGSIPHQIHLGELHAILRRQEDFYPFLKDNREKIEKILTFRIPYYVGPLARGNSRFAWMTRKSEETITPWNFEEVVDKGASAQSFIERMTNFDKNLPNEKVLPKHSLLYEYFTVYNELTKVKYVTEGMRKPAFLSGEQKKAIVDLLFKTNRKVTVKQLKEDYFKKIECFDSVEISGVEDRFNASLGTYHDLLKIIKDKDFLDNEENEDILEDIVLTLTLFEDREMIEERLKTYAHLFDDKVMKQLKRRRYTGWGRLSRKLINGIRDKQSGKTILDFLKSDGFANRNFMQLIHDDSLTFKEDIQKAQVSGQGDSLHEHIANLAGSPAIKKGILQTVKVVDELVKVMGRHKPENIVIEMARENQTTQKGQKNSRERMKRIEEGIKELGSQILKEHPVENTQLQNEKLYLYYLQNGRDMYVDQELDINRLSDYDVDHIVPQSFLKDDSIDNKVLTRSDKARGKSDNVPSEEVVKKMKNYWRQLLNAKLITQRKFDNLTKAERGGLSELDKAGFIKRQLVETRQITKHVAQILDSRMNTKYDENDKLIREVKVITLKSKLVSDFRKDFQFYKVREINNYHHAHDAYLNAVVGTALIKKYPKLESEFVYGDYKVYDVRKMIAKSEQEIGKATAKYFFYSNIMNFFKTEITLANGEIRKRPLIETNGETGEIVWDKGRDFATVRKVLSMPQVNIVKKTEVQTGGFSKESILPKRNSDKLIARKKDWDPKKYGGFDSPTVAYSVLVVAKVEKGKSKKLKSVKELLGITIMERSSFEKNPIDFLEAKGYKEVKKDLIIKLPKYSLFELENGRKRMLASAGELQKGNELALPSKYVNFLYLASHYEKLKGSPEDNEQKQLFVEQHKHYLDEIIEQISEFSKRVILADANLDKVLSAYNKHRDKPIREQAENIIHLFTLTNLGAPAAFKYFDTTIDRKRYTSTKEVLDATLIHQSITGLYETRIDLSQLGGDGGGSSGGMDPLQLLQPLEAEIKGTKLKAHWNSGATITCVPQAFLEEEVPIKNIWIKTIHGEKEQPVYYLTFKIQGRKVEAEVISSPYDYILVSPSDIPWLMKKPLQLTTLVPLQEYEERLLKQTMLTGSYKEKLQSLFLKYDALWQHWENQVGHRRIKPHHIATGTVNPRPQKQYPINPKAKASIQTVINDLLKQGVLIQQNSIMNTPVYPVPKPDGKWRMVLDYREVNKTIPLIAAQNQHSAGILSSIFRGKYKTTLDLSNGFWAHSITPESYWLTAFTWLGQQYCWTRLPQGFLNSPALFNADVVDLLKEVPNVQVYVDDIYISHDDPREHLEQLEKVFSLLLNAGYVVSLKKSEIAQHEVEFLGFNITKEGRGLTETFKQKLLNITPPRDLKQLQSILGLLNFARNFIPNFSELVKPLYNIIATAPGKYITWTTDNSQQLQNIISMLNSAENLEERNPEVRLIMKVNTSPSAGYIRFYNEFAKRPIMYLNYVYTKAEVKFTNTEKLLTTIHKGLIKALDLGMGQEILVYSPIVSMTKIQKTPLPERKALPIRWITWMSYLEDPRIQFHYDKTLPELQQVPTVTDDIIAKIKHPSEFSMVFYTDGSAIKHPNVNKSHNAGMGIAQVQFKPEFTVINTWSIPLGDHTAQLAEVAAVEFACKKALKIDGPVLIVTDSFYVAESVNKELPYWQSNGFFNNKKKPLKHVSKWKSIADCIQLKPDIIIIHEKGHQPTASTFHTEGNNLADKLATQGSYVVNAGKRTADGSEFEKRTADGSEFESPKKKAKVE

SEQ ID NO: 6296 - protein, 2079 aa, synthetic construct
MPAAKRVKLDGGDKKYSIGLDIGTNSVGWAVITDEYKVPSKKFKVLGNTDRHSIKKNLIGALLFDSGETAEATRLKRTARRRYTRRKNRICYLQEIFSNEMAKVDDSFFHRLEESFLVEEDKKHERHPIFGNIVDEVAYHEKYPTIYHLRKKLVDSTDKADLRLIYLALAHMIKFRGHFLIEGDLNPDNSDVDKLFIQLVQTYNQLFEENPINASGVDAKAILSARLSKSRRLENLIAQLPGEKKNGLFGNLIALSLGLTPNFKSNFDLAEDAKLQLSKDTYDDDLDNLLAQIGDQYADLFLAAKNLSDAILLSDILRVNTEITKAPLSASMIKRYDEHHQDLTLLKALVRQQLPEKYKEIFFDQSKNGYAGYIDGGASQEEFYKFIKPILEKMDGTEELLVKLNREDLLRKQRTFDNGSIPHQIHLGELHAILRRQEDFYPFLKDNREKIEKILTFRIPYYVGPLARGNSRFAWMTRKSEETITPWNFEEVVDKGASAQSFIERMTNFDKNLPNEKVLPKHSLLYEYFTVYNELTKVKYVTEGMRKPAFLSGEQKKAIVDLLFKTNRKVTVKQLKEDYFKKIECFDSVEISGVEDRFNASLGTYHDLLKIIKDKDFLDNEENEDILEDIVLTLTLFEDREMIEERLKTYAHLFDDKVMKQLKRRRYTGWGRLSRKLINGIRDKQSGKTILDFLKSDGFANRNFMQLIHDDSLTFKEDIQKAQVSGQGDSLHEHIANLAGSPAIKKGILQTVKVVDELVKVMGRHKPENIVIEMARENQTTQKGQKNSRERMKRIEEGIKELGSQILKEHPVENTQLQNEKLYLYYLQNGRDMYVDQELDINRLSDYDVDHIVPQSFLKDDSIDNKVLTRSDKARGKSDNVPSEEVVKKMKNYWRQLLNAKLITQRKFDNLTKAERGGLSELDKAGFIKRQLVETRQITKHVAQILDSRMNTKYDENDKLIREVKVITLKSKLVSDFRKDFQFYKVREINNYHHAHDAYLNAVVGTALIKKYPKLESEFVYGDYKVYDVRKMIAKSEQEIGKATAKYFFYSNIMNFFKTEITLANGEIRKRPLIETNGETGEIVWDKGRDFATVRKVLSMPQVNIVKKTEVQTGGFSKESILPKRNSDKLIARKKDWDPKKYGGFDSPTVAYSVLVVAKVEKGKSKKLKSVKELLGITIMERSSFEKNPIDFLEAKGYKEVKKDLIIKLPKYSLFELENGRKRMLASAGELQKGNELALPSKYVNFLYLASHYEKLKGSPEDNEQKQLFVEQHKHYLDEIIEQISEFSKRVILADANLDKVLSAYNKHRDKPIREQAENIIHLFTLTNLGAPAAFKYFDTTIDRKRYTSTKEVLDATLIHQSITGLYETRIDLSQLGGDGGGSSGGVPWLTQQPLQLTILVPLQEYQDRILNKTALPEEQKQQLKALFTKYDNLWQHWENQVGHRKIRPHNIATGDYPPRPQKQYPINPKAKPSIQIVIDDLLKQGVLTPQNSTMNTPVYPVPKPDGRWRMVLDYREVNKTIPLTAAQNQHSAGILATIVRQKYKTTLDLANGFWAHPITPDSYWLTAFTWQGKQYCWTRLPQGFLNSPALFTADAVDLLKEVPNVQVYVDDIYLSHDNPHEHIQQLEKVFQILLQAGYVVSLKKSEIGQRTVEFLGFNITKEGRGLTDTFKTKLLNVTPPKDLKQLQSILGLLNFARNFIPNFAELVQTLYNLIASSKGKYIEWTEDNTKQLNKVIEALNTASNLEERLPDQRLVIKVNTSPSAGYVRYYNESGKKPIMYLNYVFSKAELKFSMLEKLLTTMHKALIKAMDLAMGQEILVYSPIVSMTKIQKTPLPERKALPIRWITWMTYLEDPRIQFHYDKTLPELKHIPDVYTSSIPPLKHPSQYEGVFCTDGSAIKSPDPTKSNNAGMGIVHAIYNPEYKILNQWSIPLGHHTAQMAEIAAVEFACKKALKVPGPVLVITDSFYVAESANKELPYWKSNGFVNNKKEPLKHISKWKSIAECLSIKPDITIQHEKGHQPINTSIHTEGNALADKLATQGSYVVNAGKRTADGSEFEKRTADGSEFESPKKKAKVE

SEQ ID NO: 6297 - protein, 2088 aa, synthetic construct
MPAAKRVKLDGGDKKYSIGLDIGTNSVGWAVITDEYKVPSKKFKVLGNTDRHSIKKNLIGALLFDSGETAEATRLKRTARRRYTRRKNRICYLQEIFSNEMAKVDDSFFHRLEESFLVEEDKKHERHPIFGNIVDEVAYHEKYPTIYHLRKKLVDSTDKADLRLIYLALAHMIKFRGHFLIEGDLNPDNSDVDKLFIQLVQTYNQLFEENPINASGVDAKAILSARLSKSRRLENLIAQLPGEKKNGLFGNLIALSLGLTPNFKSNFDLAEDAKLQLSKDTYDDDLDNLLAQIGDQYADLFLAAKNLSDAILLSDILRVNTEITKAPLSASMIKRYDEHHQDLTLLKALVRQQLPEKYKEIFFDQSKNGYAGYIDGGASQEEFYKFIKPILEKMDGTEELLVKLNREDLLRKQRTFDNGSIPHQIHLGELHAILRRQEDFYPFLKDNREKIEKILTFRIPYYVGPLARGNSRFAWMTRKSEETITPWNFEEVVDKGASAQSFIERMTNFDKNLPNEKVLPKHSLLYEYFTVYNELTKVKYVTEGMRKPAFLSGEQKKAIVDLLFKTNRKVTVKQLKEDYFKKIECFDSVEISGVEDRFNASLGTYHDLLKIIKDKDFLDNEENEDILEDIVLTLTLFEDREMIEERLKTYAHLFDDKVMKQLKRRRYTGWGRLSRKLINGIRDKQSGKTILDFLKSDGFANRNFMQLIHDDSLTFKEDIQKAQVSGQGDSLHEHIANLAGSPAIKKGILQTVKVVDELVKVMGRHKPENIVIEMARENQTTQKGQKNSRERMKRIEEGIKELGSQILKEHPVENTQLQNEKLYLYYLQNGRDMYVDQELDINRLSDYDVDHIVPQSFLKDDSIDNKVLTRSDKARGKSDNVPSEEVVKKMKNYWRQLLNAKLITQRKFDNLTKAERGGLSELDKAGFIKRQLVETRQITKHVAQILDSRMNTKYDENDKLIREVKVITLKSKLVSDFRKDFQFYKVREINNYHHAHDAYLNAVVGTALIKKYPKLESEFVYGDYKVYDVRKMIAKSEQEIGKATAKYFFYSNIMNFFKTEITLANGEIRKRPLIETNGETGEIVWDKGRDFATVRKVLSMPQVNIVKKTEVQTGGFSKESILPKRNSDKLIARKKDWDPKKYGGFDSPTVAYSVLVVAKVEKGKSKKLKSVKELLGITIMERSSFEKNPIDFLEAKGYKEVKKDLIIKLPKYSLFELENGRKRMLASAGELQKGNELALPSKYVNFLYLASHYEKLKGSPEDNEQKQLFVEQHKHYLDEIIEQISEFSKRVILADANLDKVLSAYNKHRDKPIREQAENIIHLFTLTNLGAPAAFKYFDTTIDRKRYTSTKEVLDATLIHQSITGLYETRIDLSQLGGDGGGSSGGTLNIEDEYRLHETSKEPDVPLGSTWLSDFPQAWAETGGMGLAVRQAPLIIPLKATSTPVSIKQYPMSQEARLGIKPHIQRLLDQGILVPCQSPWNTPLLPVKKPGTNDYRPVQDLREVNKRVEDIHPTVPNPYNLLSGLPPSHQWYTVLDLKDAFFCLRLHPTSQPLFAFEWRDPEMGISGQLTWTRLPQGFKNSPTLFNEALHRDLADFRIQHPDLILLQYVDDLLLAATSEQDCQRGTRALLQTLGNLGYRASAKKAQICQKQVKYLGYLLKEGQRWLTEARKETVMGQPTPKTPRQLREFLGTAGFCRLWIPGFAEMAAPLYPLTKPGTLFNWGPDQQKAYQEIKQALLTAPALGLPDLTKPFELFVDEKQGYAKGVLTQKLGPWRRPVAYLSKKLDPVAAGWPPCLRMVAAIAVLTKDAGKLTMGQPLVILAPHAVEALVKQPPDRWLSNARMTHYQAMLLDTDRVQFGPVVALNPATLLPLPEKEAPHDCLEILAETHGTRPDLTDQPIPDADYTWYTDGSSFLQEGQRRAGAAVTTETEVIWARALPAGTSAQRAELIALTQALKMAEGKKLNVYTDSRYAFATAHVHGEIYRRRGWLTSEGREIKNKNEILALLKALFLPKRLSIIHCPGHQKGNSAEARGNRMADQAAREAAMKAVLETSTLLAGKRTADGSEFEKRTADGSEFESPKKKAKVE

SEQ ID NO: 6298 - protein, 2089 aa, synthetic construct
MPAAKRVKLDGGDKKYSIGLDIGTNSVGWAVITDEYKVPSKKFKVLGNTDRHSIKKNLIGALLFDSGETAEATRLKRTARRRYTRRKNRICYLQEIFSNEMAKVDDSFFHRLEESFLVEEDKKHERHPIFGNIVDEVAYHEKYPTIYHLRKKLVDSTDKADLRLIYLALAHMIKFRGHFLIEGDLNPDNSDVDKLFIQLVQTYNQLFEENPINASGVDAKAILSARLSKSRRLENLIAQLPGEKKNGLFGNLIALSLGLTPNFKSNFDLAEDAKLQLSKDTYDDDLDNLLAQIGDQYADLFLAAKNLSDAILLSDILRVNTEITKAPLSASMIKRYDEHHQDLTLLKALVRQQLPEKYKEIFFDQSKNGYAGYIDGGASQEEFYKFIKPILEKMDGTEELLVKLNREDLLRKQRTFDNGSIPHQIHLGELHAILRRQEDFYPFLKDNREKIEKILTFRIPYYVGPLARGNSRFAWMTRKSEETITPWNFEEVVDKGASAQSFIERMTNFDKNLPNEKVLPKHSLLYEYFTVYNELTKVKYVTEGMRKPAFLSGEQKKAIVDLLFKTNRKVTVKQLKEDYFKKIECFDSVEISGVEDRFNASLGTYHDLLKIIKDKDFLDNEENEDILEDIVLTLTLFEDREMIEERLKTYAHLFDDKVMKQLKRRRYTGWGRLSRKLINGIRDKQSGKTILDFLKSDGFANRNFMQLIHDDSLTFKEDIQKAQVSGQGDSLHEHIANLAGSPAIKKGILQTVKVVDELVKVMGRHKPENIVIEMARENQTTQKGQKNSRERMKRIEEGIKELGSQILKEHPVENTQLQNEKLYLYYLQNGRDMYVDQELDINRLSDYDVDHIVPQSFLKDDSIDNKVLTRSDKARGKSDNVPSEEVVKKMKNYWRQLLNAKLITQRKFDNLTKAERGGLSELDKAGFIKRQLVETRQITKHVAQILDSRMNTKYDENDKLIREVKVITLKSKLVSDFRKDFQFYKVREINNYHHAHDAYLNAVVGTALIKKYPKLESEFVYGDYKVYDVRKMIAKSEQEIGKATAKYFFYSNIMNFFKTEITLANGEIRKRPLIETNGETGEIVWDKGRDFATVRKVLSMPQVNIVKKTEVQTGGFSKESILPKRNSDKLIARKKDWDPKKYGGFDSPTVAYSVLVVAKVEKGKSKKLKSVKELLGITIMERSSFEKNPIDFLEAKGYKEVKKDLIIKLPKYSLFELENGRKRMLASAGELQKGNELALPSKYVNFLYLASHYEKLKGSPEDNEQKQLFVEQHKHYLDEIIEQISEFSKRVILADANLDKVLSAYNKHRDKPIREQAENIIHLFTLTNLGAPAAFKYFDTTIDRKRYTSTKEVLDATLIHQSITGLYETRIDLSQLGGDGGGSSGSSGGVLNLEEEYRLHEKPVPSSIDPSWLQLFPTVWAERAGMGLANQVPPVVVELRSGASPVAVRQYPMSKEAREGIRPHIQKFLDLGVLVPCRSPWNTPLLPVKKPGTNDYRPVQDLREINKRVQDIHPTVPNPYNLLSSLPPSYTWYSVLDLKDAFFCLRLHPNSQPLFAFEWKDPEKGNTGQLTWTRLPQGFKNSPTLFDEALHRDLAPFRALNPQVVLLQYVDDLLVAAPTYEDCKKGTQKLLQELSKLGYRVSAKKAQLCQREVTYLGYLLKEGKRWLTPARKATVMKIPVPTTPRQVREFLGTAGFCRLWIPGFASLAAPLYPLTKESIPFIWTEEHQQAFDHIKKALLSAPALALPDLTKPFTLYIDERAGVARGVLTQTLGPWRRPVAYLSKKLDPVASGWPTCLKAVAAVALLLKDADKLTLGQNVTVIASHSLESIVRQPPDRWMTNARMTHYQSLLLNERVSFAPPAVLNPATLLPVESEATPVHRCSEILAEETGTRRDLEDQPLPGVPTWYTDGSSFITEGKRRAGAPIVDGKRTVWASSLPEGTSAQKAELVALTQALRLAEGKNINIYTDSRYAFATAHIHGAIYKQRGLLTSAGKDIKNKEEILALLEAIHLPRRVAIIHCPGHQRGSNPVATGNRRADEAAKQAALSTRVLAGTTKPAGKRTADGSEFEKRTADGSEFESPKKKAKVE

SEQ ID NO: 6299 - protein, 2213 aa, synthetic construct
MPAAKRVKLDGGDKKYSIGLDIGTNSVGWAVITDEYKVPSKKFKVLGNTDRHSIKKNLIGALLFDSGETAEATRLKRTARRRYTRRKNRICYLQEIFSNEMAKVDDSFFHRLEESFLVEEDKKHERHPIFGNIVDEVAYHEKYPTIYHLRKKLVDSTDKADLRLIYLALAHMIKFRGHFLIEGDLNPDNSDVDKLFIQLVQTYNQLFEENPINASGVDAKAILSARLSKSRRLENLIAQLPGEKKNGLFGNLIALSLGLTPNFKSNFDLAEDAKLQLSKDTYDDDLDNLLAQIGDQYADLFLAAKNLSDAILLSDILRVNTEITKAPLSASMIKRYDEHHQDLTLLKALVRQQLPEKYKEIFFDQSKNGYAGYIDGGASQEEFYKFIKPILEKMDGTEELLVKLNREDLLRKQRTFDNGSIPHQIHLGELHAILRRQEDFYPFLKDNREKIEKILTFRIPYYVGPLARGNSRFAWMTRKSEETITPWNFEEVVDKGASAQSFIERMTNFDKNLPNEKVLPKHSLLYEYFTVYNELTKVKYVTEGMRKPAFLSGEQKKAIVDLLFKTNRKVTVKQLKEDYFKKIECFDSVEISGVEDRFNASLGTYHDLLKIIKDKDFLDNEENEDILEDIVLTLTLFEDREMIEERLKTYAHLFDDKVMKQLKRRRYTGWGRLSRKLINGIRDKQSGKTILDFLKSDGFANRNFMQLIHDDSLTFKEDIQKAQVSGQGDSLHEHIANLAGSPAIKKGILQTVKVVDELVKVMGRHKPENIVIEMARENQTTQKGQKNSRERMKRIEEGIKELGSQILKEHPVENTQLQNEKLYLYYLQNGRDMYVDQELDINRLSDYDVDHIVPQSFLKDDSIDNKVLTRSDKARGKSDNVPSEEVVKKMKNYWRQLLNAKLITQRKFDNLTKAERGGLSELDKAGFIKRQLVETRQITKHVAQILDSRMNTKYDENDKLIREVKVITLKSKLVSDFRKDFQFYKVREINNYHHAHDAYLNAVVGTALIKKYPKLESEFVYGDYKVYDVRKMIAKSEQEIGKATAKYFFYSNIMNFFKTEITLANGEIRKRPLIETNGETGEIVWDKGRDFATVRKVLSMPQVNIVKKTEVQTGGFSKESILPKRNSDKLIARKKDWDPKKYGGFDSPTVAYSVLVVAKVEKGKSKKLKSVKELLGITIMERSSFEKNPIDFLEAKGYKEVKKDLIIKLPKYSLFELENGRKRMLASAGELQKGNELALPSKYVNFLYLASHYEKLKGSPEDNEQKQLFVEQHKHYLDEIIEQISEFSKRVILADANLDKVLSAYNKHRDKPIREQAENIIHLFTLTNLGAPAAFKYFDTTIDRKRYTSTKEVLDATLIHQSITGLYETRIDLSQLGGDGGGSSGSSGGTLGDQGSRGSDPLPEPRVTLTVEGIPTEFLVNTGAEHSVLTKPMGKMGSKRTVVAGATGSKVYPWTTKRLLKIGQKQVTHSFLVIPECPAPLLGRDLLTKLKAQIQFSTEGPQVTWEDRPAMCLVLNLEEEYRLHEKPVPPSIDPSWLQLFPMVWAEKAGMGLANQVPPVVVELKSDASPVAVRQYPMSKEAREGIRPHIQRFLDLGILVPCQSPWNTPLLPVKKPGTNDYRPVQDLREVNKRVQDIHPTVPNPYNLLSSLPPSHTWYSVLDLKDAFFCLKLHPNSQPLFAFEWRDPEKGNTGQLTWTRLPQGFKNSPTLFNEALHRDLASFRALNPQVVMLQYVDDLLVAAPTYRDCKEGTRRLLQELSKLGYRVSAKKAQLCREEVTYLGYLLKGGKRWLTPARKATVMKIPTPTTPRQVREFLGTAGFCRLWIPGFASLAAPLYPLTRPKVPFTWTEAHQEAFGRIKEALLSAPALALPDLTKPFALYVDEKEGVARGVLTQTLGPWRRPVAYLSKKLDPVASGWPTCLKAIAAVALLLKDADKLTLGQNVLVIAPHNLESIVRQPPDRWMTNARMTHYQSLLLNERVSFAPPAILNPATLLPVESDDTPIHICSEILAEETGTRPDLRDQPLPGVPAWYTDGSSFIMDGRRQAGAAIVDNKRTVWASNLPEGTSAQKAELIALTQALRLAEGKSINIYTDSRYAFATAHVHGAIYKQRGWLTSAGKDIKNKEEILALLEAIHLPKRVAIIHCPGHQRGTDPVATGNRKADEAAKQAAQSTRILTETTKNAGKRTADGSEFEKRTADGSEFESPKKKAKVE

SEQ ID NO: 6300 - protein, 2091 aa, synthetic construct
MPAAKRVKLDGGDKKYSIGLDIGTNSVGWAVITDEYKVPSKKFKVLGNTDRHSIKKNLIGALLFDSGETAEATRLKRTARRRYTRRKNRICYLQEIFSNEMAKVDDSFFHRLEESFLVEEDKKHERHPIFGNIVDEVAYHEKYPTIYHLRKKLVDSTDKADLRLIYLALAHMIKFRGHFLIEGDLNPDNSDVDKLFIQLVQTYNQLFEENPINASGVDAKAILSARLSKSRRLENLIAQLPGEKKNGLFGNLIALSLGLTPNFKSNFDLAEDAKLQLSKDTYDDDLDNLLAQIGDQYADLFLAAKNLSDAILLSDILRVNTEITKAPLSASMIKRYDEHHQDLTLLKALVRQQLPEKYKEIFFDQSKNGYAGYIDGGASQEEFYKFIKPILEKMDGTEELLVKLNREDLLRKQRTFDNGSIPHQIHLGELHAILRRQEDFYPFLKDNREKIEKILTFRIPYYVGPLARGNSRFAWMTRKSEETITPWNFEEVVDKGASAQSFIERMTNFDKNLPNEKVLPKHSLLYEYFTVYNELTKVKYVTEGMRKPAFLSGEQKKAIVDLLFKTNRKVTVKQLKEDYFKKIECFDSVEISGVEDRFNASLGTYHDLLKIIKDKDFLDNEENEDILEDIVLTLTLFEDREMIEERLKTYAHLFDDKVMKQLKRRRYTGWGRLSRKLINGIRDKQSGKTILDFLKSDGFANRNFMQLIHDDSLTFKEDIQKAQVSGQGDSLHEHIANLAGSPAIKKGILQTVKVVDELVKVMGRHKPENIVIEMARENQTTQKGQKNSRERMKRIEEGIKELGSQILKEHPVENTQLQNEKLYLYYLQNGRDMYVDQELDINRLSDYDVDHIVPQSFLKDDSIDNKVLTRSDKARGKSDNVPSEEVVKKMKNYWRQLLNAKLITQRKFDNLTKAERGGLSELDKAGFIKRQLVETRQITKHVAQILDSRMNTKYDENDKLIREVKVITLKSKLVSDFRKDFQFYKVREINNYHHAHDAYLNAVVGTALIKKYPKLESEFVYGDYKVYDVRKMIAKSEQEIGKATAKYFFYSNIMNFFKTEITLANGEIRKRPLIETNGETGEIVWDKGRDFATVRKVLSMPQVNIVKKTEVQTGGFSKESILPKRNSDKLIARKKDWDPKKYGGFDSPTVAYSVLVVAKVEKGKSKKLKSVKELLGITIMERSSFEKNPIDFLEAKGYKEVKKDLIIKLPKYSLFELENGRKRMLASAGELQKGNELALPSKYVNFLYLASHYEKLKGSPEDNEQKQLFVEQHKHYLDEIIEQISEFSKRVILADANLDKVLSAYNKHRDKPIREQAENIIHLFTLTNLGAPAAFKYFDTTIDRKRYTSTKEVLDATLIHQSITGLYETRIDLSQLGGDGGGSSGSSGGTLGIEDEYRLHETSTEPDVSLGSTWLSDFPQAWAETGGMGLAVRQAPLIIPLKATSTPVSIQQYPMSHEARLGIKPHIQRLLDQGILVPCQSPWNTPLLPVKKPGTNDYRPVQDLREVNKRVEDIHPTVPNPYNLLSGLPPSHQWYTVLDLKDAFFCLRLHPTSQPLFAFEWRDPGMGISGQLTWTRLPQGFKNSPTLFNEALHRDLADFRIQHPDLILLQYVDDILLAATSELDCQQGTRALLQTLGDLGYRASAKKAQICQKQVKYLGYLLREGQRWLTEARKETVMGQPVPKTPRQLREFLGTAGFCRLWIPGFAEMAAPLYPLTKPGTLFSWGPDQQKAYQEIKQALLTAPALGLPDLTKPFELFVDEKQGYAKGVLTQKLGPWRRPVAYLSKKLDPVAAGWPPCLRMVAAIAVLTKDAGKLTMGQPLVILAPHAVEALVKQPPDRWLSNARMTHYQAMLLDTDRVQFGPVVALNPATLLPLPEEGAPHDCLEILAETHGTRPDLTDQPIPDADHTWYTDGSSFLQEGQRKAGAAVTTETEVIWAGALPAGTSAQRAELIALTQALKMAEGKRLNVYTDSRYAFATAHIHGEIYRRRGWLTSEGREIKNKSEILALLKALFLPKRLSIIHCLGHQKGDSAEARGNRLADQAAREAAIKTPPDTSTLLAGKRTADGSEFEKRTADGSEFESPKKKAKVE
